United States Patent Application Publication US 2023/0272435 A1 - sequence listing, part 7

SEQ ID NO: 24017 - protein, 523 aa, synthetic construct
MRFFSYGRKSVFSDKSDSIDNQFRMNREYCESKFSGQVDSWQQFSDEDFTGANTSRPDLQRMLSFIKGGFCDVLVVYQLDRLSRDVRDFANIYALLEEHGVMFISIKENIDTTTPIGRAMMYVTVVFAQMERETIAARVTDNMLGLAKKGYWTGGNPPVGYVRKHIVVNGKKHCSIEVDPDGARYVTQIFDTFLAYNCSLQGMETRFKNQGIRTQSGKFFSTTQLHKMLTMPYCVEATPEVYDFYAAKGCIMDPGSPREMWDGSVGVIIYGRSTEKNKKHQAQPPEKWTVCLGKHKPFMPAEKWLAVQSRFTQNKCIKDAKWPVPLLKGVLRCKCGNLMQVSRKKKVDGTCSSWYYCRKRMRQGVDACDMGQIKCDLLDEKVLELFRGITADPALIQKFVKAEAPADVPDLKAAQARVSACERKIGRLAASLALAEDSAASKYIIAEMERLDVELGALKREASLAEMESHRAAASAKDAKATAAEIAKLIHGLDGFDDKEKNAIARAVIQECTWDGERLFIKL

SEQ ID NO: 24018 - protein, 547 aa, synthetic construct
MKLKQQDKITALYCRLSRDDEYNGDSMSIQNQKELLLKFANDNGYFNTEFFVDDGYTGTNFDRPDFKRLIEAVEDGKIGTVIVKDLSRFGREYLQTGFYTEMFLPDNDVRFIAINDSVDSDDGDNDFAPFKNIINEWYAKDCSKKIRAVMKMKAQRGDCLTGIAPYGYMKDPNDKTKLIPSDRADYVKMMYRMAIEGCSCGEIATKMRSMNLPIPKADNYIRNGLENCASYPKYPYYWLKATVKTILLNPVYTGRTVALRYTNKSYKNKKRIERPEDEWVVTENTHEALVSREDYDTVYKRLSVKTRDKVTNPDNIFRGLVMCPDCGKVHGFSKRYDNRNSKGVYRCQTAIRYGKEYCSSHYITFEQLYDVVLSDVQHHATLFEENADKYIDILSKASETDKIKERNALIKEQDKAKKRSGELDTLLQKIYEDMVFGVISKERYMSMSENMEKELSVLKARSNEISAALQENDNNRTNAEKFAELIENYIGITELDYELVHTLIEKIYIHERENIDGKAVVRVDIYYRFIGSNADSNSPTEICRRRS

SEQ ID NO: 24019 - protein, 581 aa, synthetic construct
MSEKIINCAIYTRKSTEEGLEQDFNSLDNQYEFCTNYLKSLNDPALQLLPARYDDGGYSGGSLNRPALQRLLADIQCGLVNRVIIYKIDRLTREIRDFFKLLDIFEKYNVEFVSVKENQYYNTTTAIGRLMVNMFLVFAQFERENAGDRIRDKIATSKAKGMWMGGCPPYGYDIGDRCLVINETEAQNVRFIYQTFCNTHSLADTTDALNSGGIRTKRYTTRQGRTFGGRKFSVKTVQRILQNPLYKGMVAHRGKQYPGQHAAIIDAAQFDMVQAVFAAHKEKRKTRRPKMPSSGGERETAALTGFIFCGCCGSAMTPSYCCKGDIRYHYYRCYRRASKLEDKCPINQIRTSEIDRVVMEQVLAILKSRDFFVQYISHHHEFDVSTAFALFNSLDDVWNSLFETEKRRILRELLAKVTIYKDKIVLDVKKAGLAGVFAELSQNNRLAEVEYKENETFQISVAYRATRLANGAKIIVPATAKEESRFNGSLRLARQIAKGFAWRKMMESGLSLQELTASAKTNERDIRFAMRLSMIDPAVVESVLSGKSPEFLTYAFMKKHPIPLLWSDQRKLYGFEERKQQ

SEQ ID NO: 24020 - protein, 546 aa, synthetic construct
MKRTAIYARYSSDNQRAESIDEQIRACRYYAQQTGLYDIVAVYKDEALSGYKNSHKRDGFAQLMADAEAGKFEAVMVYELSRFSRNGSDTIVNTEKLARLGIEFVSVREKLDQTPEGRMMMFVITGMNEYYSANLAIETMRGLKENAYQAKHTGGIPPLGYDLDSNGHYIINPEEAAAVRLIFDMYLEGNGYTAICDELNRRGYRTKRGTLFVRNSMYDLLRNEKYTGSFIYNHMAKAKNGKRNRHAYKSDSEVIRVENAFPAIISKEEYRKVLKLMEQNKRKGARNAAVHDYLLSGKVYCGHCGKSMYGETRYRKEYSYSYYSCNGHKSKICGKHSIRCDKLEAEVIRQLNELFFSDEILDRVSEKIYDDSQNHFMDERAAILRKRSADIKKKIDNGTKAILDGVDSDELRSAVKELSAQKKQIDQQIVQIEAAADNNGRTFEEVREMAKNFSDISKLPRDQQKRIVQKFIWRIYVYDSENPDDGDIVKIVLAPTEAARDELNSMAEDYVAITDMLTSTNGTSQGVPMKNPTCFSEKAGFYFLIS

SEQ ID NO: 24021 - protein, 578 aa, synthetic construct
MGYVTKKAAQRFEEKKAAIYVRVSTQYQVDRASLPVQREELINYAKYALGISDYVIFEDAGYSAKNTDRPDYQQMMARMRTGEFSHLLVWKIDRISRNLLDFSVMYAELKELGVVFVSKNEQFDTSSAMGEAMLKIILIFAELERKTTSERVSAVFVSRANDGIWNGGKVPYGYSYDKESKTFSIAEDEAKIVRLIYSLYESEKSIVRVARIMNERGLKSRAGNDWSPTTVHMILSSPFYSGTYRYNYRDESNTKRFREKGKDEWVLVENHHPVIVSPERQAAVGVILESKRYNKNATYQRKNVHVFAGLLTCGCCGSTMAATTDKVRADGWRPSMYICSRRRKSEDCTNKYVSDVSLGPFVLNFFANLIKASNSFGRTTSIETLEKKLLRGEALSRVDHIERPGLEELYNHLRSGFDEKRFEPPTIAATETSADLSERDLLLSEKRRLERALNRLKTIYLYGDDEIASKDFNIERERITKALSEVDSRINELDIANAFDLSLSDEAFMQKASQFILTQQLLDKRYVNYERFIRKIDPKIVKDFLNETVSNFCIKDGLTTSILLKNGIELRFSYKTAE

SEQ ID NO: 24022 - protein, 502 aa, synthetic construct
MEIQIREGNSRQKRKLKVCAYCRVSTDADEQENSLENQIRHYEEAITSNPDYEYAGVYSDFAISGFKEKRPGLQKMLADARKGKIDLILTKSVSRFARNTSIVLEATRKLKELNVGVFFELQNINTLSGEGELMLTILAAFAQAESESGSVGAKMVYQRKYEAGIPVQYLERSFGFKKDERGVYIADEEEAVWVRKIYEMAADGYTPASIKRHLNENGVKTVGGAEWIDSTVFRLIENEIYKGDYIMHKHFVNEERKLVRNRGEVDAWYIEDDHEAIVSPELWQKAQDALEAKRDYLAESSVIEEFTEENYPYMNKIFCARCGHPLYKRIYSNGNRLNWGCSGTKRYGKSFCEGINIPDGVLRGAWNFDENMYIGEKPTDKGKKEFTYLKEASWKRRHKKKEPEPIPENTETEYPYREKIFCGLCGSRLVRHVNTKSHKVIWVCNGRKRKGKDFCDGTRVPDTIIKGWGEIKKDIYIQRKDDKNGKKRYSYTSKKPKGADRA

SEQ ID NO: 24023 - protein, 464 aa, synthetic construct
MARSVTVIPARSQKVQTGHKAVQEKKIRVAAYCRVSTDQEDQLHSFEAQVEYYTKYINEHENYEMAGIYADEGISGTNTKKREQFKKMIADCEGGKIDLVITKSISRFARNTQDCLAYSRKLKNLGIGIIFEKENINTLDSTGELLFTILSSLAQDESRNISENCKWGIRTKFKNGEMHLNTFKFLGYDKDENGKLVINKEQAKTVRRIYRDFLIGINPAQIAKELTEEKVPGCLGQTKWYPSTVTGILKQEKHMGDALLQKTYTADFLTKRQVRNNGEIAQVYVKDSHKGIIDKQTWNAVQEEFDRRERFMESHGTDRYSYGADCMPFCEKVFCGECKSLFTRHSWRLRGIVQWQCKNHRKDGKVACMNAYVDNADLEKGFVKAFNRLVTDRDKHMERWQQMKSDGTPLEKIRAGQMMEAVENEPLTRFVPEIAQLVLCEVTVLGAKKYEFFFLEGSKVKVSV

SEQ ID NO: 24024 - protein, 525 aa, synthetic construct
MTKKVTTIPALLNKQSTNQVGTIKKRRVAAYARVSTDQEEQLTSYEAQVDYYTNYIKSRDDWKFVDVYTDEGISGTSTKHREGFNKMVKSALDGNIDLIITKSVSRFARNTVDSLTTIRKLKDIGCECYFEKENIWTFDGKGELLLTIMSSLAQEESRSISENVKWGHRKRFADGKVSVPFNNFLGYKKGEDGNLVIDEEQAIIVKRIYREFLSGSSSVAIAKGLTNDGIETPGHKQKWYATTVRSILTNEKYKGDALLQKHYTVDFLTKKQKINEGEVQQYYVENNHPAIIEPDVFEMVRLEIDRRLMLKGKYSGTDILTAKIRCGECGGSYGAKVWHSNDKYRRVMYQCNSKYSGKEKCKTPAIRSEDIESRFVNVVNILIESKDEIISNLEKVLDKICNKKELLEEKEKLENSLTEQVEKIQDLIDINSRVAQNQEKYKKEYDALIKNYDETKCKFEQLEIKLSQQAAKHQMIKDYINTLKKQEKLLTKFDGLVWGSLLESATIKDKDVIVFRFKDGTEING

SEQ ID NO: 24025 - protein, 453 aa, synthetic construct
MRKITKLETKKIDLPKLKRVAAYARVSVERGRTLHSYSAQVSYYNDLIQKNPEWEFAGVYADLGISGTGIEKRNDFKRMLQDCEEGKIDIILTKSVSRFARNTVDLLKVVRHLKELGIEVRFEKEGINSLTGDGELMLSILASFAQEEVISTSNNIKWSIRKKFESGRPQCRYHIYGYRWDGDNLVIEPEEAKIVKLIFEMYLNKVSAERMEIELKKMGVIATNGGYFNIGTIRDMLKNITYTGNLLLQKSYTPNPLVRRKKENTGQLPKYYVENNHEPIIPLEMFMQVQEERERRKAEGQRANFGKNITCFSCRVKCPICGRNYMRNSRSKNSDGIKAHIWTCGSRLTGGAKACPGKNIHEIALKRVSAKVLGLDEFDSNAFDEQIEKVIVVGDDLLEFHFNDGKIVSEKWEYNARKEYWTEEKKKERAEKLRKMWREKNDKKSNNNTSIIK

SEQ ID NO: 24026 - protein, 525 aa, synthetic construct
MSNRAVKVIPPTISALTRMPMASAAKRRVAGYARVSTDSKEQLTSYEAQVDYYTRYIQEKPDWEFVGVYTDEGISAVNTKKREGFNNMVRDALDGKIDLIITKSVSRFARNTVDSLVTVRKLKEKGVEVYFEKENIFTLDSKGELLITIMSSLAQEESRSISENVTWGQRKRFADGKVSVAYKHFLGYKKGADDIPQIVEKEAAIVQRIYSLFMAGKTPGGIARLLTDEGLPTPAGKAQWRASTIESILTNEKYRGSALLQKKYTVDFLSKKMKPNEGEVPQYFIEQSHEPIIDPVEFELVQAEFARRKEIGYRYSGHGIFASRIVCGDCGAYFGSKVWNSTSKYRRTIWQCNAKFKNGEHCTTPHLDEEEIKARFVTAYNALTADKTQLLDDCRFMQTVLSDCTALDTEIATLLEELDVVGGMIRKCIDENSRDAQNQEEYAARYNGYADRYEKAKNKLETLRRDRALRQAKADGIGAFMFAISEQDALTDFDEKLWTATISTVTVHSDGRMIFHFLTGADIEA

SEQ ID NO: 24027 - protein, 438 aa, synthetic construct
MERAIEQVQFYVRPSDRRKRVAAYARVSSGKDTMLHSLSAQVSYYSDLIQKQRGWFYCGVYADEAITGTKDSRENFQRLLDDCRAGQIDLILTKSISRFARNTVTLLTTVRELKDMGVDVYFEEQNIHSMSGDGELMLTILASYAQEESLSVSENCKWYWRQRMKDGHMVGLRRMFGYNIEHGVITINPVEAAIVRSIFDQYVSGGSTVGIARALEAGGVPTVSGGRWNGRRVRDMIKNEKYIGNALLQKKYVADHLSKRLVRNHGELAQYYVEGTHDAIIDPATFERAQRRIALNTEKCNVQKPTTARYPFSGKIVCWNCGKHFLRKTARGRISWQCTTFQFEGKSACPAKQIPEPTLIALCCETLGIAEFDERVFSRRIRELHVTALNEIEFCFSDGHTETKIWKDRSRRESWTEEMKEIARERSIQKWRDLHNEQ

SEQ ID NO: 24028 - protein, 516 aa, synthetic construct
MENCVIYARFSSHGQNEQSIEAQVRICKEYAESKGLDVVNLYTDKARTGTNDARPAFQKMIADAKTGAFQYIIVYMFDRFARNRRDSIIYKEMLKEKYGVKVISALEPIAEDEGGEFYEMFLEWNAEKYSKRLSKRVRDGLDTSVANGTFCGGFMIYGYQIELEPVPGKQGKFIKRVVINEEEAKVMRYVFEQYDKGVSKKQIAADLNAQGVRIKGKPVTHKTFDHYMTNPKYTGEFYFGDRFCTNMYPAIIDKATFERVQKRLAENRYFLGGTETAKVPYLLTGKLFCGHCGTEMVAGGGKSKTGKKYYYYECKKKKKKLCSKRIEHKDQLEKYVVQNVIDFLSDDANLKVLVKDVLKYFDSRTDESELKSIRKRIADIQEEADAAATAFIEAKSQLLKQRIEKRMQECEILLADLEKLKAQLVLERGQKLTEKDIVSFVKMILQGDIDDIDFRRRLIDNLVYKVYISDDNTYIYFNIKGGKGIEEITFEDTKSALDKENRVQTQSDPPRQEQPV

SEQ ID NO: 24029 - protein, 502 aa, synthetic construct
MEIQIREGNSRQKRKLKVCAYCRVSTDADEQENSLENQIRHYEETITSNPDYEYAGVYSDFAISGFKEKRPGLQKMLADARKGKIDLILTKSVSRFARNTSIVLEATRKLKELNVGVFFELQNINTLSGEGELMLTILAAFAQAESESGSVGAKMVYQRKYEAGIPVQYLERSFGFKKDERGVYIADEEEAVWVRKIYDMAAQGYTLAAIKRYLNENNVKTVGGAKWLDSTVLRILENEIYKGDYIMHKYFVNEERKLVRNRGEVDAWYIEDDHEAIVSPKLWQRAQDALEAKRDYLAEGSVIEEFTEENYPYMNRIYCARCGHPLYKRIYSNGNRLNWGCSGTKRYGKSFCEGINIPDGVLRGAWHFDENMYIGEKQTDKGKKEFTYLKEASWKRRHKKKEPEPIPENTETEYPYREKIFCGLCGSRLVRHVNTKNHKVIWVCNGRKRKGKDFCDGTRVPDTIIKGWGEIKKDIYIQRKDDKNGKKRYSYTSKKPKGADRA

SEQ ID NO: 24030 - protein, 535 aa, synthetic construct
MNSYDISFRPEEVIQYLRKSRSDDPNMTIEEVLEKHEHMLRDFAVNHFGAPVPDCNVYREVASSETIDGRPEMLRLLRAIESPDIRAVLVVDVQRLSRGDLEDAGRLMKLLRYTNTQVITPMKTYDLRDEWDRDIFERELKRGNEYLEYFKKIQARGRLQSVQEGNYLGSKPPYGYDRAVIRIGKKNCPTLAVNKEQADVVRLIYELYVNKDWGAQRIANHLDNLGIHPLHNAHWNPAVIKDILRNYHYIGKVVWNRRKTITVVDNQEVYKTRPWNENMLIFDGRHEAIISEELFHAALARQGRSHRCRPDTRVSNVFASILHCSCGYSMSLRHDGRGSLRLSCDDQRHCKSGSIGYEELIDYICKVLTAYIDDFKIKVKHDNANEVDIHRALVTDLEARLTALEAKEVKQWEVYSMEGMPRAIFDKLNKQVKEDKAEVERALKQARKDSPDPVDYRERIAKFGDALNALQNPAASAEIKNQYLKAIINDMIYTRPGAVRLTADNCSDYGINYKDMAKRGGWYSPPFRLEIKFRF

SEQ ID NO: 24031 - protein, 453 aa, synthetic construct
MECVAYMRVSTEKQAEEGNGLDSQKRDIELFCRKNELVVSDWYVDDGYTGANMDRPELQRLINDCIKKRVKCVVAFKLDRISRSMIDGLYIIERVFQPNQVLFKCVHDSVSYDSPMEQAYTQMMAVFAQLDKNTMMLRMRGGMLERIKQGYWIGGANTPYCYNYSKEKGILIPIPERKEQANRALDMFIGGYSDLYIKESLGFHSEVLVRNVLTGVVNIGMIPYKGNVYQGLHEPIFDKERFELAQEIRKSRRKNKTACHTDANLLTGLCYCGVCGCKMRYQKWTHGKHKIYCCSRDKAMKYLPNFNPDCNNSLEWAADIEKQVESEILKISLNLSECKPIEKQSKLEIMQSQFEKEQVKLKRLYVLYSDGNDTVLEMIKSTEKSISEMKVKITEEEKNERNSQKKEVVYENIKKLADVWAHIDKKEKNNILKSIISRIVIVNGDVEIQLKNF

SEQ ID NO: 24032 - protein, 559 aa, synthetic construct
MSKTVAIYVRVSTGKQADRDSIPFQIQECSNYVKHFLKTENFEVFKDAGRSGKNTHRPEYQRMIEKVKSGMISHVVVYKIDRISRNLVDFSIMYNDFKEHKVAFISLNEQFDTSSAIGEAVLKIILVFAELERKLTGERVRDIMMNRALEGKWNGARVPYGWDWDTKKQCPVHSDTEAEYARMMYRLYDECHSTCVVRDYCNAHDIPTKRGGEWTSKTVADFLRNPMNVGDYRYNYRKSARGKRNDPSEVIYVKDVFPPLIDRELYERVTHQMDLNTFGLGKDGRKVVSKKTHVFGGLVVCGLCGAFYHSDADVVRADGFRPSNYRCGAHNKKIHCKAKGTSDVKLGPFIFNYISNLVKASKSKKLLHSVSDLEQILLTGPEFEQVAGIADDGLDVTFDTIMHGFKPKRYTAAPYTVIRSGDSDALTAKRDKTIRALERLKKLFLFEDDAMSEKEYLMSKRKLEGTLSDIENELSALEADTADTKYDDMSFISTASGFLIAHQIASGEHINYRELARAVDAKVLKDFVNSVIERIVLLDGRVASIEFKNGLVHEFLYRE

SEQ ID NO: 24033 - protein, 404 aa, synthetic construct
MIIKKVMPKIPVAKKRVAAYCRVSTFRNEQDESFETQQKYYEELIQSHPDWELVKVYADRHSATRVKNRPGFQEMAAAAEAKKLDIIICKSISRFSRNMVDCQQYAKWFRTLGVTIIFEEQNIRTDDPTCDFVLSILAAVAQDESHSISENEKAAYASRFARGEYNLGNNRILGYDCVDGELVPNKDAWIVKEVFRRFIEGESYRQIAKGLEELGAQSLHSKKGFGVETLRYMVSNETYVGDKRLQKKAPLDYLTKKPNPNQKVESNYLWDDHEAIIDRETWDKAQEILEKRKELAKVGIHKTNREHHFLYGKVFCGECGAPFLRRTLKAAGGFKTQSTYKAWNCRNRQKGKGNERCGNRFIKEEELIDAILRELEWLNMDQERFEKEVSKVLVYPDHIEVEKN

SEQ ID NO: 24034 - protein, 523 aa, synthetic construct
MELSRNITVIPARKRVGNTAAAEQRPKLKVAAYCRVSTDSEEQASSYEVQVAHYTQFIQKNPEWELAGIYADDGITGTNTKKREEFNRMIQDCMDGNIDMIITKSISRFARNTLDCLKYIRELKEKNIPVFFEKENINTMDSKGEVLLTIMASLAQQESQSLSQNIKLGLQYRFQNGEVRVNHSRFLGYTKDEEGNLIIEPAEAEVVKRIYREYLEGASLLQIGRGLEADGILTGAGKTKWRPETLKKILQNEKYIGDALLQKTYTIDFLSKKRVKNNGIVPQYYVENSHEPIIPRELFMQVQEEMVRRANLRGGKGGKKRVYSSKYALSSIVYCGQCGDIYRRVHWNNRGYKSIVWRCVSRLEEKGSECTAPTINEETLQAAVVKAINELLTKKEPFLSTLQKNIATVLNEENDNTTDDIDRKLEELQQQLLIQAKSKNDYEDVADEIYRLRELKQNALVENAEREGKRQRIAEMTDFLNEQSCELEEYDEQLVRRLIEKVTVFDEKMTIEFKSGVTIEGRI

SEQ ID NO: 24035 - protein, 510 aa, synthetic construct
MSYFIYARKSRKDADLESLGIDVLERHITTLLELAKTLSLPIGAIYREVVSGDSIDSRPVMSQVMAEVESCMWDGCLVMDVDRLARGDTIDQGRVQRAFFYSNTKIVTPNKTYDPANEYDNEYFEFSLFMSRREYATIKRRMQRGRERSSSDGYYVGNIPPYGWRRVIAPDGRHFSLAPDPTESPVLDLMYDLCGNKQYGYQKACTYMAEMGILSRNGRPFTPSTLKGIISNPANIGKVRWGHRKTVRTVKDGKISRSRPHSSDYILADAVWPPRINADLFQRANRSKGSCSAPVRDDRPIQNIFAGLVRCSQCGRLMVRKKAHTKTPYDILICQYTNCPTVGIRIDELELALLEWLRNYIDKYELTDALPEDAENIATKEAIVKNFEKEHETLLKQRESLFDFLEQGIYTKEIFIERSNALEQRVKECMEHIISAQNDLHATLALQANRKNFVPRCKNLLDEWSKLTIPEKNSALKVLIEKIMFTKTKRNKKGQDRSDFEIDVFPKVPK

SEQ ID NO: 24036 - protein, 546 aa, synthetic construct
MGNRVRAAAYGRVSTEKEDQANSLNSQRNYFTEYIHQHEGWELTGIYYDEGISGTQTANRKGFNRMIRDAMAGKIDLILTKEVSRFARNTVDTLSYIRKLKAKGVRVIFTIDNIDTMDGDGELRLSIMATLAQDESRKISERVKWGQKRRMEQGVVFGRDLLGYTVKAGRLYVNEEEAEVVRAIFHKYTNEQKGTYVIARELMEEGIQPKRGDTWSNTMILKVLKNEKYAGDLCQKKTITPDFLSHRKKKNEGEEEMVYLKEHHISIIDRELWDRTQRELKRRSLSKNSKSLQGTRYWCSGKVKCGECGGSFVVRSKKRGDGSNYRTWRCYNHANHGKVKKEGEGNRPCCDNTAVSDLALRSCVCYALKQVDFDRETVITEILQRIKRLDQKDIYMEDISFIERKIEEIEGKKKKCVDLVLEGMLDTKELAEQKNWYDGQKEKLEKRLLKAKKEKAAEEERKSCFDNYKESVDRILNFHGAEDALFRELVDKIVVYQGQMVCVWIKYVPFGIKMRIHSSGKRDNYNTEILEAAIVEDGPEDILEIL

SEQ ID NO: 24037 - protein, 453 aa, synthetic construct
MIKGACYVRVSTDNQLENYSIEEQTDRLKAYCKAKDIQIVKIYTDGGYSGGNVNRPALQQMLQDIGKGLIDSVIVYKLDRLSRSQKDTLMLIEDCFLAKNVDFVSVNENFDTSTPFGRAMIGILSVFAQLEKDQITERFTMGRIGRAKNGYFHGGGNAPTGYDYIDGELIINDYEALQVKDLYNRFLKGYSIHNCWQYMQQKYGGWSSEVLVRNVLRNELYIGKVKFKGVAYQGNHQPIISEDLFRQVQDLFNSSKRSSNTFKRSPFKASTLLSSIVYCGKCGARFHGEHGNYSCYSRTKGDKKYIVDPNCKNKKWKIEELDKLVLDYITRLDFSKLQNSHPAPVPVTDYSLRLTEIDKQIEKLIDLYQVSGIPLESIQKKMDALTKEKEALLNVSKPKNVPITTLAEMITARDTLMSLADTGSLDEKRACLTMIIDRIIIDDDNVNIKLKQL

SEQ ID NO: 24038 - protein, 548 aa, synthetic construct
MTTKNYPDNITALYARLSQEDALDGESNSIANQRKILLKYATDNGFPNPTFFIDDGVSGVTFDRPGWNEMIRLAEAGKVQTVIVKDMSRMGRDYLKVGYYTESFFAERDIRYIAINDGVDSEKVDNEFTPFRNLFNDFYARDTSKKIRAVMRSKGNAGEHLCSNPPYGYRKDPADKKKWIVDEEAAEVVKRIFDLCIAGKGPMQIAKILTADKVLTVKAYYAKRDGKPMPDNLYRWDYKSIAGILERPEYTGCTVNFKTYSKSHKLKKRLQNAPENQRIFPNTQPPIIEEQVFERVQELRANKRRPTKTGRQGLFSGLLYCADCGEKLYFCTTNSFTPKQEHYVCSNYKSNTGTCSAHFIREETLKLFVRQRIFDVTAMFIDDIQGFQKIVYQQKFTEAEKAVKRQKKELEQERKRIAELDRIFKRIYEDDINGTISHERFLKLSAEYEAEQKELTEFVQKEQAAVNTYEQDKSDFDSFAAIIRKYVGIRELTPTIVNEFVKKIIIHAPDKSSGHRRQKIQIVWNFIGELEQDKDKQTIERQRKSKTA

SEQ ID NO: 24039 - protein, 588 aa, synthetic construct
MKRAALLLRCSTDAQDYERQKLDLLDTIKGMGYTTSDDLVFGQYITGKDDVRKKDRESVAECKQAVREGKVDAIFINEVSRLSRDSIAGRLFIREFNDEYKIPVYFRDLGMWTINPTTRIVDRSFETMLGFHFDMAQNELKSMKTRFASGKRKNAREGKTIGGAVPFGFYKDEDGKLQVDEEQAQVVRLVYNKYLEDGGSIPSVCRYLLSCGYDKKFNKKFGTGSVRNLLRERRYIGEQRYNLVNPDEPDEAKKQEVYIYKVDSIIDTTIYNKVQIKLDKNRTTETKKVNKDKKVHLLAKLITCPICGDSYTSKTASANKSGERYRVWNYCCVSKYNFSECTSDITLNADNIESIIWQLTKKEILALQELSLEERQSKIEEAEQKLASYKDELDVVAKSIDKLNAKKKKLVALFLDIEDDDTAIFNEQREAINKEIDSYNNRIQFLNTEITICEGNIARFKEADFTDEVLDKIEQDPLKKKGLIKEYIKVIRPYRLTKARLILEVESKQTNYCILFEPRNSKRRCWYIQSSLAQWQNGLLKTSTAPLGNFFYIPMASLLLDEPDDLDAIASFEDMKEICSINNYVIEY

SEQ ID NO: 24040 - protein, 515 aa, synthetic construct
MIIGIYPRKSVYRDNSESIKVQIKLCKEYAKIIYKGQQIDFRIYGKDEGFSGKNTNRPSFQELMRDVKSNILDVVMVYKLDRISRNVSEFSEMYDIMHAHNVTFLSVKESFDTSTPIGRTVMYILAAFSQFERESTSERVADNMQSLGTSGKWTGGKLPAGMTSIRKFVDGKEHSFLQVDEEKISLVKMLYSMYLDGYTMTGLERYCRDHGIRTESNKFLSTSQIHCILSNPVYCTNEPEAYYYFKEHGHSLPEISLFDGKHGLISYGRTKQSGPEKRIVNDVFSVAVGIHEPVIRAHDWITVQKRFGENKFFRSNKYEVGILKGVLKCGCGARMDIRTYVKNGIQFSYYYCARMAREGKKVCNTGYTKVSDIDDAFLNKLLQIKYNPDMISIRKSELEYVDINSLTKELHTIEQSIENLTTALAGNTESSAASYIIKQIEKLDKSKRTLEDSLCAAEYNNQISQNEKEAKDIIYNYICSLLDNFESMSYREKNELVKKTVKQCVFDNDGLHIIF

SEQ ID NO: 24041 - protein, 497 aa, synthetic construct
MDAIYARQSIDKKDSISIETQINFCKRESTSPDGYKIFRDKGFSGKNMKRPDFQRMLTEIRSGIIKRVIVYKMDRFSRSILDFSETWNILQEFGVEFISMNEKFDTTTPMGRAMLYIIMVFAQLERETISERCTDNYYERIKNGVWPGGPAPFGFKNAEIINEGYRMSTLNPDSDLEIMIDNFQEYEKEGMSLGKLAKKRTQQNLKTNKDIVWNNISLSRLFRNPVYVKADILVYMYLKEKGYSFSNPVEEWDGTKAAHVVGKKQYISNGNRINTKAPRQTVSLLNIPGTIDSSLWLACNRKLDHNAQIKNSGAGKHTWLTGLIKCGQCGYALRITTYKNKENKIMKYLMCSGHSNLHCCDVKKFDLLVEDLEELVAEELNKAIEETKVEQIEMTDQTMDNDKKIRLAEIEEKIDRLIQAISEATNITMKYLNKEIEKLDSEKKQIMGNLEGHVQKRDRIKPIVFSELDFEGKKQIAQNYIKKILVYKDKMDIIWKV

SEQ ID NO: 24042 - protein, 489 aa, synthetic construct
MRIAAAYIRVSTHMQEELSPDAQRRLLGEYAKRNGMILSNEFIFMDKGISGKKAEKRPDFMKMISMAKQKPAPFDVILVWKFSRFARNQEESIVYKNLLRNKCKVDVVSITEQTGDDMFGKLIERIIEWMDEFYSIRLGEDVTRGMVENAMRGNFQSSPALGYQVVRKGELPKKVPEESRPVEIAFKKFVYSSMGFLEIARHLNSLGYRTKKGKLFEARGVKYILMNPIYKGWLRWNYRNPDGTKKSKDDWIIVKVPKLEPTVSEELWDAANERIQLMSKIIVKKSKPSSVKRHWLSGLIKCSACDRSLSTSVHTDKRYGRTYINFQCYGYLKGKCSISHQVSEKKIVPIVLSMLKEDSLKKEVPFEILTNTKSSDEISIIKMQLDKIELKELRIKEAYRNGIDTLDEYRENKNILSMERSSLQDKLESLSVPEEEIKADMPNRIKSVYDIVSSESTTKDEKYAAINSIVKKIIYRKSDGEIDIYYYYS

SEQ ID NO: 24043 - protein, 578 aa, synthetic construct
MKKVSKIEATKTVAPRLLKVAAYARVSAETDRTIHSLSTQISFYSDLIQKTRGWQYVGVYADNFISGTEIERRPEFKRLLQDCEDGKIDIVLTKSISRFARNTVDLLETVRHLKELGVEVRFEKERINSLSEDGEIMLTLLASFAEEEVRSLSENVRWAVKKKFERGKPNSYCLYGYRWDGEKFIVVPEEAKIVRLIYQNFLDGLSAEETEKQLEQMGVKSYTGQHFSNSSIRAILKNEKYTGNMLLQKEYTENHITHKSKKNKGELPMYWVENSHEAIISLETYQKVQDEIARRRELGALANWSIPTNQFTSKIKCGCCGASFVKSTRRNKAKSSQLGDKISFYMCATKKKGKSPCTSGTIRDSVLEEECAKTLGIPEFDAETFSAQVKQITIPATGTMIFEMADGRIVEHHWFRNAKKDSWTPELREQASAYRRRNPAKGKKGVTCLTAKIRCGCCGSNYRRQAYTNAAGEKLARWYCANQKEKKAECHMPGVDEIFMKETLAKALGLDVFDETAFSEQVDYIKITDIGKLTVFFKNGRTYNGTYAANRYGAPFTEEKRRKHGEAIRKYWRERNGK

SEQ ID NO: 24044 - protein, 526 aa, synthetic construct
MANKTVTTIPPTIARFTATPLKEKAKRKVAGYARVSTDHDDQFTSYEAQIDYYTNYIKSRDDWQFVSVYTDEGITGTSTKHREGFKQMVADALAGKIDLIVTKSVSRFARNTVDSLTTIRELKENGTEVYFEKENIWTFDSKGELLLTIMSSLAQEESRSISENCTWGQRKRFADGKVTVPFNRFLGYDRGEDGNLVVNPEQAVTVKRIYRLFLEGKTPFGIAGTLTEDGILSPGGKERWNASCVKSILTNEKYKGDALLQKTFCEDFLTKKFKVNQGEIPQYYVEGNHEAIIDPETFELVQREMARRTRGKNRHSGVHIFSGKIKCGDCNGWYGAKQWHSSDPYKRTVWQCNHKYKNNPHCTTPFLTEEDIRARFITAANTLLAGRRKAICAFEQAQATVLDLTGLLAEQASLNEEMQIVSKMMQDCIHQNATVAQDQGEYQKHFSSLNERFETAKGKHEEVTRQISDKQSRKAEMEDALKLLKKQDGEITEFREGLWTGLLDYATIYADGRMTFTFKTGQTIES

SEQ ID NO: 24045 - protein, 543 aa, synthetic construct
MTDKITALYCRLSQDDMLQGESNSIPNQKAILKNYAEDNGFCNTVYYVDDGVSGTTWEREGFKAMLADIEEGKVGTVITKDLSRLGRDYLKAGEYIEIIFPDHDVRYITINDGVDTLKSENELMAFKNIFNDWYARDTSKKIRAVFKAKGQSGKHLSNPIYGYKHSETDRNLWLIDDEAAEVVRKIFHLCIDGYGPAQIARILTEEGIPTPTAYALSQSRDNGHKNANLSRWGMETISGILEKPEYAGHTVNFRTHVKSYKNKKRVDNPKEDWLIFENTHEPIVTQQEFNLVQELRKNKRRPTKHEEVNSFSGICYCADCGKKLYLCRATTMTEDQEHLKCGTYAKDKNGCTIHFIRTTVLKEIILGELNKMISFVKNNEDEFVQAAMDNSVQKQSSELAKSRKKLKEAEKRIAELDRLFTRLYEDNVSGKISDERFSMMSAGYEDEQKKLRATVAELTSYIETSEQKSADVTTFIKAVQKYEHITELTPEVMHELIEMIVIHAPDKSSGHRTQEIEIHYRFNVAVTTAVADSMKYDKKRKAA

SEQ ID NO: 24046 - protein, 523 aa, synthetic construct
MNICCYGRKSIYSDHSDSIDNQFRMCRDYVEMKFSGQVDSFLEYQDEAFTGANIKRPDLQRLLVDIAAGNCDILIVYQLDRLSRDVRDFANIYAILEEHRVKFISIKENIDTSTPIGRAMMYVTVVFAQMERETIAARVADNMIGLAKKGYWTGGNPPEGYVRTRIEANGKKHCSIVPDPEGVKYVNWIFDTFLQNDYSLQSMETAFKNQGIRTRRGAFFSTAQLHKILTMPYCVQATPEVYDYYVARGCQMDPESPRESWDGTCGVMIYGRTTQKNKKHQMQPPEKWLVCLGAHEPFMPADKWLAVQARFCRNKFDKTMKYDVPLLKGVLRCSCGSIMCVARKKKKEGVSSWYYCLKRMRQGKEVCDSHQIKCELLDQKVLELLQSIERDPALIHQFAEQNAEVLAGPDPKVLASKISTCQTRIDRLVSSLSLAAESSAQKYILAELERLDLEIQALRREHNLALAVERKRSLQQQDTLSKVSEINRLVSDLDSFSAAEKNAIVKDVIKKCVWDGESLSIML

SEQ ID NO: 24047 - protein, 523 aa, synthetic construct
MAKSVTTIPATLSRFTAAPINSTKKRRVAAYARVSTDNEEQLTSYEAQVDYYTNYIQGRDDWEFAGVYTDEGITGTNTKKREGFKSMVADALVGKIDLIITKSVSRFARNTVDSLTTIRSLKEHNVECYFEKENIWTFDGKGELLLTIMSSLAQEESRSISENCTWGQRKRFADGKVTVPFKRFLGYDMGPDHNLVVNPEQAKLVKRIYGMFLQGQSPFQIARTLTEEGIPSPGGKDHWNPSNIKSILTNEKYKGDALLQKSFTVDFLTKKKKANEGEIPQYYVKDNHEAIIDPETFEMVQTLMATRTKGRNRKSSVSIFSSKVKCGDCGSWYGPKVWHSNDAYRKVIWQCNHKFDGQKCATPTLTEDEIKELFLRAANQVIDQKEQFIAIYEQVLSRSLDTTALEGELTELEAEINIAAELIEECIKENAHIALDQAEYQKRYDGLVARFNKAKARHAEVTDLIAERTARRHQIETYLKELRSREPLMEFRETDWLAMVDYITVYSKDDIRVTFKDGTEIKA

SEQ ID NO: 24048 - protein, 537 aa, synthetic construct
MTEAATGGTRVRMIPATVRRYAAARPLTERLRVAAYARVSTDDEEQQTSYEAQVDYYTKKIRENPEWIFVEVYADEGITGTSTKRRKNFNRMIDDAMAGMIDRIITKSVSRFARNTVDTLTTVRKLKEKGVGVTFEKENIDTLDSKGELFITIMSSLAQEESRSISENVTWGWRKRIADGKVSVAYSHFLGYEKGPDGNMQIVEEEAKVVREIYAMFLDGKTPSGIAAALTKRSVPTPAGKATWQASTVKSILSNEKYRGDALLQKTFTVDFLTKKAKVNEGEAPQYYVENSHPAIVSAEVFELVQAELAKRRQRGGRTSAVTPFSGRLVCGECGAYFGSKVWHSTDAYRSVIYRCNRKYEKKGAPCPSPHVREEELRTAFEKALGMLLERRSEIFSAYETIIANLTDTAQLDRELERAQARLDEAHQEMERMARRNAEIAQDQEEYNRAFDALSAKCSALKEKIGALKAQLAAKAGRRRKLEAFMAQLREKEALAPFDERTFAAMVDHIVVYPGEAKGAKKLIFRFRDGTEIPVDL

SEQ ID NO: 24049 - protein, 436 aa, synthetic construct
MQIRQVKPDAPTPRRKRVAAYCRVSTGKDAMLHSLSRQISHYSAYIQRQPGWEYAGVYADEAYTGTKGDRPRFRQMLSDCRAGKIDLILTKSISRFARNTVTMLETVRELKALGIDVYFEEQNIHSMSGDGELMLTILASFAQEESKSVSDNCKWRIRKDFSEGKPMNLMLLYGYRSVDGQIVIDEDEAAVVRDVFKAYLDGAGSSRIAARLRETNTPRRFGGTWTGNHVVEMLTNEKYTGDALLQKTFVEDHLTKKQRRNTGQLDQYYAENTHPAIIDRETFERAQAILAQRREMINIRKPTTVRYPLSGKVVCGNCGAHYNRRTRSTGRNSIPRYTWQCVTYSSKGKRYCPASQIPEETLIALTCEVLDVEKLTEEAVDALDEIRVTGKGCLRFALRDGRVEERQWAWESRAKAWTPEMRRKASEQMKRRWRHD

SEQ ID NO: 24050 - protein, 534 aa, synthetic construct
MRVSVNLNAQKPDTTTNAVIYARYSSHGQTEQSIEGQLAKGHEYAAAQGYTVVHEYIDRAMTGRNDNREAFQKMLSDTGKHQFQVVIVWKVDRFGRNREEIAFNKHTCKKNGVRVEYVAESLPNSPEAVILESVLEGMAEYYSIQLSQNIRRGQLESAKKCQCVGGSVPLGYTLDSDKHFVIDPQTAPVVKKIFDLYAEGATISEITGQLNEQGIRTARKQLFTKNSLTKLLKNEKYIGVYTYKDIVRVEGGVPAIVDESTFDRVQELLKINRRAPSHTWTKVEYLLTDKLFCGHCGSPMVGESGFSHTGAKYSYYGCIKRRREKACDKKPVRQDWIEALVLDETVKLLHDDELMEYIIDRTWEYYQVTDKVQEEKAVLEAQLAEVDKAINNLVRAIEAGIFNAATKSRMDELDAQKAALTASLADLELTSGIRITRDHIEYFLLRLRDLDVKDRECQKRLVQTFVNAVFIYDDGRVKITYNYSGQSSTITLNQIASAEKGKGFVCCLPCSTSSPRFPRGVAALFLFWGKIGCK

SEQ ID NO: 24051 - protein, 407 aa, synthetic construct
MRIKIIKAKPPEERKLRTAAYVRVSTDSEDQEGSLENQTRYYSDFLSHNPAYEFVGVYSDRGVTGYKEKRPGFQQMMHDAMAGSIDLIYVKSISRFARNTEVLLKTVRALKSRGVGVFFEVQNINSLSADGELMLTVLAAFAQGESDNYAELTRLHYKRQFCQGTPSRRTAATFGYCEGNYGELKVNEPQARVVRQIFSLALEGATLSGIANWLNNHKIPAIQGGQWNPTGIRRILRNVTYQGDLMLQKSYLDTKRQRHPNKGQVESWYVQDNHQAIVSREDWQRVQELLDNYTPPVARPVAYARKDEAGQYLLAGMLYCPWCGAVLHHKWCNKKTTEYWACSTTSKKSKNSCPGIYVPAQEAEKWTISEPTTVLQSKDDFGNQHFTPVPKSNYERRVGCPYIKKEA

SEQ ID NO: 24052 - protein, 469 aa, synthetic construct
MARTIVHIPAQPRATTVSATDNTRLRTAAYCRVSTEQEEQLNSYEAQVDYYTHYIKTNPKYIFVGIYADRGITGTNTRHRDDFNRMIEDCEAGKIDFIIAKSVSRFARNTEDCLFYTRKLKDLGIGIYFEKENINTLDGGGELLLTILSSLAQEESRNISENCKWGIRKKFRDGKLHLNANRFLGYDKDEKGKLVINKEQAAIVRRVFYEYIWEGLNPDAIARRLQAEGVPGCMGQPRWAVSTIQAMLQNEKYMGDALLQKTYTPDFLNKRAIKNKGEVEQVRVKGDHEPIIEPEIWDAVQLELQRRHRYTEKHNIRFRGRNSDVQPFSCKVICGVCGTPFWRRTWYRNHRSIKVWQCGKRYQEKGVATCSSENLKEETLYNAFVVAWNALVDNRQELLPEWEETMQKGNALERLRAQQMIELTAGARLTAIDLSLVGKCLDYVVVNNGGILAFHFLDGSQICVETDAD

SEQ ID NO: 24053 - protein, 454 aa, synthetic construct
MECVAYLRVSTEKQAEEGNGLDSQKRDIENYCRKNQLIISDWYEDDGFTGSNMNRPALQRLINDCSKKKLKCVVAFKLDRLSRSMVDGIYLIERVFIPNGVDFRCVHDSVSYDSPMEQAYTQMMAVFAQLDKNTMLLRMRGGMLERVKQGYWMGGGNTPYCYRYSKEDGILVPIPERKEMALRAMNLYISGYSDVRIQKLIGFKSEFVTRQVLTSPVNIGMIPYKGKLYKGRHEPIFDIKVFELAQELRKTRKQSKRFCVNHENQLLTGLCYCGVCGCKMRYQKWTHGKHKIYCYSRDNGMSYLPNYNPNCNNSLEWAEDIEKQVEDEILKISLNLSSHKPKERESCLDILSKQLQKEKTKLKRLYTLYAEGNDTVLEMIKETESGIDELKLKIQNEMKNPDNSQKKEFVYDNIKKLADVWEHIDKQNKNRILKTIISKIIIVNGNIEIQLKKF

SEQ ID NO: 24054 - protein, 549 aa, synthetic construct
MQTIPIDLSALTPEERQQFADNPSVLSSDCEAVCCLYMRYSSDRQTEQSIEGQLRELIAYCKHHSYRVAAIYVDRAISAHASMDKRPAFQQMLSDSARSSWKTVLVYKLDRFARNREDSAIARMRLRKNGCNVESAKEGISKNPEGVILEALLEGMAEYYSLELSQKVRRGMSETARKGNSTGGTTPLGYTVVDKRLQIDPMTAHLVEEAFRRYADGDTVAEICDDFNARGYRTTRGTKFNKSSFKNVFRNEKYIGVYKFDDVRTDNAVPRIISDELWRAVQSRLKTSEQAPARGKAKVPYLLSGKIFCGHCGAPMVGECGRGKGGKTYNYYSCANRKKTHLCDKKPVPKDWLEDVVAQDALDVLTDEIIEFVAEIAAQQSEEDIQKNTQIPVIRKKISEIENKIRNLTKALECASVAPDAIVERLAELEAQKRGLSTQLSDEERGVIPLTKESVVVYLKAVREKAVPLETQKAMLIEMLVNSVTVYDDEPGFLKFVTAYRLTQIPSKTYRVPTPAVSPCSDIGRVGSPEKARFGVLFRLFQKTKGLLK

SEQ ID NO: 24055 - protein, 700 aa, synthetic construct
MDSNAFLNDLMSKMKLPEAKGKKKAEQSESVAQILAAMQKVKTEKKKPPVTSYAPTKEMPVNELESMEEFSQLASDVMQECRPAMPTVPAASQEKAVRVAAYIRVSSTNPAQEDSYEMQERYFMSLLAGNAGWTSAGIYSDHGISATSREGRTGFNRLLRHCKQGKIDRVICKSISRFARNTQDFLVALRTLKENNVTILFEREAMDTADAYSEFILTTLAAIAQEESRSISANIAWSNQKRFPAGNVCNKDIYGYEFRKGEYTVNENGYRYRAVFIIQEEAEIVRMVFRLFTKEELGFTQIAQKLDALHIPPPNSGCRQRQKRKPTVLPAGTLKEEDKRGWTATDVRYMIANVRYCGSVLCQKTYTDHRNGHKQKVNKGEKPKYLIRNHHPAIISEELWQEAQEVWKVYTAKYRGIEKGRNERNYSKLLLCGECGRYFQGHSTTRTTIWRCATKLAQQGQKRCRMEPIYEEQIQTLLCKAFAEKFKLGEKMDAEVHEVMQMISKEPIDNARNQALKNLTEKLREIHDFDQMEQEGDFLKRQLSAVNYSIRDVHQHIRDIQAEKEALKVRCEVLGEPIDKEAVTELENRLLNEEERLEKLEQEAQQQAEQVRYMEDYWKKLEQTYEIREKTLQWLDSLAGGTQMFLDEAVGTYVKAFVLSVTIFSPKHFRIHWFDDTCTDVECDSVFEGYQQPGMIRRKY

SEQ ID NO: 24056 - protein, 513 aa, synthetic construct
MPEALNAVIYARYSSDRQTEQSIEGQLRECYAFAKANDIAVIDTYIDRAISGKTDNRPAFQKMIEDSAKRQFQAVIVYRLDRFTRNRYDSAIYKARLKKNGVKVLSAMENLNGSPESIIMESLLEGMAEYYSVELSQKITRGMRENALKGKALGGQRVLGYKVNSDCYFEIDETTAPVVVDIFKLYSSGKTVKEICDILNARGVKTARGGAFNKNSLHTILTNKKYIGIYKTKYGEIVGGIPAIIDKELFEMVALRMEQNKKAPARAKAEINYLLSTKLFCGKCRSAMVGESGTSKTGKKYYYYACVKKKREKACDKSNVKKDWIEDLVIQRTVTDILKDDVIEKIADRLVELQKAEAAESGTMLYLENSLAEIQVSIKNIMTAIEKGIITESTKTRLTELEDEKRNVEIEIAKESIARRIISREQIIYWISSFKDGDITSEKYCQQLIDTFVHAVFVYDDKIVITYNYSGENNTATISDLDLSSPPKQYNPNLLPIGHGFGFVVSVEEIEDW

SEQ ID NO: 24057 - protein, 581 aa, synthetic construct
MAYAMKVPAASADDRIVAIYVRVSTGYQVDKDSLPFQKKELKAYCKHILHVDMSRVEIFEDAGRSGKNTKRPAYERMMQKVRAGLVSHVLVYKIDRISRNLVDFSLMYDDFKYNRVTFVSLNEQFDTSSAIGEAVLKIILVFAELERKLTSERVKDIMIGRANEGKWNGARVPYGWDWDSSAGWPVHSEKEAPLGRAMYEMYLKVKSTGKIRDYNNAHCIPTKRGGEWTSKTVGDFLRNPMNKGDYRYNYRESARGRKKPVDEVVYLEGVFEPLIDPEIWEKVNKIMDINRDKRNMVGSHPVEKNCNVFAGLIQCGSCGSGYLVGKKDRRRKNGFTPSMYYCGAKTRAIHCQNLNVSDVKIGPFVINYISAMVRVSNERRKIKTPEDLEEMLLSDKAVFADIMGLSSDSLNNTFELLTGKSATGGALWRADLVDQEGVAADPAEIESLKDQIRKYERAKERLEDAYYFSDDGMSEKEYLEKKNRFDSGRVAAENKLKELTETHIASGVDESAFMKSASAFLLTHKIRAGSHIVYSDLAGMVEEESIKEFFNLVLDHITVKDRRVTEIVFANGLSHKFIYRD

SEQ ID NO: 24058 - protein, 503 aa, synthetic construct
MSKIHKIEAMIPKQIEKKKVAAYARVSALTEMTQYSFSAQVNYYSALIQKNLNWKYVGVYADKGITGRSIKKRKEFNRLIDDCNNGKIDLILTKSVSRFARDTVDTLNTIRHLKNIGVDVYFEKENIHSISQEGELLLTFLAAYAQAESENTSENIKWGIRKGFKVGKPNGYKAPYGYKWNGNSYSIVPEQGAIVKEIYKRYLDGEPAYSIAKALKKRGIKGQTGIPMDDSTIRYIVSNISYTGTLLLQKWFFTQNHVRKENKGELPMYAVENMFEPLISKEDFQKALQIKKERAEAMPNKNPRLTAFSGIVKCGNCGCSVCRRTTRYGKKWVCNAKDRKGMAACDFRDIYEIELEAAATKALAVNEFKEDLVRREVKLITIDNAYIVFNLKDGKKKQILRTYTKGYSGFSCRLFCGNCCKMLEADSRTLSINGQKKRYKIWCCRKCPGQREFDDVIRKATQSLFNEPQCEGLFAQNIEKAIIYNDRIDFYFKEGKVITWEKE

SEQ ID NO: 24059 - protein, 527 aa, synthetic construct
MYELTQSMESLSVDEIIVYLRKSRSDSPEMSVEDVLKKHEEMIQDYANTHFGSPIPEKNIYREVVSGETIDSRPQVKIVLQKIESPQIKAVLIVEPQRLSRGDLEDCGRLINILRYTNTMVLTLTHSFNLQEEYERKFFEMEITRGNDYLEYTKRILRRGRESSAAKGHYIGSVDPYGYRKIVIKKDGINCHTLEIVPDEANVVKLIHELYAYTPGGIGFTNIAHKLDSMNLKPKKATHWTPAIISSILCNPLYLGLIRWDTRKVVKYINDGRLEKSRPRSSDAKYYKGLHEPIISQELYDACMERRGTNPSLRRNKELCNPFAGLLYCGTCDHAMSLKIYKNHNSVSQIMLCNHQSYCHTKSVLYSAFLERFISSMENTIHDFELALLADNGNAQTVNQSIVANLETRLKKLQEKDMRQKDAYEDGIYSKEEFLERNIKTQKEIASAITALTAAKETKENYVDYGEKIRRFRDCINALNDPELSATEKNQFLKSCVSKIIYYNNMESKAGVGRYVENVFSLEIQYI

SEQ ID NO: 24060 - protein, 625 aa, synthetic construct
MSSVDKIAVVYARYSSHGQTEQSIEGQIAAAQKYAEQHGYTIIHVYADRAMTGRNDDREEFQRMLSDTATHQFGVILLWKIDRFGRNREEIAFNRYRCKKNGVRVERVAEDVPDGPEGVILDSVLEGMAEYYSLQLAQNVRRGQRESAKKSMSIGGNKMLGYIVNPETKRYESDPKTASYVTEIFKRYANGETISEIVAWLNAQGIRTTRGSEFTVNSLHRLLKNEKYTGVYIFHDIRNEGGMPALTDRTTFDKVQEMLKVNRRAPARVWSKTEYLLTDKLFCGHCGAMMVGESGHGRNGIKHSYYTCLNRKKKKSCDKKPVRQDVIESLVLRAIGKLLENPATLENIADQVWAAYERSDTSGDAIKALDKQIADVDRALSNVMKAIEMGIINEMTKTRMDELTNQKQALSTARAEAGLAEGFKLTRDMILFFLQEISALDMADRDSQKRLIKTFVNAIYLYDDHFDIAFNYTDNGNVVVRMREINDAARGEMFGRCAQCPTKKDPQLRLRVLFCAGAGRIRTGRPSADGKKQSCGLFFRPRLANPPAPTKKLWQEYCRSFFSLVYRAKSAKAMTDFQSAFYRDVQLLPGGWIFSGCRKTLVGASIARPRPFALQETIPENALLR

SEQ ID NO: 24061 - protein, 518 aa, synthetic construct
MTTIPATISRYTAAPINSTKKRRVAGYARVSTDHEDQVTSYEAQVDYYTNYIKGRDDWEFVAIYTDEGISATNTKRREGFKAMVADALAGKIDLIVTKSVSRFARNTVDSLTTVRMLKEKGVEIYFEKENIWTLDAKGELLITIMSSLAQEESRSISENTTWGQRKRFADGKASVAYKRFLGYDRGPNGGFVVNQEQAKTVKLIYKLFLDGLTCHAIAKELTERKLPTPGGKAVWSQTTVRSILTNEKYKGDALLQKEFTVDFLQKKTKKNEGEVPQYYVEGNHEAIIDPVTFDYVQAEMARRTKDKHRYSGVSMFSSKIKCGECGCWYGSKVWHSTDKYRRVIYQCNHKYKGGKPCSTPHVTEEQVKDAFVRAVNILLSEKAELGANVRAVIAMLCGSAELEKQQAELKEELEVVVGLVERCVAENARTALDQDEYSERYNGLVSRYEAVKAQFDEVTQAIADKNDRKKLLEQFLRMVETQEPVTEFDERLWSSLVDFVTVYREKDIRVTFKDGTEI

SEQ ID NO: 24062 - protein, 592 aa, synthetic construct
MPNLRKIEAAVPAIREKKKVAAYARVSMQSERMLHSLSAQVSYYSGLIQKNPDWEYAGVYADDFISGTNTVKRDEFKRMLADCEAGKIDIILTKSISRFARNTVDLLETVRHLKDLGVEVRFEKERIRSMDGDGELMLTILASFAQEESRSISDNVKWGTRKRFEKGIPNGRFQIYGYRWEGDHLVIHEEEARIVRLIYDNFLKGLSAETTEKQLAEMGVKSYTGRHFGNSSIRQILGNITYTGNLLFQKEYVIDPISKKSKINRGELPQYFVENTHEAIIPMEVYQAVQEEKARRRELGALANWSINTSCFTSKIKCPICGKSYRRSGKRQRKNPDETYYIWICRTKSEKGAKYCSAKSIPEKVLKAVCAEVLGTDEFDDAVFSERVEQINVVGDDTLEFYFYDGSVLKKKWKSTAKSDWWTDERRAAWGELHKHKATNPNRHRFYEFTGLIKCGRCGENFRCQSSARKDGTRIRSWHCGRTCGNINIRDEILKSMVCDVLGLDDFSEESMDAALEKITVNGPSVYFHLRNGSIVEREYTKPKRKGTKHTEEFKAHMRQIMKAKWKEGKMHGTKKSDNHSGYDQPVHGSAD

SEQ ID NO: 24063 - protein, 498 aa, synthetic construct
MDSARLRVACYVRVSTREQAEKGYSVSEQQERLKAYCLAKDWVVAQVITDPGFSGAKLERPGMQQLISLVQTKKCGAVLVWKLDRLSRSQKDTLYLIEDVFLKNGCAFVSMNENFDTSTAFGRAMIGILSVFAQLEREQIRERMAVGRVGRAKAGLFHGGGYAPIGYDYKTIAEGGDGLVVNEYEAMQVREVFSLYLQGWPVNRIRKYMAAHYTTKDGDWGSDTTVRDVLKNPLYTGKINWAKKVYDGQHEPLISQETFDAAAARLATSSWKRTCSDGMERNSPFKSTHLLGGIIWCARCGARYFASGNYSGRGENKRYWPYYVCYSRAKSAKHMIRDPNCRNDRWAVAKLDAIIEGEIRKLAFDPAALELAVSGPQQDEDVAQRRAALQQRLNDLRAQMGRVLDLYQMGGSLPASMVGDRVAKLQAEIDGVEAALAEAVEEPPTQRLDAARAALVGAEDVLDNGTLDERRELVHSLIRRIDLDGENIDIHWSFSPEA

SEQ ID NO: 24064 - protein, 554 aa, synthetic construct
MAERVCCSYQNVLSIQNRVCCLYRVSTTKQVDHDDQNQADIPVQRKACREFAERMGWTIVYEEQENGVSGFKVSANDRDKIQLIKEYAEQGKFDILLVFMFDRIGRRAEETPFVVEWLINHGIQVWSVNEGEQRIDTHVDRLTNYIRFWQADGESQKTSMRTKAALGQMVQEGRFRGGSAPYGYDLVPSGTYNKRKHEVFKLEINPDEAKVVRMMFDLCVGSGYGRFKIANFLSEMGIKTRDGKNWHEATVGHILHNIMYTGVLRSGSTQSKAFPDLQIISPENFELAQKLMAERANECNALRTMPRNTRGQSLLSGNVFCGHCGGRLTLTTNGTTRINAAGEKVGRKRIRYVCYNKTRKRSNCDGQTGYTMHILDKMVTDILHQVFDRMRSVEENEIISRTHRSAMVSLKKRLADAKAESAKAAKEYESLKLEIIKAVQGESAFPMEVLSELVNNARTRMLDANAQLTELNEEVEKSNQRIEAIKADYRRIMEWSEMFDGSDMDVKKMIAGYIIKRVDVYSDYRLHIKFNMSFAQFELGLETEVEYAAQDIVS

SEQ ID NO: 24065 - protein, 541 aa, synthetic construct
MIENRMMTGNRVDCLYRVSTDKQVDYNDKSQADIPMQRRECHRFCEKMGWTIVHEEQEDGVSGHKVRAENRDKLQIIKERAKQGKFDILLVFMFDRIGRIADETPFVVEWFVKNGIRVWSTQEGEQRFDNHTDKLTNYIRFWQADGESEKTSIRTKTALGQLVEDGGFKGGLAPYGYDLVKSGRFNKRKHEVFELAVNEAEAAVVRIIFDKYVHEGFGAQRIATYLNNLGYRARTGKMWHHASVRGIICNLTYTGVLRSGESRSRTLPHLQIIAPELFEAAQHIRASRANSAEQERRVPLNTRGQSLLAGNVFCGHCGSRLALTTNGKAYPCKEDAHRIVKRVRYICYGKTRKQTECDGQTGYTAHILDGIIDKVVRQIFERMKAIPKSEIVNIRYREKMEERKALLKSAKSDYAKAAAELDMLRAEVIKSLRGESAFPQDLLSSLISDCETKCLEVQHTMEAAQAAYDEGQAMLDALNAQYDDIISWADMYDSASMESKKMIVSCLIRRVEVYRDYRLHIDFNIDFEQFSAGLDISAIAA

SEQ ID NO: 24066 - protein, 526 aa, synthetic construct
MANVTVIPATRNFHTGIRKDAVVQKKTAGYARVSTDSEEQQTSYEAQVDYYTNYIKNNPEWEFVGVYTDEGISATGTKHRDGFNQMIQDALDGKIDLIVTKSVSRFARNTVDSLTTVRKLKEKGVEVYFQKENIYTLDSKGELLITIMSSLAQEESRSISENVTWGQRKRFADGKVSIAYSSFLGYQKGEDGQMEIVPEEAEIVRLIYRMFMQGKTPYAIAKYLMEKKIPTPTGKQRWQHRTIENILTNEKYKGDARLQKCYTVDFLSKKRKVNEGEVPQYYVEGSHDAIIAPVEWQMVQLEMERRRNMGRSHNCCGPFSAKLKCGDCGEFFGSKVWHSNSKYKRTIWQCNAKFKGESKCTTPHLYEQRIQELFLEALGRLLENRETIIDDCRAVMDVLGDCSSIEKELETVSGEMEVVTGLIQKLVVENATRKLDQNDYRRKYEGYVNKYAALESRMDSLKKDRESREIKFGIFSGFLFELSELEELPLEFDVKLFHSLVDYATVYHDGRIVFQFRNGTEIETII

SEQ ID NO: 24067 - protein, 501 aa, synthetic construct
MGRKVTRVAFNVPEIPKKKNVAAYCRVSSGKDAMLHSLAAQVSYYSELIQSHGEWEYAGVYADEAKTGTKDTRENFVRLLSDCRAGKIDLILTKSISRFARNTVTLLETVRELKLMGVDVYFEEQNIHSMSTDGEFMLTILASYAQEESRSASENQKWRIKKNFEEGKPWSSTLLGYRNVNGRFEIVPEEAQTVRMIFDWYLEGLGATAIRDRLNAMGIKTRLGNQWNRSPILKLLRNYTYTGNLLQQRTYRENHITKKCIINQGEKPMYLAEGTHEAIIDMDTFNQVQEEIKRRAERYKSPEGKKCETYPFTGMVRCGCCGKNYVRSGTQSYRTWTCRTRRKEGLKHCDAEIIPEEELIRLTAEILSGEVTEDAVRDKITVIRAEKDRTLVFCFKNGKETVKQWREHETVHVCTEEQKRQISRKNSGRKRTEEQRRQQSERMKEYWKDREFPEEQRRRQSEQMKAYWNDREASEGHRQTVSRLMKEMRAKETGKGAQNDG

SEQ ID NO: 24068 - protein, 464 aa, synthetic construct
MARSVTVIPARSQKVRTGHKAVQEKKIRVAAYCRVSTDQEDQLHSFEAQVEYYTKYINEHENYEMAGIYADEGISGTNTKKREQFKKMIADCEDGKIDLVITKSISRFARNTQDCLAYSRKLKNFGIGIIFEKENINTLDSTGELLFTILSSLAQDESRNISENCKWGIRTKFKNGEMHLNTFKFLGYDKDENGKLVINKKQAKTVRRIYRDFLIGINPAQIAKELTEEKVPGCNGQTKWYPSTIVGILKQEKHMGDALLQKTYTADFLTKRQVKNNGEVAQVYVKDSHKGIIDKETWNAVQEEFERRERFMKDHGTDRYSYGADCMPFCEKVFCGECKSLFTRHSWKSRGIVQWQCKNHRTDGRVTCSNAYVDNSDIEKGFVKAFNKLVADREKFMERWNQMKTDGSSLEKIRAEQMMEATGNEPLGRFVPEIAQLVLAEVTVLGAKKYEFFFLEGSRIKVSV

SEQ ID NO: 24069 - protein, 502 aa, synthetic construct
MEIQIREGNREQKRKLRVCAYCRVSTDADEQENSLENQIRHYETVIKANPSYEYAGVYSDFAISGFKEKRPGLQKMLADAQKGKIDLILTKSVSRFARNTSIVLEATRKLKELNVGVFFELQNINTLSGEGELMLTILAAFAQAESESGSVGAKMVYQRKYEAGIPVQYLERSFGFKKDERGVYIADEEEAVWVRKIYDMAAQGYTLAAIKRYLNENNVKTVGGAKWLDSTVLRILENEIYKGDYIMHKYFVNEERKLVRNRGEVDAWYIEDDHEAIVSPELWQKAQDALEAKRDYLAEGSVIEEFTEENYPYMNKIFCARCGHPLYKRIYSNGNRLNWGCSGTKRYGKSFCEGINIPDGVLRGAWHFDENMYIGEKQTDKGKKEFTYLKEASWKRRHKKKEPEPIPENTETEYPYREKIFCGLCGSRLVRHVNTKNHKVIWVCNGRKRKGKDFCDGTRVPDTIIKGWGEIKKDIYIQRKDDKNGKKRYSYTSKKPKGADRA

SEQ ID NO: 24070 - protein, 492 aa, synthetic construct
MNIQEIPTTRKEKPRVCAYVRVSTDSEAQEDSFAFQSNYWQKRFASDESVEYVGLFSDEGIGGAFMKKRDGLKRMFQKVRNGEIDRIYTKSVSRFARNKVELMEIVREFRDIGVEIIFESENIHTLDPKCGLILTVMASLAEEELISMSQNQKWAARKRFANGSVELARILGYDMVDGKLVINEKEAVIVRRIFELYLQGNSFRTICHILENEGYTPMHGGRWSKSTITGMLRNEKYCGDSIMQKSYSVMKVQKYNYGELPKYYIQGDHEPIVSREDYQKAQEIMMARGNKYRPRGSPTALYPLSGKLICGECGTSFKRKTSAHGTPYMCIKWTCRKKDVYGVKKCASHDIKDEVVTRLLIEAYNESLDANNDVNGITEQEEVLRKLIANEQELRQLRAKGYISESKCREETDKILIKIKEQETLIKNLRMRDMVKGKYKKSDELTEQMAEFLVKATVKDWTITFEFQNGYKTTKEYTNGRAGNVNGKLCKH

SEQ ID NO: 24071 - protein, 544 aa, synthetic construct
MSMENCANTKPKITIIPAKTRVERLDPLSIAMGQKPKIRVAAYARVSTDHEEQESSYEAQVDHFTKLIASHDDWTMVDIYADPGLSGKNTKRVQFKRMIKDCEDGKIDLIITKSVSRFARNTLDCVQTARKLKADGIGIIFEKENLDTLQERSEFVLTIMASLAEEESRSISNNIRWSVKKKFQEGKVILNTKHFLGYTRDKKGTVLKIVPEEAITVRRIYAEFLDGKSLKEIAEGLERDGIASPSGRETWHPSTVKSILQNEKYKGDCHLQKTYLPDFLSPRRIKNEGFAQSWYVEDSHAAIISKETFDMVQQEFQNRQSLRSTGETGCGKFSGKYPFSGMIVCGECGETYRRHQQYNKYKKYYIWVCKRHENTGAEYCKSRPIKEEALEKAFVRALNELIGDKERILEKLQSATVSEITDSCATAINEVNAEIEKLQEQMMELLMKRNNGEITDKEYEQQSQQVGMQIDQLLMRKEEILSEQGKVQLASYRIEEVTKLLQTGKILEEFDRVMFKSLVRKITVLSNKEIEIEFECGITVRETL

SEQ ID NO: 24072 - protein, 529 aa, synthetic construct
MSRYCIYLRKSRADLEAEAHGEGETLSRHKTALLELARRMGITISATYEEIVSGETIAARPQMQRLLSEVGAGEWDGVLVMEIERLARGDTMDQGLVAQTFKYSGTKIITPLKTFDPQNEFDEEYFEFGLFMARREFTTTNRRLVRGREASAKEGKYVGSVPPYGYRKVKIPNDKGFTLEIIEEQAKVVRMIFEWYAEGAEVNGQKKRIGPYTIAVRLNELGIKSVAGKDYWTIYGVQHMLINPVYIGKIRWGYRKIKKTVTPEGMKKKSREFAQDGDYIVVDGLHEPILSEELFYKVQDLIAANPPTPIKYRNNNVNPFAGLIFCAKCGHCLSYRKGYGRHPGYLGCNIAGCDNKAAPFELIEQRVLSILNSWVRDYSVDKAQIKHEADLNAELSNAISLAEKEIETLQDQLDKVYSFFERGTYTEKIFKQRSSAIEQQITDIGEKIDRLKAEHQQVIERQNVQAEFVPSIKHLLEIYDTLEPVEKNKWLKQIIDRMVYEKNADGKYRNVDPGDFTLGILPRLPKKGS

SEQ ID NO: 24073 - protein, 589 aa, synthetic construct
MSNTFSFQQIAAPKVLSAEVREAISNNVLQFYVRDQQQNAQDEGITALYERLSQEDKLEGESNSIANQKKILERYCREHGYTAIRHYDEDDGYSGTNFNRPGFQRMLADIKAGKIKRVIVKDMSRFGRDYLQVGFYTDMLFPDFGVHFIAVNDGVDSTRGENEFTAIRNVFNEMYARDTSKKIRATWQSKGKSGEHLTTIPPYGYMKDPDNKKKWIIDEEAAAVVQQIFALCVSGLGPQKIGKWLEEHQILNPTFYWLSKGLKVTNKPKPGANPYKWTNETVSRMLEKIEYLGHTVNFKTRKQSYKSKKTLWNDPSEWVIFENTQPPIVEESVFLIVQNIRRSRRRPTKMGDMGIFSGLLYCAECGGKMYQCRATNFTEEQKYFICSTYRKGKDLCTTHSIKNVVLHEIVLRNLREAIEYVTQYEAEFIQEAADSRLRERDAEFSRKRETLSRAESRIAELDNLFKHLYEDNVTGKLSDERFIKMSRDYELEQENLKSMAEVLREEIKQQEKQKTNVKAFISVVKKYTDMQELDASILREFIDRIEVSHTDKKSKTREITIVYNFIGAFDFERAKEKAQNTTQKQQRTA

SEQ ID NO: 24074 - protein, 496 aa, synthetic construct
MKKKNNRKKCYIYTRVSTAAQTEGFSLEAQQERLYEYAEYRELEIAGDYCDAGKSGKSIKGRPEFQRMMDDIISQKDNISYVLVFKLSRFGRNAADVLKSMQLLTDYGVDLVSVDDAIDSSTQGGRLTLTILSAVAEIERENITDQFMAGRLQKIRDGKWSGGSVPYGYRSVDRELTIDPYEASIVRKIFDLYMEEDMGATSVAVTLNDEDYLRKENGGVDQRPFTYDFIVNVLDNPIYCGKLIFGRRTNKKGPDGKLLKPDPKHAVIAQGVHETILTEEEWNAVQEKRERLSKNRYELDNPERISLLSGLVRCPMCGSGMIHTKNKRINRNHGGYYKTIHYYACNNSRKSNGMTCSFRHTYNQEKIDSSVFEIIQRLTTLPEYKNAVTANLQNQATVEQLEERLKQERKELRKEELNNRKLGEQLDALDIMADGYEVTYDQILAEIDEGYDKIEEIERKIRSIMRKLESLKQGFKASENIERMLNHFTKLYDHMS

SEQ ID NO: 24075 - protein, 482 aa, synthetic construct
MKIAAAYIRVSTDDQTEYSPAVQLDDILEFAKKNDYHIPKEFIFTDEGISGRTAEKRPAFQSMIRAARKKTNHIDAILVHKYDRFSRNKDDAVLYKALLKKDGVKVISIKEPIPQDDKFAVIYESMLEAMAEYYSLNLSEEVKKTMRKKAENGDYQARAPFGYRNDKKSLVIHPEEAEMVRYVFESYANGVSIFALTRELNQRGFRTIRGNQWEFRTVRYLLNNVTYHGYARWTPSGKTDWGYDIPAAIVAKGSWEPIIDDDLWERVQERYTQQQRRHYPHKRPDTEGIHWLSGKVKCSSCGRSLVISRQYVRGGFEMQCGGYNHGQCHVSHSVSSNRLIPAILDTLRQIADSPDTQAVNFSIRTNNTNSGEIDAISAMIHRTQQKIIKAKEAYLAGIDTIDEYRETKRTSEKEISELQERLSALSEEQTFDADAFSKKVRNVLLTISGDSSMDDKKSAFSEIVEKVVYDKAANSIRLFLID

SEQ ID NO: 24076 - protein, 541 aa, synthetic construct
MFCLKLHNIVVFNNGDLKVVTKAVLLRRVSTVMQEKDGNSLQNQLEILTEYCQKKGLTIIKDAELVESSTRGVRKKFLEVIKFCQQQKGGVALVCLKTDRLFRSFTNLPEVYNMCQTGQLEIHLTQENLIINKNSKAGDITLLGLNVVMAQNYVLSLRDNVIYGMDYSVAQGRCMSKAPAGYLNVRTPEGKAAVIIDKERAPIIQKLFNEYATGLYSVKDMMKKCKEWGLVSRFSGKPFDTSTIHRILNNKFYIGEMLYKDQWHKHNYETLIAPALFKTCQDIMHGRKPEEPKHFKTTEKPFIFRGLITCGECGCMISSDRKIKPSGKKYVYLKCSHFKGNCKNPQVNENIVLQQIEDELKNLSLPQEIMSYLRSDMEKIINQQNKALNLEIKDIRQKYDELQKQIQYTDTLLVTQKITPERSNEIVSRLKQEQYELNNKLELLTKADEKFSIAVATILSLGNNAYQIFQSSKVETKREILHLLLSNLKLQDRKISYTLRKPYDYIRSLNKKTPSKKEGVAIGDAVSSHREQVYPTANFCV

SEQ ID NO: 24077 - protein, 535 aa, synthetic construct
MEGLIYNSYSNENEINVYGEYAIYLRKSRADMEAELKGEGETLARHEHILLDLANSKNLKIGKIYREIVSGETIEARPEMKKLLTDVKMGKWKGVLVVEVERLARGETMDQGIVAQAFKISETKIITPMKIYDPNNEFDEEYFEFGLFMSRREYKVINRRLQRGRLMSVNEGKYVGSVAPFGYDRVKIKGDKGYTLKKNQEANTVKIMYDLYAYDDLSLNEITAKLNEMGLKPRKSEEWSVSTVKDILANPVYIGKIKWNARKEVKVYKHEKLVKTRPRNSDYILVDGLHKAIIDEKTWKIVSAKRSLNSAPVVHNNVVQNPLCGLVICAKCGKKMKRRSYSKFSKEPTLYCSNPNCDNIGSKFHFVEEKVLDGLKKWLEQYKFDYQEHLQKINHNKIESIEETILSLEAEAKKENDKLLSIFNFLEDGTYTKEMFKARSDAVSQNVARINNSIEEYKVKLAQEKIVDKEKEVLVPKIENLLDVYDLLQTPEEKNDLLKTVLTQVTYLKTEKSIRKDSDPTNFTINLYPKINKVV

SEQ ID NO: 24078 - protein, 556 aa, synthetic construct
MKKFPIDLSCLTEEEISQFQEDPYTLYNGDQNVAIYLRYSSTGQSDQSIEGQLRDCRTFCKVNHYRIVAIYVDRATTARKDVEKRVHLMEMISDSAKQNWEYVIVWKLDRFARNRNDSAIMKMRLRKNGVKVLSATEHLTDSPESIILESVLEGMAEFFSAELSQKVTRGMRESALKCHSVGGHIPLGYKVENHKLVVDPDTAHIVQEAFSLYANGESVAAICRKFNSAGYKTAKNTEFNRSSFKAMFRNTRYIGTYTYKDIVIENGIPAIIDKELFETVQRRLSKTATAPARGKAKVDYLLSGKLFCGHCGASMNGESGAGRHGKVYHYYSCYTKKRKLGCDKRPLKKDYIEGIVARDALNLLTDQLIDEIADMAIRQSEQDLINDTHIPQLTAQLSEVEKSITNITAAIEKGIASETLMNRLVQLEHEKKTISKEIKAEEKFVYRIDRDQIVFWLSQFKYGNIEDENFRRRLIDLLVNSVTVWDEPDGYKITTAYNLTSCKTKTFRVEKNPAAEEATGFDFGESECTKSPRNRLISRAFSLVTETTGSAGGGTS

SEQ ID NO: 24079 - protein, 513 aa, synthetic construct
MPEALNAVIYARYSSDRQTEQSIEGQLRECYAFAKANDIAVIDTYIDRAISGKTDNRPAFQKMIEDSAKRQFQAVIVYRLDRFTRNRYDSAIYKARLKKNGVKVLSAMENLNGSPESIIMESLLEGMAEYYSVELSQKITRGMRENALKGKALGGQRVFGYKVNSDCYFEIDETTAPVVVDIFKLYSSGKTVKEICDILNARGVKTARGGAFNKNSLHTILTNKKYIGIYKTKYGEIVGGIPAIIDKELFEMVALRMEQNKKAPARAKAEINYLLSTKLFCGKCRSAMVGESGTSKTGKKYYYYACVKKKREKACDKSNVKKDWIEDLVIQRTVTDILKDDVIEKIADRLVELQKAEAAESGTMLYLQNSLAEIQVSIKNIMTAIEKGIITESTKTRLTELEDEKRNVEIEIAKESIARRIISREQIIYWISSFKDGDITSEKYRQQLIDTFVHAVFVYDDKIVITYNYSGENNTATISDLDLSSPPKQYNPNLVPIGHGFGFIVFIEEVEDW

SEQ ID NO: 24080 - protein, 578 aa, synthetic construct
MKGAIYSRVSTEQQDYSKQTNELKDYAKRNGIEVVYVFEEKESGFNNNRPEFEKLRKLTKQDIDIILVWEISRISRRAIYLQQQVQEFTDKGICIYAKKDGFSTLNDDGSVNASTKMLIGFASIIAEQEAATLKERTISSKRNKILREGKSYTYYAPYGYDYSKETKMLSINEKQAQVVKRIFQLSIDGYSTERIAILLNAEKIPTKGRKENWTAGTVCNMLTNPVYKGEANYTLKKEKKAGSTYCKPMEVVTISTPAIIEKEQFTLSLQKLAERTKRSNSFGTKYNPLLRGLIHCPHCDVKYVYNFRTNQYLCVNKYKKASNKNVHCTAKCISNKLDSIVWNVVKTFFYKELAAGKAQEQIEPLQAEIESYKRQILLLDGKQSELTARANIIVDAAIEIKIQFPNMPDLYANKMKEVEEINKEASKYQKEKERLEKLIHSNESRIKNINRASKESALVESITDETEKYDLVHKAIDKIMIFGEGKTSIIIVTFSTGQTIYLGYSSKSNSKYYTIFYPSSDIYFDVQTSKGYINHLKEKATINSDGSIYLGDFTGEVKEYSIIDFVNYLDIEENRRYY

SEQ ID NO: 24081 - protein, 483 aa, synthetic construct
MPTSDLKIAAAYIRVSTDDQEEYSPDSQVRLIREYARKNGYLLPEEYVFQDDGISAATARKRPAFNRMIALAKEKERPFDAILVLMFSRFARNREESVLYKGLLRKQGISVISVKEPAVDGPFGTLIESIIEWFDEYYLINLSAEVKRGMSEKFLRGEAMGTAPFGYRIDSANKTFTVDPERAEIVCDVFRSYADGAGLRDIAVQLGDAGITTRRGNRPDSRFVEYMLRNPVYIGKIRWTPGHKTRYSRVHIADGVEVVDGKHPPIVSMDLWEAVQRRMDQRKAAYGRYQRQAPAAWMMRGLVRCSACGATLIMAGRSSSCPFLQCHSYAKGACHMSHSLSLRRANGAVLAGLQRSVGTLTFHMVPHLTSAPSRTADYGRLLEQERRRLARCKDAYQAGVDTLEEYRDNKARLEERIRRIEEQAASAAAAPESFDKAAYGKKAADILRFLETSADEGAKNEVLRSVVDHITYEKASRHLAIYF

SEQ ID NO: 24082 - protein, 523 aa, synthetic construct
MAKSVTTIPATLSRFTAAPINSTKKRRVAAYARVSTDNEEQLTSYEAQIDYYTNYINGRDDWEFVGVYPDEGITGTNTKKREQFRQMVADALDGKIDLIITKSVSRFARNTVDSLTTIRKLKEHNVEVYFEKENIWTFDSKGELLLTIMSSLAQEESRSISENCTWGQRKRFADGKVTVPFKRFLGYDMGPDHNLVVNPEQAKLVKRIYGMFLQGQSPFQIARTLTDEGIPSPGGKDHWNPSNIKSILTNEKYKGDALLQKSFTVDFLTKKKKTNEGEIPQYYVKDNHEAIIDPETFEMVQTLMTTRTKGRNRKSSVSIFSSKVKCGDCGSWYGPKVWHSNDAYRKVIWQCNHKFDGQKCATPTLTEDEIKELFLRAANQVIDQKEQFIAIYDQVLSRSLDTTALESELSDLEAEINIAAELIEDCIKENAHVALDQDEYQKRYDALVARFDKAKARHTEVTDLIAERMARKHQIETYLKNLRSREPLTEFRETDWLAMVDYITVHSKDDIRVAFKDGTEIKA

SEQ ID NO: 24083 - protein, 590 aa, synthetic construct
MKTVEKIERKLPVLKTRKRVAAYARVSMESERMQHSLSAQVSYYSALIQKNPEWEYAGVFADYGISGTGTKKREEFNRMLAECEAGNIDIILTKSIQRFARNTVDLLNTVRHLKDLGIEVRFEKENINSLSGDGELMLSILASFAQEESRSISENVKWGTIKRFKQGIPNGKFSIFGYEWQDDKLVIVPEEAEIIRWMYAEYMKGASRIEIGRALMDRGIYTRQGKPWVDSNVKVILTNITYTGNMLFQKEYCEDPITKHRRKNYGEMPQYFVEDTHEAIIPMDEWQVVQAEFKRRRDLGPFGNKSLKLSAFSTKITCGCCRKHYRHSGKRNTAGEVYYIWICQTKSQKGVSACPSKNIPEKMLQNTAAEVLGLDEFDEDVFSQQIEEVIVIGDDTLTFRFYDGHEVTTKWQSTAKTDWWTDERRKLWGERHKRKDTNPNRNTFYEFTGFIKCGCCGANYRCQSGKRKDGTPTRSWYCTGPRSECRNPAIRDETMKRLVTEILGLDEFDEAAMDAQIESATILDHMVTFHFRDGHIESRDFLDKRHGTPWTEERREKAKKSMKAAWTDERREAMSERIKKIRSEKKWPNP

SEQ ID NO: 24084 - protein, 528 aa, synthetic construct
MPKTTKKITTIPATLTRFTAMPINQQNKRRVAGYARVSTDHDDQFSSYAAQVDYYTNYIKGRDDWEFVEVYTDEGITGTSTKHREGFKRMVADALDGKIDLIVTKSVSRFARNTVDSLTTIRQLKEKGIEVYFEKENIWTSDGKGELLLTIMSSLAQEESRSISENCTWGQRKRFADGKVSVPFNRFLGYDRGPDGNLVVNREQASIVQRIYAMFLQGMSYHGIAKQLTSDGIPTPGGQKKWSQSTIRSILSNEKYKGDALLQKSYTVDFLTKKTKVNEGEIPQYYVEENHEAIISPDVFAMVQREMAKRGRGKNYHSSVHAFSSQIRCGQCGCWYGSKVWHSNSKYRKTVWQCNHKFDNDEHCTTPHLTDEDIQNAFLSAANKLLATKDEVIANGHKMVDLLFDTSELEAEQATLLEETQLISDMVQQSIYENAHIALDQAEYQKRYDSLTHRFDTAKERLETVMAQLQQMQLQRADIEAFLQSFKELPDTLTEFSAENWHALVDYATVYSTDDIRITFKHGQEIKA

SEQ ID NO: 24085 - protein, 577 aa, synthetic construct
MRKINKIEPLMPALPTRKKVAAYARVSMESERLQHSLSAQVSYYSELIQSNPEWEYTGVYADDGITGTKTNREEFQRLLADCEAGKIDIILTKSISRFARNTVDLLETVRHLKDLGIEVRFEKEKINSLSCDGEVMMTLLASFAQEEIRNLSENVKWGTRKRFERGIPNGRFLIYGYRWDGDHLVIEPEEAKIVRLIYDNFLKGLSAEATEKQLKEMGVKSMKGKPFPNSSIRAILKNITYTGNLLFQKEYVLDPISKTTRKNRGELPQYFVENTHEAIIPMATYQAVQAEIARRRELGVFANWSINTNCFTSKIKCGLCGASFVRNTRRNRAKTSQLGGRYTFYSCGTNKRKGSRCSSGTIREDVLKEECAKVLGLLEFNEETFSERVKKITIPAPGTMIFNFTDGTSLEHHWSRNAKKDSWTAERRKEVSEYRRSRETGWKCYNTFTHFIKCGHCGANYRVQTHKRVDGTIVRSWYCSSPTAAGCFKVGIREDTLKRLIADVMGLPEFDEELFNQQLAYATVRAENEIVFHFRYGHEASRTFVQKRQMPRHTEEWKKHMSKVMKAKWRERHAKND

SEQ ID NO: 24086 - protein, 500 aa, synthetic construct
MYLRKSRADDPHESIKDTLRKHEKILFDLANKLNIKKDEIVQFKEVVSGENLKNRPQAQKMLKLVMENAFEGVLVVDSQRLARGDTLDQGTIIRAFSLNNTKIITPGKTINPGDEIDQDYFEFDLFMGRREYKMINKRMQRGRNISVQEGNYVGSIAPYGYKKTKIGKCHTLKINEDEIDCFNKMKELALNGLGCTSIANELNRLGFKPRKSKLWTTNAVRDILLNKTNLGLIKWNTRKSVKLYKNDEIIKSRPRNEEAEYYPGKHPAIITQVEYDAIVENIKNRARPVKKDKKLQNPLAGVVYCGKCGKAMIRRSYNNGYRDGLICTNTHCNNVSSVLEVVEKRVLESLEDTLKEYRQFIDNYHNDKTKTNNDSLIIKTEKEINKIDSQINKACEMLEVGAYSVELFKERKTLLDNQKKALIDKIEALKKEDTDFKLQNYINAVPILENAIKLYWNSSVEEKNKLLKQIVKRCDYLKSERGKRNGKGMYNFKLNIYLKI

SEQ ID NO: 24087 - protein, 463 aa, synthetic construct
MARSVTVIPARNRQVSGYRAAPQKKIRVAAYCRVSTDQEDQLHSFEAQVDYYTKYINDHENYEMAGIYADEGISGTNTKKREQFKRMIADCEKGKINLVITKSISRFARNTQDCLMYSRKLKNLGIGIIFEKENINTLDSTGELLFTILSSLAQDESRNISENCKWGIRTKFKNGEMHLNTFKFLGYDKDENGKLIINREQAKTVRRIYRDFLWGLNPAQIAKELEDEQVPGCLGQTKWYASTVIGILKQEKHMGDALLQKTYTADFLTKRQVKNNGEVAQVYVKDSHKGIIDKETWNAVQEEFERREKFTQKHGTDRYSYGSECYPFCEKIFCGECGSLFTRHSWKSRGIIQWQCKNHRKDGKVACTNAYVDNADLEKGFVKAFNRLVGEREKHIERWNSMKLDGTPLEKIRAGQMMEATESGQLQQYVPEAAQLVLEEITIFGAKKYEFAFLEGSRVKVSV

SEQ ID NO: 24088 - protein, 501 aa, synthetic construct
MEIQIREGSREQKRKLKVCAYCRVSTDADEQENSLENQVRHYETVIKANPNYEYAGVYSDFAISGFKEKRPGLQKMLADAEKGKIDLILTKSVSRFARNTSIVLEATRKLKELNVGVFFELQNINTLSGEGELMLTILAAFAQAESESGSAGAKMVYQRKYEAGIPVQYLERSFGYTKDERGVFVADEAEAVWVRKIYKMAAEGYTPASIKRYLNENGIKTVGGVQWVDSTVFRLLENEIYKGDYIMHKHFVNEERKLVRNRGEVDAWYIEDDHEAIVSPELWQKAQDALAAKRDYLAEGSVIEEFTEENYPYMNKIYCAKCGYPLYKRIYSKGNRLNWGCSGTKRYGKSFCDGINIPDGVLRSAWHFEENTYIDEKASDKGVKEFTYLKERSWKRRHKKKQPSAIPENTETEYPYREKIFCALCGSRLVRYVNPQNHKVTWVCNRRKRKGKEACDGTRVPDTVIKGWGEIKNDIYIQRKDDKNGKKRYSYTSKKPSGIRV

SEQ ID NO: 24089 - protein, 556 aa, synthetic construct
MARAAKQDSNSEIIDGVIYARYSEGPNQTEASIEGQVRECKEYAKRNGIRIINVYSDSKHTGTNDNRAEFQKMLRDSRRGGFSVVVVWKIDRFGRNRAEMAQNKALLKLQGVKVVSAKEYIPDSPEGIILESVLEGMAEYYSANLSQNIKRGMKENALHCKSNGSGKSLGYIVDKDGYFEIEPNEATIVKTIFQKYDEGMKIADIWREIVASGAKTKRGKDFTQYGISRVLSNRAYIGEYRYGDIVTPGGMPRIIDDDLFNRVQERRALRKKAPASRRSNSDVDFLLTGKVFCGHCKGTMRGMSGTSKTGRKFYYYACHDKIFKHNKCTKKNVKKEWLETEVTRITRDDILNKETIEFIADRVVEIQRQEQEDKSMLRYYEQQLRDTQSAINNIMKAIEAGIITSSTKSRLFELEEQKSIIEGEIEREKIITPVIEKEQVIFSLERFFGGDINNKEYQRNIIDMFVNKVILYDDKIIITYNISSQNEISVDVVEQAAFAALDECSSKLSLAPPAGACPCTQSALLYVERFFIAAHQFYLKPNHCFAVADISRQGFL

SEQ ID NO: 24090 - protein, 466 aa, synthetic construct
MNRAALYIRVSTLEQAQEGYSVGEQKERLIAYCKAKDWIIADIYVDGGYTGSNLNRPGIQKLISETDKFDLVLVYKLDRLSRSQRDTLYLIEEVFRPKGVDFISMQESFDTSTPFGKAMIGLLAVFAQLEREQIKERTWMGRVARAKTGLHHGGGHIPIGYEYEDGHLVINPYEAEQVRKIYEWYLAGDSLKTITDKLQEAGYTNKYSSYNSWTSVRNILGNETYTGRLHFGDVIVDNAHEPIISKEQFDAAQVLRGKRQEQYGGQAFQSKHLLAGLIYCGHCGGRYYLRNTGKYSYYACYSRTKQMKSMVKDPNCMNKIWKGAELEAIVDARIRELLSSPEMAAEIAASRSKPTPVSKNADIEKRLREIDKQIGKLMELYQHDDIPPELLGERINKLYNERTALESTLAPVVEDEAMPFDLVEALISDAAQVWDFADESQKRRILQSLVSRIVLTDDDVQIEWAF

SEQ ID NO: 24091 - protein, 497 aa, synthetic construct
MQFLNVAAYARYSTENQDENSIETQFDNIAQYCQAHQYNIVAHYFDKAKSGTNIERADFQEMISAARAGKFSAIVIYDITRGSRDVADWFTFRKQMMQAGVQIISTHDNIGDLLNPNDFLTELIGVGIGQHHVLTSRLKSIDGTTMKAHEAIFLGGCPPLGYDVKDGKYIINESEANIVRKIFSMYASGESYSDIIDSLGGAIGKKGRPIGKNSLSSILRNDRYIGIYTWNRRKIKIMGKWAGGVPNERIVQIKDAIPRIIDQPTWDRVQIRLKSKTNSSSKAARSYLLTGKIVCTECGSRYCGRTSVNQRGYQNPYYVCGNKTRTRQCHSKNIKCEDLDNFCRNAVREYILNYDLSETAQRIVTAYNATVSQYTNEKKELAEISRKIKNGTDAILNGFSSEELFQQMGKLQVRQKELEKIIANDAADELDPELVTKLLKNMLEDVSTNIDEVVKQFVTKIYAHPNGDCTVHLGVAHFTSSGREIRTLDTTGMNRML

SEQ ID NO: 24092 - protein, 497 aa, synthetic construct
MNKKRAAAYARVSTNSRAQEHSFEFQSRYWNQTLGNNDDYDYIGLFADKGISGKYVNRRPQFLALMELCNRGEVDIIFTKSVQRFARNAEELLKHVRALREKGIEVYFEKENIHTLNPDSELYLTIAAAIAEEDLTRYSNNVAWSIKDRFERGEMILGPRIYGYRKTAENRLIVYPDEARIVRLIFEEYIKGDVSTLKIAKKLNSMGIPSPNGGEWLCSQISYIIKNEKYYGDMILQKTFVEGGVKYANRGERIRYYVENSHEPIISKEIWDKAQEVLGQRANPHLVGAKLKSYPFTGLIVCGACGANYTHKVNNSGTISQANFWKCHIAIQKGVKYCHNPGIKEKVLYDLFVDCYNEFVTEGYYKKTVDNTEALDRLARLNESETELTLLMTRGVINQNQYLEEQQRIRVEMQSIQRKLHEERTYLVQGSDFHPIKEFDEDKLYKFIKRVVVKDWTVTFEFFNGVCITRSYTNGQPGNIKDWKLKQKQRRGEQNGQ

SEQ ID NO: 24093 - protein, 535 aa, synthetic construct
MDSNQRIVRTIPASFTRTTSQVVRLLNVGAYARVSTKKEEQEDSYERQVSHYTKYIKSHDGWQFVDVYADEGITGTRAEKRRDFQRMMDDCRHGKLDKILVKSIARFARNTVDALNAIRELKELGVSVYFENENIDTLSPGGEVLLTILAAMAEQESRTISTNIKWAYQKKFQNGDIQLNYKRFLGYTRDENHNLIIVPEEATVVQRIFREYLYGYSCANIAAGLTKDKIPTPSNKTKWYASVIMSILQNEKYYGGLICGKTYKPDVLSKKRYKNEGQVERYYIENSHPAIISKEEFDLVQAEMRRRQTIRGFSETNQGRYSSKYAFSKRLICGECGAYYRRHAQYCKGEYIHTWVCPTHKIKGGTACSQTYLKEEEIEGAFLEMLKALVGDFKEISDTLKENIVSSLDDSIAEDINETLLQIEVRQTEMLELLREKRAGRISDQEYNERGMAIEKAIQELSERRVKLESKSNSAKLAMMRVEQITTALSDVGSLDKYNGEIFRSIVENVVVRNTYTLDFHLKVGIVESITITRK

SEQ ID NO: 24094 - protein, 529 aa, synthetic construct
MSRYCIYLRKSRADLEAEAHGEGETLSRHKTALLELARRMGITISATYEEIVSGETIAARPQMQRLLSEVGAGEWDGVLVMEIERLARGDTMDQGLVAQTFKYSGTKIITPLKTFDPQNEFDEEYFEFGLFMARREFTTTNRRLVRGREASAKEGKYVGSVPPYGYRKVKIPNDKGFTLEIVEEQAKVVRMIFEWYAEGAEVNSQKKRIGPYTIAVRLNELGIKSAGKKDYWTIYGVQNMLINPVYIGKIRWGYRKVKKTVTPEGMKKKSREFAQDGDYIVVDGLHEPILSEELFYKVQDLIAANPPTPIKYRHKNINPFAGLIFCAKCGHCMNYRRGYGRQPDYIGCYTAGCKNKASRFDLVEQRVLSILNSWVKDYSVDKAQIKHEADLNVELSNAISLAEKEIETLQDQLDKVYSFFERGTYTEKIFKQRSSAIEQQITDIGEKIDRLKAEHQQVLERQNVQAEFVPSIKHLLEIYDTLEPVEKNKWLKQIIDHMVYEKNADGKYRNVDPGDFTLGILPRLPKKGS

SEQ ID NO: 24095 - protein, 455 aa, synthetic construct
MECVAYIRVSTERQAEEGYGLESQKRDIDEYCRKHQLIIKEYYVDAGLSGMEMSKRVELQRLISDMAKIDVIVVYKLDRLARDTVDALYMIEKIFTPKGICVESVHDFARYETPQDKFQTQVMAAVAEYDRNTMMLRMRGGMLERVKRGFWMGGGNLPFCYSYDKELGILVPIPERAETARNALELYINGYSDGRIARICHYSGEPVARKILTSVVNIGMIPYKGKVYQGKHEPIFDIERYELAQEIRKSRHDAKSWIAHPTNLLTGLCYCGVCGCAMRYQKWGQKEDSPRKIYCCSKNIDLDYLPNYNHDCDSKPQWASDIEKQVEKQMLEISVNLSKYKPKEKETKLQIMQSQLSREKNKLKRLYILYAEGNDTVIELIKQSEEEVKRITAAIEEESKAAKNTQKKEFVYDNIKKLADVWDKIDKQTKNKILKTIISKIVIVNDNIEIQLKNF

SEQ ID NO: 24096 - protein, 524 aa, synthetic construct
MNKLRAAAYCRVSTDRAEQSGSLASQRSFFDDYIRNSDSMTLVGVFYDEGTSGTTTLNRYGFNKMISLAVSGGIDIILTKEVSRFARNTVDTLNITRMLRAKGVGIIFINDNIDTRDSDGELRLSIMATIAQEESRKISERVKWGQQRKMEQGVVFGRSCLGYDVKDGKITINADSAEIVKRIFTEYTVLLKGAESIADELNAEQIRTVNGGRWSGAFIRKVLRNVKYVGDLEQKKTCTPDFLTHKKRLNSSEHIYIRNHHEPIISRELWEQTQAEISRRKPTDTSRHSDRYVFSGKVYCGVCGSVMVSRVKTLKNGKIYHALRCSGRIGGKSCNNETLNVTALKACVKRIFTDIPIDKTAVINAVIKGLSRTDKPDIPALRRKIETLNAKKRRAVDLMLDGLITQQELIEQKSYYDSIIEKLSQEISSDRSVFETDKIRKNAERFLDFTSDPIWLLVIRADYIHGTLTVYLKGIEKGFTTCFTATGRGDSYRVITGNTVRSQGIIPGTMQVQKNRCRHDVNDK

SEQ ID NO: 24097 - protein, 464 aa, synthetic construct
MARSVTVIPARSQKVRTGHKAVQEKKIRVAAYCRVSTGQEDQLHSFEAQVEYYTKYINEHENYEMAGIYADEGISGTNTKKREQFKKMIADCEGGKIDLVITKSISRFARNTQDCLAYSRKLKNLGIGIIFEKENINTLDSTGELLFTILSSLAQDESRNISENCKWGIRTKFKNGEMHLNTFKFLGYDKDENGKLVINKEQAKTVRRIYRDFLIGINPAQIAKELTEEKVPGCLGQTKWYPSTVIGILKQEKHMGDALLQKTYTADFLTKRQVKNNGEIAQVYVKDSHKGIIDKETWNAVQEEFERREKFMQKHGTDRYSYGSECYPFCEKIFCGECGSLFTRHSWKSRGIIQWQCKNHRKDGKVACTNAYVDNADLEKGFVKAFNRLVGEREKHIERWNSMKLDGTPLEKIRAGQMMEATESGQLQQYVPEAAQLVLEEITIFGAKKYEFAFLEGSRIKVSV

SEQ ID NO: 24098 - protein, 502 aa, synthetic construct
MEIQIREGSREQKRKLKVCAYCRVSTDADEQENSLENQVRHYETVIKANPDYEYVGVYSDFAISGFKEKRPGLQKMLADAEKGKIDLILTKSVSRFARNTSIVLEATRKLKELNVGVFFELQNINTLSGEGELMLTILAAFAQAESESGSAGAKMVYQRKYEAGIPVQYLERSFGYTKDERGVFVADEAEAVWVRKIYKMAAEGYTPASIKRYLNENGIKTVGGVQWVDSTVFRLLENEIYKGDYIMHKHFVNEERKLVRNRGEVDAWYIEDDHEAIVSPELWQKAQDALAAKRDYLAEGSVIEEFTEENYPYMNKIYCAKCGYPLYKRVYSKGNRLNWGCSGTKRYGKTFCDGINIPDGVLRSAWHFKENTYIAEKASDKGVKEFTYLKEQSWKRRHKKKQPPAIPENTEAEYPYREKIFCALCGSRLVRYVNPQSHKVTWVCSRRKRKGKDACDGTRVPDTIIKGWGEIKKDIYIQRKDDKNGKKRYSYTSKKPEGADRA

SEQ ID NO: 24099 - protein, 502 aa, synthetic construct
MEIQIREGNSRQKRKLKVCAYCRVSTDADEQENSLENQIRHYEEAITSNPDYEYAGVYSDFAISGFKEKRPGLQKMLADARKGKIDLILTKSVSRFARNTSIVLEATRKLKELNVGVFFELQNINTLSGEGELMLTILAAFAQAESESGSVGAKMVYQRKYEAGIPVQYLERSFGFKKDERGVYIADEEEAVWVRKIYEMAADGYTPASIKRHLNENGIKTVGGAEWIDSTVFRLIENEIYKGDYIMHKHFVNEERKLVRNRGEVDAWYIEDDHEAIVSPELWQKAQDALEAKRDYLAESSVIEEFTEENYPYMNKIFCARCGHPLYKRIYSNGNRLNWGCSGTKRYGKSFCEGINIPDGVLRGAWNFDENMYIGEKPTDKGKKEFTYLKEASWKRRHKKKEPEPIPENTETEYPYREKIFCGLCGSRLVRHVNTKSHKVIWVCNGRKRKGKDFCDGTRVPDTIIKGWGEIKKDIYIQRKDDKNGKKRYSYTSKKPKGADRA

SEQ ID NO: 24100 - protein, 486 aa, synthetic construct
MIIAAAYVRVSTDEQTDYSPAAQLADIKEYATHNGYHIPEEFIFMDEGISGKRADKRPAFQAMIRQARKKSNHIQYIIVHKFDRFARNKEDSVLYKALLKKDGVKVISVKEPIPQDDKFAVIYESMLEAMAEYYSLNLAEEVNKTMIKKAQAGEWQATAPFGYKNENKSLTIVPEEAKMIRYIFEQYIAGTSMFALSRQMNQMGYRTHRGNVFEHRTIQYILNNPVYKGYLRWTPGKKINRNFNDSASIVAKGDWEPIVSKEIWDAAAARFKSEKRTYYKHKRPETEGIHWLSGMVKCSSCGRSLVVGAKYKSGAAQFQCGGYCHGQCHDSHAVSSNRLIPAILSELEKIAAHPDTEGCRYTIRRELPASDELDVYVPLLAKAQQRLKKAKDAYLNDIDTLEEYRSNKMNIEKEIAELKEHIAEIEERQNMPFDQAAFSTKIASVIEILRDDSRQMEDKRKAFKSVCDKIIFHKHDSSLELFLIDQ

SEQ ID NO: 24101 - protein, 538 aa, synthetic construct
MLASNVKVIQPKKLFNIEESARQLLRVAGYARVSTGRPEQKTSFESQQKHYKELVAKHSDWIDVGLYADEGITATSMRKRKQFLKMIQDAKEGKIDRIIVKSVSRFARNTVDCLATVEELTALGVDVFFELQNLSSLQDSKTTRMQLTMYASMAQEESETLSESVAYGIREGIKNGRYRAPKAYGYRLDENKRLVIDPEQAEVIMFIYNTFLQGYTVGQICAMLNAREIPAPRGGVWYDSTVDGILKNEKYIGDLRLEKTVSTDLKTRRRVPNINGQQFYVTNNHEGILAERMFKRVQAEIEYRQNLRGYSGSGKSAYTTKYPFSNKLFCGRCGSKYRRHSYDLKRKDENGNPKIEKVYTWVCINHKLNKKTACPQTQVKESSLEKAFIAALNTIIEDQDGFVKTVIANISEVLNTRLSEAALEGNRGRYEAKQKELQNVLANSLKSPTAENARLYERLVQELESLKLKIETEEGERSKTLMSKTRAVELEQFINSSKLFHEFDEMVFRKLVERVIVNEDSVTFKFTDFLEREVPLIE

SEQ ID NO: 24102 - protein, 512 aa, synthetic construct
MQTPRLKKRAASYVRVSTYQEKQEKSLADQIAMLNKIIDDDDTLINVGTYIDQGITGKYQSKRKQFLKLVRDCIEGRIDVVYVKQMRRFGRNTLETMQTIEKLRAYGVAVRFVMDGIDTIKDRGCSRLTMLANMAEEERDSLQETMIWSFQHRMEQGDYVFRPDLLFGYALNKNKEMVIVEEEAKAIKYIFETYAAGGRVVDIEAWLNEHGYVTRKGNPFCKSSIGDILQNEKYYGDLLIGKTRMDGPRRVRNEGESPMYLHEGHHEGIISKELFDKCQEVRQSRHYKTTKDYSDSDIFCKKVYCGQCGSLYYRQGRINCVSDFSQTAFACGLAVRSKRSKCRNKLQRIGTLKDGFVAVYNFLYDNRSTLNEIVVENEEYNEIVERLKELCESEKMYFEAEVKGLMNEQMKKNHTRLVGEVLNLEERKRFLLSRNFEISNCNSNLKKCNKVLRETGKIADFNDELFEIFIQRILVMDRNNLVYELTSGHKINVEVLDNYKVRDEIRRVYVSE

SEQ ID NO: 24103 - protein, 467 aa, synthetic construct
MPPQKIEARAIACYCRVSTEGQIENYSIDEQRERLEAFCKAHGWTNPKMYIDPGFSGGSLNRPALTKLIEDVKTQRINTVVVYKLDRLSRSQKDTLFLIEDVFGKNKTDFISVCENFDTSTPLGKAMIGIISVFAQLEKDQITERFTMGRIGRAKSGLFHGGRSIPTGYDYVDGHLVVDDFAAMQVREVFNRFLHGESVHSIQRVMNENYGGWKSHTSVYCVLKNSVYIGKVKFAGVEYDGEHAPIISEETFYETQRLLGERSANNKEYQKTPFRAGFLLSGLIFCGNCGAKYHGNHGYYRCYSRAKSDKKYIIDPNCKNPNIVIEELDDYVRNEIYRASLNPSSIQAYQETTDPNIDRRNALKAHLERIKAQADKLLDLYQMSDMPVDSIGARLQALEAERERVQGQLDSVPKIFINRRKEFEESLSRCHDVLENAPLEEQRLYVASIIRKIIVNSGGNIEIKWRF

SEQ ID NO: 24104 - protein, 535 aa, synthetic construct
MRKSALNNKNLNKEDNMKTAVIYARYSCERQTEQSIEGQLRVCNDYAQRNNIAILDTYIDRAMSGTNDNRPSFKQMLKDSARKQWNYVIVYKLDRFSRNKYESAIHRKSLKDNGVKLLSAMENIPDTPEGIILESLLEGMNQYYSAELAQKIKRGMKESRLKGQFTGGKLPYGYKVENKKIVVDEDSAEIVRKIFDMTAQGFTAPDIIAYLSENGLYHYGKPFKKNAIYKLLHNTKYIGTCTINNETFDNLYPQIVSVELFEQVQSKLERNLLGQNCIHADFLLRSKVYCGYCGHKINGESGTSQNGDKYYFYKCSWRKKGKDNCKKQMIRKEDLENIVLDMTMDLFTNSVDLNIIADEIVRVRKESVAEHCELNILIEQQKEKQKSLDNIMKAIEAGIITSSTRNRLEELEFELDNLSVLITKEQNKLLQTVSRDDIMQYLTKGVRETSPNVLIELLVHKVTLWDDHIEIEFNYSDKTNPDGLITARRDFSISKPWYTLSATNCVLIAQKSIVTDESFYNQDITQEFELLKYNY

SEQ ID NO: 24105 - protein, 516 aa, synthetic construct
MKAVIYARFSSHNQREESIEGQVRACQRFAKEHDMTVIEIYADRGLSGLHADNRPEFQRMIADSDRHKFQALIMWNLDRFSRDKYDTAVYKSRLKKNGVTLYYSDQNIPDTPEGIILESLLEGFAQYYSANLSRNAKRGLQENARKCLWNGGGLPLGYTIDETKHFVIDPAGAACVRLIFQMYADNHSIKEIVSTLNEKGYRTVKGNKFRLGSIQGVLRNRKYIGEYHASGITVPNGVPAIVDVELFNAVQEKIGVVSAAKARNKAEIPYLLTTKVFCGHCGSPMIGESGTGKGGSTYRYYKCSCRKNRKGQCDKRTEQKEWLEETVVAQTVEKFLHPDVIEDVSNACAAVLEQDCQNNALLKALNAQLADVEKSSRNLIKAIEAGVFTASMRERLAELEQQKEDITVQIAREQLRKPQLSAEQIAFFLRSFLDGDARDPNFQERIIESLVRRVDVYDEGPGNRKLTVFYNLKKNNHSSVSVKCSDSESVGLPKGRLRKQPIFFFASCRRTRIGRQ

SEQ ID NO: 24106 - protein, 602 aa, synthetic construct
MYITVTLDPNGIYDAYLRKSRADMELEKLKKFDTLKQHEKFLKDRANQLGIKIRKIYREVVSGESIQERPEMQEVLKNVETGTIDGILVVEVERLTRGDAKDQGTVTQAFKYSNTKIITLNKIYDPNSDEDEEYFEFGLFMSRREYKTINRRMQRARIANVLDGKYCASEPPFGYKKVRVKYGKGYTLEPVSEEAEIVKEMYQKRADGMGYDIICNWLNTLDFKPKKSDVWTPATIKGMLSNPIYIGKIRWNSNKQKKILINGQIIKKRKKGNNEDLILVEGLHPAIISNELFDIVQGIKPNKASTKHNTELQNPLATLVKCADCGRSMQRRPYYDNKKQEPKLRRKYDIDKEKLRLCLREHKGEYSLRDIATALKVRKHCVDHWFASNQSKFTMPYADKWEELKKLLNINTTEFDKAITTYESNLIEPHEDTLICPKAHCTNIGSNLALVEQETIKALQEYISSQKELLATYNPAEEDDNVMFVSLSKELDKYNKQLDKAYELVEQGIYTPQEFTKRTKTIKDKIMNTEKELNKYQLKLNKDRIEKLLPKIEKVIDSYYKVTSVEKKNKLLKSVISYIEYKKEKGGRGYESNFSIIIHPKF

SEQ ID NO: 24107 - protein, 514 aa, synthetic construct
MKQCVIYARYSSERQTEQSIEGQLRVCYEFAKNNDLIVVHEYIDRAMTGTNDLRKEFQQMLSDSEKTKEWDICLVYALDRFGRNSIEQAINKFKLQKTGKIVISATQRTSRNIDGSQNLDGIILENMYVGMAEYYSAELSQKVKRGMNESRQKGNFTGGYIPFGYCVTGDRKTGRKVQINEDQAVIVRKIFEDYAAGRLVTDIIDELHEKGIENRGQPFARNTVYFLLKNEKYAGIFRHGDEVFTNIYPPIISQTTYDIVRARIENNKYGKHKPNVEYLLKFKITCGYCGSPINSDSGTSKSGVIMRYYKCSGRRKGKNCQSTPIRKEVLEKVVIDATYKALATPDLIEDIAERIMGAHQKRMDDQSILHILEERLAEKKSSIDNLIAAMEQGIISQTTKERLNALEAEKAELINKIAVEKLKSNLIIQKHDIVKYLQSAVKKRPLQMIQLLIKQVVLYNDKIEIHFNYTDGKRPDDELHQAFSFYSFNQRITIDQHKIGKEPIVTDYEIILFI

SEQ ID NO: 24108 - protein, 500 aa, synthetic construct
MRMCGYARVSTDEERQLDSLEHQMEFFSDFAKQNGHHLVNVYTDEGITGRQLKKRDAFNKMLSDSKLGLFDLLVVKDVSRFARNTVDLLTSIRQLKSRGIDVIFVNNSQKVLGESEFIITLLGAVAQEESSNLSKRVKFGKNITSKKGRVPPRIFGYDRIDNFTMEINEREAEVVREIYHLYIDEGLGCRLIAITLAEKQMKTKFGNDWNQRNIRRILENPIYSGHYINHRYTVVDFLEGTTKALPKEQYYHHDRPEWAIITPERFQQAQEILEQRRKQYATEYTHFTGRYSNRHLFSTLIRCKECGRAFSRRVTHYPNSDYIYWRCPTNNQYTAKRCSNNTIVREDDLIETLSTYLREVVSNKESIAQEIARKFKEANAVEGSKPDVQTLEAKKVKLKAKLEKYMEMYANDVITMEALKSKTAEINESINVIDDQLILLEGQRTQERTIESITNEAMTEIERFLSLQSATNMDLRRIIDSIIVDDKKQVKINLKITGNL

SEQ ID NO: 24109 - protein, 494 aa, synthetic construct
MRVVGYARVSTREQADHGYSIGEQNSRLRAYCQAKDWTLLRVIEDPGFSGAKMQRPGLQQVLEMVRRRECDAVLVWKLDRLSRSQKDTLYLLEDVFLANGCGFVSMLENFDTSTAFGRAMVGILSVFAQLEREQFKERSAIGRVGRAKAGLFHGGGYAPIGYDYYTKEDGGQGLVVNEYEAMQVREVYRLYLAGWAVHKIQVYMHERYTTKNGCWASDTTVRSVLSSPIYLGRITWAGKTYEGQHEALISQNDFDQVAARRESLKWQPAEPRAACDLIKNSPFRSTHILGGITWCARCGARYFASGNYSGRGENRKYWPYYTCYSVAKSSKKMIKDPNCKNKRWAVGKLDAIILAEISRLEFDPAALAKAAGPVDVSGVEEKRRVLEARVAEVRPQMERLLDLCQTGGLPVASVSGRLAALQKELDALNGELSGLAVPETVDRLAVAQEMLAGASAVIENGTPEQKRALVHSLIGRIDIDGEDITIHWLFAPEN

SEQ ID NO: 24110 - protein, 565 aa, synthetic construct
MLRTPGDLFFLAEAVNSTNKFYSVSDKSARVYFLYSFLGGETMRFFSYGRKSVFSDKSDSIDNQFRMNREYCESKFSGQVDSWQQFSDEDFTGANTSRPDLQRMLSFIKGGFCDVLVVYQLDRLSRDVRDFANIYALLEEHGVMFISIKENIDTTTPIGRAMMYVTVVFAQMERETIAARVTDNMLGLAKKGYWTGGNPPVGYVRKHIVVDGKKHCSIEVDPDGARYVTQIFDTFLAYNCSLQGMETRFKNQGIRTQSGKFFSTTQLHKMLTMPYCVEATPEVYDFYAAKGCIMDPGSPREMWDGSVGVIIYGRSTEKNKKHQAQPPEKWTVCLGKHKPFMPAEKWLAVQSRFTQNKCIKDAKWPVPLLKGVLRCKCGNLMQVSRKKKVDGTCSSWYYCRKRMRQGVDACDMGQIKCDLLDEKVLDLFRGITADPGLIQKFVKTKAPDDIPNLKAAQARVAACERKIGRLAASLALAEDSTASKYIIAEMERLDVELGALKREASLAEMENHRATANAKDAKATAVEIAKLIHGLEGFDDKERNAIARAVIQECTWDGERLFITL

SEQ ID NO: 24111 - protein, 434 aa, synthetic construct
MKRVVERVDALIPAQPKALRVCAYARVSTGKDAMLHSLSAQVSYYSKMIQSHNGWMYCGVYSDEAVTGTKRERAGFQHMIEECRQGNIDLVITKSISRFARNTVTLLQTVRELKSLGVDVFFEEQHIHTMSADGELMMTILASYAQEESLSASENQKWRVRKAFENGEIINLRFLFGYDITPDGIRVNEVDAAIVREIFARFNGGESMSSICRDLDARGHKGVLGGTWCAERMRNTLSNEKYLGNALLQKRYRNNHIEKRLLPNRGELPMYYAEGTHEPIIDQATFDKAQERLRMLAQQTANRKKPTRSVFSGLIHCGLCGNTYKRVTYRKKHYWNCTTFQTKGKSECAAKRIPEETLEVLTCEVLGEGSIDSDMVRSKITAIRAEKNNVVVYCMDDGSEIVKRWKDRSRAESWTPEMKEKARQRALQARRKKE

SEQ ID NO: 24112 - protein, 528 aa, synthetic construct
MNRTAARSVTVIPPTINPLTHLSRVAVQKRRVAGYARVSTDSDEQFTSYEAQVDYYTQYIKRNPEWEFVKVYTDEGISGTNTKHRIGFNEMIADAMSGKIDLIVTKSVSRFARNTVDSLVTIRKLKEKGVEVYFEKENIYTFDGKGELLLTIMSSLAQEESRSISENVTWGQRKRFADGKVNLPYKQFLGYRKGADGFPEVVPEEAIVVHRIYTRFMEGVTPGAIAKELTADGIPTPSRKQRWQTSTVESILQNEKYKGAALLQKCFTVDFLTKKRKVNEGEVPQYYVEHSHEPIITPEEFDKVQTELARRKRISRQYSGKSIFSSRIICGDCGSYFGSKVWNSTSKYRRVIWQCNGKFKGEHKCETPHLNEETIKARFVTALNAIIESKDNILEDCRLMQATLTDCTGIDTEIESLLEEIDVVTELTKRCIAENSQMAQNQEEYAARYNGFVERYEKAKAQLEQLRATKAAREAQAEAIGAFMFEVQELDALTEFDEKLWLTIIDTITVHADGRMTFKFQGGTEIEA

SEQ ID NO: 24113 - protein, 523 aa, synthetic construct
MAKSVTTIPATLSRFTAAPINSTKKRRVAAYARVSTDNEEQLTSYEAQVDYYTNYIQGRDDWEFAGVYTDEGITGTNTKKREGFKSMVADALAGKIDLIITKSVSRFARNTVDSLTTIRSLKEHNVECYFEKENIWTFDGKGELLLTIMSSLAQEESRSISENCTWGQRKRFADGKVTVPFNRFLGYDMGPDHNLVVNPEQAKLVKRIYGMFLQGQSPFQIARTLTEEGIPSPGGKDHWNPSNIKSILTNEKYKGDALLQKSFTVDFLTKKKKANEGEIPQYYVKDNHEAIIDPETFEMVQTLMATRTKGRNRKSSVSIFSSKVKCGDCGSWYGPKVWHSNDPYRKVIWQCNHKFDGQKCATPTLTEDEIKELFLRAANQVIDQKEQFIAIYEQVLSRSLDTTALESELSDLEAEINIAAELIEECIKENAHIALDQAEYQKRYDGLVARFDKAKARHTEVTDLIAERTARRHQIETYLKELRSREPLTEFRETDWLAMVDYITVHSKKDIRVSFKDGTEIKA

SEQ ID NO: 24114 - protein, 590 aa, synthetic construct
MKTVEKIERKLPVLKTRKRVAAYARVSMESERMQHSLSAQVSYYSALIQKNPEWEYAGVFADYGISGTGTKKREEFNRMLAECEAGNIDIILTKSIQRFARNTVDLLNTVRHLKDLGIEVRFEKENINSLSGDGELMLSILASFAQEESRSISENVKWGTIKRFKQGIPNGKFSIFGYEWQDDKLVIIPEEAEIIRWMYAEYMKGASRIEIGRALMDRGIYTRQGKPWVDSNVKVILTNITYTGNMLFQKEYCEDPITKHRRKNYGELPQYFVEDTHEAIIPMDEWQAVQDEFKRRRDLGPFGNKSLKLSAFSTKITCGCCGKHYRHSGKRNTAGEVYYIWTCQTKSQKGASACPSKNIPEKMLQNTTAEVLGLAEFHEDAFSQQIEEVIVIGDDTLTFRFYDGHEVTTKWQSTAKTDWWTDERRKLWGERHKRKDTNPNKHLFYEFTGFIKCGCCGANYRCQSGKRKDGTPTRSWYCTGPKDQCHNPGIRDETMKRLVSDVLGLDEFDEAAMDAQIENATILDHTVTFHFRDGHTESREFLDKRHGTPWTEERREKARESMEAAWTDERREAMSERIKKIRSEKKWPNP

SEQ ID NO: 24115 - protein, 534 aa, synthetic construct
MSTGTELRAVFYARVSTEEEKQLNALEKQIQENKDVIRDHGWRLVGEYIDEGKTGTTTKRRNDYKRLLKDMTENKFDIVVCKDQDRLQRNTLDWYLFVDNLVTNNLKLFMYLDNKFFKPSEDALITGVKAIIAEEYSRNLSKKLNNSNKRRIERALNGEEVSAMGNGKSLAFKIVNGKWVKDEEEAKLGKKIFELYLEYDSIRKVRDWVNEHGYTNSVGKPFTSESISRILKNEKAKGVIVMGKYHHDFDKKKIVRRSEEELVRIPAPELAYVSEEVFDKVQERLRAKTGNGRGVNAYSDPLSGKIYCGSCGRKLWKHASNGYVNWMCASQVAKGDVECNGTRITTVAIRNIYKKITDNLEVNKGVVKQDIVKWLNELKATLSDTSVNEKIQKDLDKLERKRTKLLEAYLEDFISKDDYKAKYEAIEGQIEEKKKLLVPVEENEDIKVIESVLQNIDDEIDAYVKTLDMEESKVDFLIEHTKRITVLENRDIIIELDLVAGAIIAGKDFLLYVHDTMPQHHGPKHLHPSGPQTA

SEQ ID NO: 24116 - protein, 464 aa, synthetic construct
MARSVTVIPARSQKVQTGHKAVQEKKIRVAAYCRVSTDQEDQLHSFEAQVEYYTKYINEHENYEMAVIYADEGISGTNTKKREQFKKMIADCEGGKIDLVITKSISRFARNTQDCLAYSRKLKNLGIGIIFEKENINTLDSTGELLFTILSSLAQDESRNISENCKWGIRTKFKNGEMHLNTFKFLGYDKDENGKLVINKEQAKTVRRIYRDFLIGINPAQIAKELTEEKVPGCLGQTKWYPSTVTGILKQEKHMGDALLQKTYTADFLTKRQVRNNGEIAQVYVKDSHKGIIDKQTWNAVQEEFDRRERFMESHGTDRYSYGADCMPFCEKVFCGECKSLFTRHSWRSRGIVQWQCKNHRKDGKVACTNAYVDNADLEKGFVKAFNRLVTDRDKHMERWQQMKSDGTPLEKIRAGQMMEAVENEPLTRFVPEIAQLVLCEVTVLGAKKYEFFFLEGSRVKVSV

SEQ ID NO: 24117 - protein, 687 aa, synthetic construct
MQSAFFFIPFFDSWGKGLFMAYVRNKKKILKFWSKKKAALYVRVSTRYQVDKDSLPFQRKKLKEYCKFLGIEDFVIFEDDGYSAKNTDRPHFQEMMSRVRDGEFSHLIVWKVDRVSRNLLDFAAMYQELKDHKVTFISMNEQFDTSTAIGEAMLKIILIFAELERNMTSERVTGIMLDRAEQGLWNGARMPVGYRWNPEIKFPEPDPEETKIVQFIFDEYERVRSTTKIARYLNHNQIASKRGGQWTSKLIRDIIRNPFYIGTYRYNLRESGRGPLKPESEWIIRENNHPAIITKEQFDRCNAIMDENGTSRDTSELRARKYVHTFSGRLVCGKCGANMIASKDRARANGWRPSMYRCAQRSRMMDCDNSKTVNESYIGPFIFNYVANLARIQKNFKNIKTLEQLEKELLKGPEFENMKVSKESLRRTFDALAFHEVGKGAYLPDIDLSDSDDDYTAAEQLSILKRELDKCKTAIDRLTDLYLYDPDSMTKEEFAKKKRDLVNKIAGYEKQIEASQATGDKDDLADLEFIRKASAFLVAQRIVSKKHVDYIQMALDLDNEILKDFVDQVIDRIEILEGRVRSIRFVNGLVHEFTYSTPADLPVCQKCGGRIGSTCGCRTRTFDFAGKPYRRIRVGNPGDKFHGVAGAVCPECSAQAGRWHHWKCGIERCPICGEQLIACEHGPNGKD

SEQ ID NO: 24118 - protein, 513 aa, synthetic construct
MMQQALNAVIYARYSSHNQTEQSIEGQLRDCYAFAEREGLQVVGEYIDRAITGRTDERPDFQRMIADAQKQRFQRVIVWKFDRFSRDRYDSAIYKHKLKQCGVRVLSAMENVGEGDVSIILEALLEASAEQYSLDLSKKVLRGQRESRLKGTFLGGLTPIGYKLENRKLVADERTAPIVRYIFEQYAKGTSKQDIINELATRGILDRHGKPLSHSTLQTILKNKKYIGVYTHGGQDVAGGCEALIDEKTFLKVQEQLSKRKHAPAASKAVIEYLLQGKLYCGYCGFNMFGDSGRGRNGITYRYYACRRRKKERDCKKKNEKKDFIEWYVVEQTVEYVLTPERIEYIASELVAQYKKDCGIDRIKAYEKQLDRIKAEISRLVDTLAVCPAAARQPIFDKMEQLDAEKQEVELDISKLRISAKIQISKEHIIDWLKQFCNGDALDVDFQKRIIDTFINSVYLYDDKVIIYYNIEGGKQVSYIDMIDSTEEPPFSDDAPGSSGGSDLKRPALRLCC

SEQ ID NO: 24119 - protein, 565 aa, synthetic construct
MLRTPGDLFFLAEAVNSTNKFYSVSDKSARVYFLYSFFGGGAMRFFSYGRKSVFSDKSDSIDNQFRMNREYCESKFSGQVDSWQQFSDEDFTGANTSRPDLQRMLSFIKGGFCDVLVVYQLDRLSRDVRDFANIYALLEEHGVMFISIKENIDTTTPIGRAMMYVTVVFAQMERETIAARVTDNMLGLAKKGYWTGGNPPVGYVRKHIVVNGKKHCSIEVDPDGARYVTQIFDTFLAYNCSLQGMETRFKNQGIRTQSGKFFSTTQLHKMLTMPYCVEATPEVYDFYAAKGCIMDPGSPREMWDGSVGVIIYGRSTEKNKKHQAQPPEKWTVCLGKHKPFMPAEKWLAVQSRFTQNKCIKDAKWPVPLLKGVLRCKCGNLMQVSRKKKVDGTCSSWYYCRKRMRQGVDACDMGQIKCDLLDEEVLELFRGITADPALIQKFVKAEAPADVPDLKAAQARVSACERKIGRLAASLALAEDSAASKYIIAEMERLDVELGALKREASLAEMESHRAAVSAKDAKATAAEIAKLIHGLDGFDDKEKNAIARAVIQECTWDGERLFITL

SEQ ID NO: 24120 - protein, 545 aa, synthetic construct
MPTSKNTARKYAAGGSSDNSCGVEPLRAVIYARYSSSGQREESIEGQLRDCYEFAKKHGIIVIGEYIDKAMTGRVDRRPDFQRMMKDSEKGRFNCVLLWKMDRFARNRYDSAMYKYKLKKNGIRIFYAKETIPDGPEGIILESVMEGYAEYYSENLAQNVKRGNYDSALELKTLGKTCLGLKTGPDGRYMIDQAEAAIVRRIFEEYAEGERAKDIYERLNSEGYRTSRGGKFNKNSLRRILSNKKYIGVYEYEDIYVENGIPAIITDRDLFERVQKMLKINHDAPARGKAQNFLLTTKLFCGLCGSPMIGDGGTSHTGKAYAYYSCTKRKRGRSCKKESVPKDWIEDLVVGELVKIVHNDELIEQIADRVMEYQKREKDQSGLHALEIRQKENEKAISNMLAAIEAGIITPSTKTRLMELEADRADIEKGIAHELLAEPEFERDQIIYFLERFRSGDINDEAYRIMLVDTFLNSVYLYDDDHLVLVMNYSGENCKVDLKLVEGAVSGDGCKGSAFAPSSALNGAKPNPVYFFKKVFAVVVNFTRK

SEQ ID NO: 24121 - protein, 573 aa, synthetic construct
MAKVKLPDKPRVAIYTRVSTLHQIDKDSLPMQRQDLINYARLILNTEDYVVYEDAGYSGKNTDRPKFQEMMQQVRLGMFTHILVWKIDRISRNLLDFATMYSELKQLGVVFVSKNEQFDTSSAMGEAMLKIILIFAELERNMTSERVTAAMLSRAANGQWNGGRVPLGYDYDPETKTFTINESEAAVVKIIHDKYEQERSLVSLARYLNGHGYRTRTGCTYSPSTLLIILRNIFYCGDYRYNVLKDGDRQKRKKESEWITVKDHHPAIISREQKEEIARILKENRRLECERRGIYSKKKNVHVFGGLVICGNCGHAMTSTIRPADQDGIRWSVYVCPTKRRSEYLCKGRATSEVVLGEFVFNYILNMLNVQKNFDSINSVEDMEKMLLSGSTFRDVDGIERAGLDDLYNMLASGLTEKAPFDSSVEVRKKPVVSDIELENLNTEKTRIERAAERLQNLYLYSDDSISQKDYIIQREKLMSQLAEVNEQIGMVMSNADEKDVSDEEFVHAASKFILTQKLEGRTYIYYKRLATTVSREVLRSFVMSIIENITIYDGRVQTIVFKNGLSHTFILK

SEQ ID NO: 24122 - protein, 523 aa, synthetic construct
MARKKNIAAGQNAVIYARYSSHNQREVSIEQQVRECMKHAAELGLHVVGTYEDRAISGKTDKRPNFQRMMRDAEKGKFQAVVAWKSNRIGRNMLQAMVNEAKLEDCGVKVFYAEEDFDDTAAGRFALRNMMNVNQFYSENMAEDITRGLYDNASKCMANGRQPLGYKRGEDGRVVLDEANAAVVREIFTRVAAGDLFVDIARDLNAQGIKTSKGANWNKGSFQSICQNERYRGIYIYGDVRVADGIPRIVSDDLWYRVQEAMRMKKNPVGTRHRVGAEDYLLTGKLRCGHCGSYMTGVSGTSRNGELHYYYTCQKRRTEHACDKKNIRRDVIEPAVAQAIKMYCLTDDVIAWIADRTVEYWEKHDNDLQIEALEQQLEENKKATSNMLKAIEMGIITEATRTRMVELETEQSRLSVQLNAAKEDVVKIDREQIISYLELLQQGDIHDRDFQMELFKNFLVAVYVYDDNRMKLVFSCMGDQNSVEIPLETGEDPPDGGLSPDAKMFVLTPDSSTIQFVLEPDSL

SEQ ID NO: 24123 - protein, 538 aa, synthetic construct
MSIKIIVGIYCRVSSDEQTEKGTIENQKEYAEKYAQLNKLNVYDYYLDDGVTGTLPLQKRPEGKRLLEDAKAGKFNLVLFFKLDRLGRSVRVILNAVYDLMELNVDVRSMTEAFDTTTPSGRFTLNTFAGIAELERDTILTRMRMGTIRHAKLGKWLGGPVPYGYTLENGYLEISRTKIPGLTYSEADIVKLIFEKTVYEKMSAESIADYLNNLCVPTKYKILNRKLITSGYWYPSRILSMLHNTVYYGVHIFGQMSKHQKPEIIKQTNPAIVDIDLWDAAQKQLTSNKLLAARCRKNDYLLSGLIKCGLCGRTYIGTGYAGSKKEKVLYYVCNDKNRYHPDKNQKICQSQNLRADWIESIVWNDCLSYIMQPDKLYLENKTQSLTDPKDELHALEQVAVKLERERSSILDLFRKKIITENDLKNQLDKIAKEQDKLNQAISDKKALISKIDKINNNMIKMVDLLKSFQKYISDNITFTDKRKIVEALVENIIVYTDYDNGQRDIPIVTIAINYVFKNEKNPLKRNYQPSSKQNIHGF

SEQ ID NO: 24124 - protein, 454 aa, synthetic construct
MECVAYLRVSTEKQAEEGNGLDSQKRDIENYCRKNQLIISDWYEDDGFTGSNMNRPALQRLINDCSKKKLKCVVAFKLDRLSRSMVDGIYLIERVFIPNGVDFRCVHDSVSYDSPMEQAYTQMMAVFAQLDKNTMLLRMRGGMLERVKQGYWMGGGNTPYCYRYSKEDGILVPIPERKEMALRAMNLYISGYSDVRIQKLIGFKSEFVTRQVLTSPVNIGMIPYKGKLYKGRHEPIFDIKVFELAQELRKTRKQSKSFCVNHENQLLTGLCYCGVCGCKMRYQKWTHGKHKIYCYSRDNGMSYLPNYNPNCNNSLEWAEDIEKQVEDKILKISLNLSSHKPKERESCLDILSKQLQKEKTKLKRLYTLYAEGNDTVLEMIKETESGIDELKLKIQNEMKNPDNSQKKEFVYDNIKKLADVWEHIDKQNKNRILKTIISKIIIVNGNIEIQLKKF

SEQ ID NO: 24125 - protein, 526 aa, synthetic construct
MPKVTMIPATVNTLTHLPKASVQKRRVAGYARVSTDSDEQFTSYEAQVDYYTRYIQSKPEWDFVRVYTDEGISGTNTKRREGFKEMIADALAGKIDLIVTKSVSRFARNTVDSLVTIRKLKENGVECYFEKEGIYTFDGKGELLITIMSSLAQEESRSISENITWGQRKSFADGKIHLAYKHFLGYKKGEDGRPAIVEEEAVVVRLIYRLFLDGKTQAGICRYLEDLEIPSPSGKAKWSKTTVTSILTNEKYKGDALLQKSFTVDFLQKKTKLNEGEVPQYYVEGSHPAIIEPDEWNHVQAEFARRKALGNAYSGKSVLSAKLVCEDCGGFFGSKVWHSTDRYRRTVWQCNNKFKGGERCLTPTVDTETVQQLFIKAYNQMMGNRKQIIEDCELMRKKLTDFKSLDADIERHLEETQIVAELVKAAVKDNAVTAQSQEAYLKKYESLTKRYETAAAELARLQNLRTLRSQKDKAVALYIRTLKKQPTVLSEWNDTLWTVMVEKAIVHRNSEITFVFYNGTKVKVRQ

SEQ ID NO: 24126 - protein, 433 aa, synthetic construct
MSGKITIVSKPPKLERKKRVAAYARVSSGKDAMLHSLSAQVSYYSDLIQNHGDWLYTGVYSDEAKTGTKDSRAGFQNLVADCRAGKIDMVITKSISRFARNTVTLLQTVREFKALGVDIYFEEQNIHTISGDGELMMTILASYAQEESRSASENQKWRIKRSFESGIPWDRTLMGYRMENEHYVIVPREAEIVRRIYNEYLSGSGYQLIAKRLNEEGVPSRFGGKWNQSAVSRILSNHTYTGNLLLQKTFRENHITKRKIFNNGELPKYLAEESHEAIVDEKTFQAVQEEKSRRAARFNKKSVPKKTYPFSSLMVCDNCGKNYRRKITKTGAVWVCGTYNSLGKAACASKQIPESTLQQVTADVLGQNDFTHEWLCHRIQHNRVCNDNTLIFYFKDGSEITRIWKDRSRSQSWTDEMKEAARQKTLERSKHNA

SEQ ID NO: 24127 - protein, 503 aa, synthetic construct
MHKTEEKQSIKAVIYARYSSDRQREESIEGQLRVCEDYAHRNNMTILHTYADRAMTGRSDQRPEFQMMIRDAATMAFDIVLVYKLNRFARNRYDSAKYKHKLKKYGVKVVSAMENIADDPSGILLESVIEGMAEYYSAELAENVMRGMTENALEGKWPGGVVPLGYKLDAQHHLVIDEPKAEVVRLIYQMTLEGHNQKYIIDELNRRHYTNSAGGPFSYNTLRTILRNEKYIGVFTWGTVRRENACPAILDKATFEAVQEHLKFRTKHHIRSCNEDFLLTGKLFCGCCRSKMIGVSGTSKTGAIYYYYACAAHLKKKCKARNVRKDAIEDLVCEVTTRILSSKEAVGAIARQAIEMQKNKKDSLELQAIKNQIADINKKLQNCVKAVENGLISETITNHINEYEKELTRLKDDAARVKLLDGDIELTQQHIEFFFWSIAQKIKAADKYKSILLSSIVRSVIVYKDYIEIQYNYKNELPILQNPVKVESSYLNQMVTQERFELP

SEQ ID NO: 24128 - protein, 521 aa, synthetic construct
MKKVTKIDGVQKNTAINSKLRVAAYCRVSTGSDAQLESLEAQKSHYEQYINSHEDWQFAGLYFDEGITGTKAEKRPELLRLITDCEARRIDFVITKSISRFSRNTTDCLALVRKLQSLDIPIYFEKENINTGSMESELFLAILSSMAEGESASISENAKWSVKRRFQNGTYKLGYTPYGYDWDGKNMIINPDQAAVVKRIFADILSGKSTNAIADELNAEKVPSKKNTNWTSSTIRGILANEKYTGDVIFQKTYTDENFNRHTNYVEVDQYMAPDHHEAIISHSDFDAANALVNQRAAEKSIEKGSDKYQQRYAFSGKIICGECRDTFKRRIHSCTTYKYVAWACNTHLKNKESCHMKYVRDDEIKAAFITMLNKLIYGYRLILTPYLKVLENSSGDEAIHRIQHLEQLIAQNSEQREALTKLMAQGYIDQILYNQETNALLLQAETYRSDIEAITIGMTGDAAKVTETNLLLHFVSHTDMLTAYSEELFENYADHIEVMSRNEIRFVMKCGLTFTERIGD

SEQ ID NO: 24129 - protein, 569 aa, synthetic construct
MEYRRIEKRNGVRYNDNSLLYLSESEVNMTDKITALYCRLSQDDMLDGESNSITNQKAILQKYADDNVFRNTVFYVDDGVSGTTFEREGFKAMMTDIEDGKVATVITKDLSRLGRDYLKTGELIEMVFPDYGVRYIAVNDNVDTAKSENELLAFKNIFNDWYARDCSKKIRAVFRAKGQSGKHLCPPVYGYKKSDTDKNLWVVDEPAAEVVRKIFKLCIDGYGPVQIARILTEQGIPTPTAYALSQGRDNGRHNAKTYRWGANTITHILERLEYCGHTVNFRTKMKSYKVHKIVYNPQDEWQVFENTQEPIITQETFDLVQELRKHKRRPQKMQTVNPFAGMVYCADCGEKMYLSRRKNERPEQEHMRCSTYAKEQDKCTVHYIRTCVLNEIVLGELNKLLTMVRENEDEFIQTAMSNSVQRKSSELTKAKKTLKQAEKRIAELDKLFTRLYEDNVLGRLSDERFTMMSAGYEEEQTKLKSTVAELTTFVETAEQKSSDVTAFLNVIKQYEHITVLTPKIMHELIDRIVVHEADKSSGKRVQDIVIHYRFDVAVSTISVETGKYGKKVA

SEQ ID NO: 24130 - protein, 559 aa, synthetic construct
MSKTVAIYVRVSTGKQADRDSIPFQIQECSNYVKHFLKTENFEVFKDAGRSGKNTHRPEYQRMIEKVKSGMISHVVVYKIDRISRNLVDFSIMYNDFKEHKVAFISLNEQFDTSSAIGEAVLKIILVFAELERKLTGERVRDIMMNRALEGKWNGARVPYGWDWDTKKQCPVHSDTEAEYARMMYRLYDESHSTCVVRDYCNAHDIPTKRGGEWTSKTVADFLRNPMNVGDYRYNYRKSARGKRNDPSEVIYVKDVFPPLIDRELYERVTHQMDLNTFGLGKDGRKVVSKKTHVFGGLIVCGLCGAHYHSDSDTPRADGFLPSQYRCGAHNRKIHCKAKGTSDVKLGPFIFNYISNLVKASKSKKLLHSVSDLEQILLTGPEFEQVAGIADIGLDVTFDTIMHGFKPKRYTAAPYTVIRSGDSDALTAKRDKTIRALERLKKLFLFEDDAMSEKEYLMSKRELEGTLSDIENELSALEADTADTKYDDMSFISTASGFLIAHQIASGEHINYRELACAVDAKVLKDFANSVIERIVLLDGRVASIEFKNGLVHEFLYRE

SEQ ID NO: 24131 - protein, 581 aa, synthetic construct
MAYAMKVPAASADDRIVAIYVRVSTGYQVDKDSLPFQKKELKAYCKHILHVDMSRVEIFEDAGRSGKNTKRPAYERMMQKVRAGLVSHVLVYKIDRISRNLVDFSLMYDDFKYNRVTFVSLNEQFDTSSAIGEAVLKIILVFAELERKLTSERVKDIMIGRANEGKWNGARVPYGWDWDSSAGWPVHSEKEAPFGRAMYEMYLKVKSTGKIRDYNNAHCIPTKRGGEWTSKTVGDFLRNPMNKGDYRYNYRESARGRKKPIDEVVYLEGVFDPLIDPEIWEKVNKIMDINRDKRNMVGSHPVEKNCNVFAGLIQCGSCGSGYLVGKKDKRRKNGFTPSMYYCGAKTRAIHCQNLNVSDVKIGPFVINYISAMVRVSNERRKIKTPEDLEKMLLSDKAVFADIMGLSSDSLNNTFELLTGKSATGGALWRADPVDQEGVAADPAEIESLKDQIRKYERAKERLEDAYYFSDDGMSEKEYLEKKNRFDSGRVAAENKLKELTETHIASGVDESAFMKSASAFLLTHKIRAGSHIVYSDLAGMVEEESIKEFFNLVLDHITVKDRCVTEIVFANGLSHKFIYRD

SEQ ID NO: 24132 - protein, 526 aa, synthetic construct
MPYCIYLRKSRADAEAELAGEGETLAPPEKTLLALAKKLKLPITKIYKEILSGETIAGRPVMQQLLQDVEAGIWQGVLVMEVERLGRGNTLDQGIILNAFKYSSTKIITPMKSYDPNDEFDEEYFEFSQFMSRREYKTILRRMQRGREASVKEGKFAGSIAPFGYRRVKLPQEKGFTLEVEGAEAAAVKLAYELYAYGDPQPDGTFADIGRATIAKRLDQMGIRNRKGGTWATASVTRMLQNPVYIGKVHWNRRPEKKHTENGKIKKTRPLAENYLLVDGLHEPIISEELWNLAQAKMKQHYRPTGVNGITQNPLAGLVHCSYCGNAMQRRPYLKTGQPASLICTTHFCPQISSPLYMVEGKILEALSLWMKQHEPTWEEESSADVFSTKIMALEHAIADMEQELQGLQSQFEKIFEFLETGIYTPEVFTARNKTLSEKMAEIRSAIEETQAELSKLKAARKNQVSMIPKIKNILDTYETLTPAEKNKLLKEVLDHVEYHKKIKGKKNVPADNFEIILFPKISPEN

SEQ ID NO: 24133 - protein, 544 aa, synthetic construct
MSMENCANTKPKITIIPAKTRVERLDPLSIAMGQKPKIRVAAYARVSTDHEEQESSYEAQVDHFTKLIASHDDWTMVDIYADPGLSGKNTKRVQFKRMIKDCEDGKIDLIITKSVSRFARNTLDCVQTARKLKADGIGIIFEKENLDTLQERSEFVLTIMASLAEEESRSISNNIRWSVKKKFQEGKVILNTKHFLGYTRDKKGTVLKIVPEEAITVRRIYAEFLDGKSLKEIAEGLERDGIASPSGRETWHPSTVKSILQNEKYKGDCHLQKTYLPDFLSPRRIKNEGFAQSWYVEDSHAAIISKETFDMVQQEFQNRQSLRSTGETGCGKFSGKYPFSGMIVCGECGETYRRHQQYNKYKKYYIWVCKRHENTGAEYCKSRPIKEEALEKAFVRALNELIGDKERILEKLQSATVSEITDSCASAINEVNAEIEKLQEQMMELLMKRNNGEVTDKEYEQQSQQVGMKIDQLLMRKEEILSEQGKVQLASYRIEEVTKLLQTGKILEEFDRVMFKSLVRKITVLSNKEIEIEFECGITVRETL

SEQ ID NO: 24134 - protein, 492 aa, synthetic construct
MNIQEIPTTRKEKPRVCAYVRVSTDSEAQEDSFAFQSNYWQRRFESDESVEYIGLFSDEGIGGAFMKKRDGLKRMFQKVRNGEIDRIYTKSVSRFARNKVELMEVVREFRDIGVEIIFESENIHTLDPKCGLILTVMASLAEEELLSMSQNQKWAARKRFANGSVELARILGYDMVDGKLVINEKEAVIVRRIFELYLQGNSFRTICHILENEGYTPMHGGRWSKSTITGMLRNEKYCGDSIMQKSYSTMKVQKYNYGELPKYYVQDNHEPIVSREDYQKAQEIMIARGNKYRPRGSPTALYPLSGKLICGECGTSFKRKTSAHGTPYMCIKWTCRKKDFYGVKECTSHDIKDEVVTRLLIEAYNESLDANNDVNGITEQEEVLRKLIANEQKLRQLRAKGYISESKCREETDKILIKIKEQETLIKNLRTRDMVKGKYKKSDEMTEQMAEFLVKATVKDWKITFEFQNGYKTTKEYTNGRAGNVNGKLCKH

SEQ ID NO: 24135 - protein, 502 aa, synthetic construct
MEIQIREGNSRQKRKLKVCAYCRVSTDADEQENSLENQIRHYEEAITSNPDYEYAGVYSDFAISGFKEKRPGLQKMLADARKGKIDLILTKSVSRFARNTSIVLEATRKLKELNVGVFFELQNINTLSGEGELMLTILAAFAQAESESGSVGAKMVYQRKYEAGIPVQYLERSFGFKKDERGVYIADEEEAVWVRKIYDMAAQGYTLAAIKRYLNENNVKTVGGAKWLDSTVLRILENEIYKGDYIMHKYFVNEERKLVRNRGEVDAWYIEDDHEAIVSPELWQKAQDALEAKRDYLAEGSVIEEFTEENYPYMNKIFCARCGHPLYKRIYSNGNRLNWGCSGTKRYGKSFCEGINIPDGVLRGAWHFDENMYIGEKQTDKGKKEFTYLKEASWKRRHKKKEPEPIPENTETEYPYREKIFCGLCGSRLVRHVNTKNHKVIWVCNGRKRKGKDFCDGTRVPDTIIKGWGEIKKDIYIQRKDDKNGKKRYSYTSKKPKGADRA

SEQ ID NO: 24136 - protein, 548 aa, synthetic construct
MKFKYPAMGTTKNAVIYARYSSHSQREESIEGQLRICHEYAKAEGLAIVGEYIDRAISGTTDARPDFQRMIDDAKKSQFSYVIVYRLDRFARNRYDSVLYKHELKQCGVKVVSATEGIGTGDESILLEALIEASAEYYSMELSRKIKRGRQDSAMKGNFLGGSVPLGYKVVDSKFIIDDETAPIVRYIFERYAAGTGKKQIIDELTAKGYMRRNGKPFTYRSFDSVLRNRKYTGEFTQTGITVEGGCPAIVDTEMFEKVQARLEINRRAPAKAKAKTEYLLSGKMFCGYCGEPMIGISGTGRHEKTFYYYSCVGRRGKSGCKKQHEKKDFIEWYVCEQTVQYMQDPERLSHVAKRIIEINDAEFDGGKVKELERAVENCDSDIRKLVDALTTIPDAARPALYDKIERIGAAKADMEIDLAKLRVLSEVRYKQEDVEAWIRSMCRGDLMDFELRRQLIDVFINSVYLFDDRVVIAYNVKNGKQVSAIDVLNAVEELDGVELFPDSAEDSSAGGNGSFLVADAPPYMKNPNLFPIGNGFGFLIFIKDIID

SEQ ID NO: 24137 - protein, 561 aa, synthetic construct
MDKKKKSALYVRVSTTHQIDKDSLPLQRSDLTNYTKYVLGIEDFEIFEDAGYSGGTTDRPAYQDMMNRIKKGEFTHLIVWKIDRISRNLRDFSEMYDELKKYNVTFISKNEQFDTSTAMGEAMLKIILVFAELERKLTGERVFSVMISRAQKGLWNGATVPLGYEWDAETKFPRPCNSEAKVVQYIYDQYEIIKSTTKLAKKLNIEKIPTKRNGTWTPRTVGSILTNPFYIGTYRYNTKTRKTRRWKNKSEWVVVEDNHQAIINKEQFERVVNIIQSNYKGDKNYQRTNNKVHILSGIASCHKCGKKMHSGLDRARKEGFTPSRYTCYAFNVNYTCANYSSDLAILPGLINYIANYITLQERITPKHSLRDMESILLRGKYFEDIDHIEKQDLKNTYNLLINNTLVTYNSLEDEKKEAIVSQNAIYEAEKEKYIKALKRLDDLYLYDINSMSQKDFVIKRKEISDKIESVNKKIQEVKLNDTPFINNDDFGVLSKASFYLLTKNLSSVKNIDVISLLNNLDKQTVKDFINAIITDVSVERGKIYNITFKNGIVHHFNYKNQ

SEQ ID NO: 24138 - protein, 501 aa, synthetic construct
MEIQIREGSREQKRKLKVCAYCRVSTDADEQENSLENQVRHYETVIKANPDYEYAGVYSDFAISGFKEKRPGLQKMLADAEKGKIDLILTKSVSRFARNTSIVLEATRKLKELNVGVFFELQNINTLSGEGELMLTILAAFAQAESESGSAGAKMVYQRKYEAGIPVQYLERSFGYTKDERGVFVADEAEAVWVRKIYKMAAEGYTPASIKRYLNENGIKTVGGVQWVDSTVFRLLENEIYKGDYIMHKHFVNEERKLVRNRGEVDAWYIEDDHEAIVSPELWQKAQDALAAKRDYLAEGSVIEEFTEENYPYMNKIYCAKCGYPLYKRIYSKGNRLNWGCSGTKRYGKSFCDGINIPDGVLRSAWHFEENTYIDEKASDKGVKEFTYLKERSWKRRHKKKQPSAIPENTETEYPYREKIFCALCGSRLVRYVNPQNHKVTWVCNRRKRKGKEACDGTRVPDTVIKGWGEIKKDIYIQRKDDKNGKKRYSYTSKKPSGIRV

SEQ ID NO: 24139 - protein, 426 aa, synthetic construct
MRVKVINKRPASVLQKKRVCVYARVSTDSRRQEDSLENQTETYERLITGNPEYEFIGVYADQGISGYCENRPQFQRMMEKARAGEIELIITKSISRFARNTVTVLKFARELKELGVGIFFEEQNINTLSGDGEMMLAVLASFAQEESRSMSENNKWSIRKKFERGEVMITTSRFLGYDKNEYGDLIVNRKEAEIVSLTFDLYLMNVGSSRIGQLLDYLGVKTVTGTTWESGTINGMLCNEKYKGDFHLQKYYTPENKRNHTRKNNGEVQSYYISENHEPIVSPEVWEKVQEVREQRKRDRNIGQDSTMKFQNRYPLSGMLICPYCGKTLRRRQVYKKKIQWLCSTYIEKGVKACKGIRIEDAELQGLNIMEQTVIEEVVKNGKKHYCYTSKADFDCGIRNSTGSAEIEDGSVLPSVNRPRRTVIKL

SEQ ID NO: 24140 - protein, 576 aa, synthetic construct
MKYTNQFGESVQISASDEIWLNDEFFAREMAKLPPDAPRAGLAYRVSTKGQVDHDDIPMQKIECRKFCAQHGWRVVLEKAEKGVSGSKISATKRDAIQELKAEAEKGNIDILLVFLFDRLGRIESETPYVVEWFVKHGVEVWSTREGQQKIDSHTDKLINYIRFWQAAGESEKIAERVATRIQQLNSSGHYSGGTVAYGYRAVHKGRVNKKGQPVKDLEVDPAEAPIVQELFELAAYEGKSAYAMAEMLNNRGLRTHSGANFTPVHVLRILRHEGYLGYIVTRSVRSQHLPELEIISPKLFQKANEMVDMRCTANAEARKVAHKSDNNTLLAGLVYCAHCGAKMSGFMHHDRYKLRDGTVKESLKPKYNCYQRAQKLRDCDGQALYLADRVDGIVLEVVRELFSSIRCAPRDKLLEQKIRQEYQDKRKQKTAMEKRLQDCEHALERYEAEVLRCLDGESGFSQEMLARLIVKAEAELRAARQEYAKVLQEAEDDRELAQKIKECYRQFCGWAEEFELAPLARKRMILSELLEKVEVGKGYQVTVHVKLTYKQFLELCQTEETSENSLRNTTDGNVA

SEQ ID NO: 24141 - protein, 493 aa, synthetic construct
MDNRIDAIYGRQSIDKKDSISIESQFEFCRYELKGGEGREYKDKGYSGKNIERPDFQRLLQEIKLGLIKRVIVYKLDRISRSIVDFAKLMELFKQYNVEFVSCTEKFDTSTPMGRAMLNICIVFAQLERESIQMRVQDAFYSRCTKGYYMRGRTPYGFDTEPIVMDGIKTKKLVENAEMDFAELMYQMYAEPSSSYGDITRYFVKNSIDVYGKALQRAFISKLLRNPVYVQADMDIYEYFKAQGVKIESPPEMFTGDNSCYLYQGREGEEQILVIAPHQGRIPSSLWLTVQRKLSQNTSFQNGRKCHNTWLAGKIKCGRCGYALVGLRAQNGVTYLRCKQRADNGSCEGAGTLTAQSMESFVYGEMVEKMRKYHTLKGGKEPGYNPKLTAARVALAKTESEIEKLLDTLSGANPLLLQYANNRIEELDAERQKQLKLVADLTANSVSDTQIDCITNYLNDWESVSFDDKRKVVDILISHIDATSESVTIHWKI

SEQ ID NO: 24142 - protein, 465 aa, synthetic construct
MARSITVIPASQPYRVGGRTQQKTRNLRVAAYCRVSTDQEEQLNSFENQVEYYTKYIQDNPLYQMAGIYADEGISGTNTKKREEFKRMIRDCEEGKIDLVITKSISRFARNTQDCLEYSRRLKNLGIGIFFEKEHINTLDASGELLFTILSSLAQDESRNISENCKWGIRSKFKKGIPQVDCTKFLGYDKGDDGKLIVNKEQAKIVKRIYREFLNGYNPAAIAKMLMEDHIKTGTGREEWRSASVRAILKNEKYMGDALLQKTYTADFLTKKVKKNHGEVEQFYVKESHEAIIPKEQWEAAQLELERRDSYMQKLGLTFYGYGSEINPFSCRVVCGKCGAVCGKKSWKSRGVEFWQCNNRSKNHGVKGCASENLPHENLLKGFITAWNQIVAEREQYLPKWEKKKKEGNPLEKLRAEQMIELTLQPPLTKMLPELGQMVLERVIVQGKEIMVIRFLDGTEIKVRI

SEQ ID NO: 24143 - protein, 498 aa, synthetic construct
MQIEVRKADMGKEKKRLKVCAYARVSTEASEQENSLENQVSHYTEMIQSNPAYEFAGVYADFGISGFKESRPQFQKMMQDAKNGKIDLIITKSVSRFARNTAIVLKASRELKERNVGIFFELQNINTLTEAGELLLTILAAFAQAESESASESSKMAYLHRIENGEVVAYLERSYGYEKDENGEYRAKEPEASVIREIYDLVIQGVNCTNIARVLNARNIQTVQGAEWTASTVFRIVENEIYKGDVLMQKTFIDGKRHQVQNRGEKAMYYAKDNHPPIVSEKTWEKAQRKLEDMRAERAEHSVIQEFTEENYPYMNHIFCAKCGWPLKPRVYSHGHRLSWDCSGQKRGTKKFCTGIHVLDNDLRKMKIEGNRYFSETVDKYGEVHLKHVGERTWKNKHKKKKFNHKDLYPELNEENYPYYKRLYCARCGSRLGRYISHGTVRWICSSYKRKGQAKCPGVRIPDEIIKEWNLPDGKIYIMGKEDKNGEKHYSYTSESAL

SEQ ID NO: 24144 - protein, 573 aa, synthetic construct
MKKAVIYSRVSTLEQDYTSQTAELKKEAERMGYEVTHIYEEKESGFVDDRPELAKVLALTNADTDAVFVWEISRLSRRTVMVLSTIEDIEKKGILIYAKNENYRSWNEKGVKDSTSKLVLTLYASIAEAEALKFKERVKRGKRYRVLVEKKSYCNTSVFGYMKDENGRLVINEEEAEIVRDIFNKALEGYSGRRLKLYLKSKWGLDWSANTLNYLLHNTAYMGQKKVGGKTYYKAEKKKLEEGTKIRFFNPETDVVETPAIINSELFNKVQTAITNRKTRSSAKEARNAKPKLLKGLVLCGRCGKVYTNTGRMYTCTSGTNEYSERCGSTSVATASLDSAVWNVTKEIFSEAMAKELAAQKSEPIAAEIARLKEEIEGYNEAISNLKKQVGNLLRIASKADDVADDIIEKINILKKEQQMAKAEIADREAKIALLQKRLDAPAEMTEITDEDEKFEYLHKVIEAVFVYGEHKHKILAIQYLNGITAYCIRLWKDWYWFLDKGELVITDAVALQKNSPVDLKLKDSILIEVTDSNNAYYSGEDTDKEIFGQYTTEGFYAAMMQNKQLKPVAVKK

SEQ ID NO: 24145 - protein, 453 aa, synthetic construct
MIKGACYVRVSTDNQLENYSIEEQTDRLKAYCKAKDIQIVKIYTDGGYSGGNINRPALQQMLQDIGKGLIDSVIVYKLDRLSRSQKDTLMLIEDCFLAKNVDFVSVNENFDTSTPFGRAMIGILSVFAQLEKDQITERFTMGRIGRAKNGYFHGGGNAPTGYDYIDGELIINDYEALQVKDLYNRFLKGYSIHNCWQYMHQKYGGWSNEVSVRNVLKNELYIGKVKFKGVAYQGNHQPIISEEIFRQVQDLFNSSRRTSDTFKRSPFKANTLLSSLVYCGKCGARFHGEHGNYSCYSRTKGDKKYIVDPNCKNKKWKIEELNKLVLDYITRLDFSKLQNSHPAPVPVTDYSLRLTEIDKQIEKLIDLYQVSGIPLESIQKKMDALTKEKEALLNVSKPKNVPITTLAEMITARDTLMSLADTGSLDEKRACLTMIIDRITIDDDNVNIKLKHL

SEQ ID NO: 24146 - protein, 528 aa, synthetic construct
MAVAMYLRKSRADREAEARGEGETLARHEKILRDLASKTGLKIGAVYKELVSGETISARPQMQHLLLEVMQGKWDGVLVMEVERLARGDTRDQGTVSEAFKLSGTKIITPIKIYDPNNPYDEEYFEFSLFMSRREYKAITRRIQTGRLAAFNDGWYIAGTAPYGYKKVKKKGDRGYTLEIVEEEAQVVRMIYQMYTEGILQPDGSFKAAGSFQIRDRLNDLGIPSRTNGKWTAPSILDILHNPTYAGYQRWQWRKEQKSFSGNEIVKSRRKDENCLKVRGRFTPIISMDTYNSAQETRKGKKTAHYGSYNALCNPLSGLVYCQKCHTLMSRQLSNTKDRYAILRCPNSQCSNISSPLYLIEQKVIEGLEEWVQKYELEWPEDMLGNTQETITLLENSIKTLQSKREQIEVQLSNTYDLLEQGIYSLSTFKERRTILEEKKNTLDTELENLQIEQKTLIAQEQARKDFIPSIHRIIDAYWNIEDVEVKNSMLHEVLDHIDYLKTDRTKKGTRDSAYFTLHFYPKIPENR

SEQ ID NO: 24147 - protein, 518 aa, synthetic construct
MIEQIKAALYVRLSQEDRNKLHPEDNSESINNQIMLLKSRCEKEGWIIYDIYNDDDFSGSDRQRPEFNRMIEDARLHKFDVLLCKTQSRFCRDLELVEHYLNYMFPVWNIRFLSIIDNADTSNRQNRKARQINGLIDQWYLEDISENVKAVLSAKRKKGEWVGSQAPYGYAKSPEDKHKLIIDEPAAKIVRYIYRLYINGLGYASIVRRLNDEQIPPPAKYKNLKEVSSHKKTATRGLWCYYTIQKILSSQVYIGNTVQAKSEKLSYKGEERRYKPQSEWDIVENTHDAIVSYDTWHKAQIIRSTRSTPYKQDMKNTVFSRMCKCVYCGATLNKHTYHNSPMLECPTKHIKTGICPGCVITVKRLEEIVIDEIKDHCQRLMDVSAVKSKIDSNVEINNRRQEILKSIESAIKKQKLLKNRLTSLYMDKADGIISINDYYQFKNAIDADSVEIDTTIKLLESKLLSIDDEIKALESNHTIVTQYSNIEKLTHNELMFLVDYIEVGGTRDNRIVRIHWKF

SEQ ID NO: 24148 - protein, 552 aa, synthetic construct
MQREDLINYAKYALGIDKYEIFEDAGYSAKNTDRPAFQQMMSRLRTGEFSHLLVWKIDRISRNLLDFAEMYSEIKKLGITFVSKNEQFDTSNAMGEAMLKIILVFAELERNMTSERVTAVMLSRASNGQWNGGKVPFGYNYDKQTREFTINESEASVINLIYDTYEANNSLTLVARTLNEKGIYPRSGTPWNPATVSTILKNPFYTGAYRYNYHDESKSGGNTSSKHIKDRSEWVYIENHHPAIIDAERQSRILAILESNRRSNHRSSKTYIRKNVHIFAGLLYCGYCGSQMQSTIDRERADGYRPSIYACSRKRRFNDCKNKYVSDVTLAPFVLNYIANIIKAQNNFGKSTPIDTFERKLLRGEIFADVDHIEPVGLTEMYNMLKRGNLSDAVFSSARIQDAEADKMAADERDLLASERRKKERALDRLKSLYLYNDEAISERDYLVEKKSLTDSIDKIDKRLEEIERNSSHHFTLTDEEFMAKASVFIVTNQLQGKRFIDAEKLLRQIDTRVVKEFLNSVVQKIVIKDGRVLSIRFKNGLEHKFLYKDAE

SEQ ID NO: 24149 - protein, 567 aa, synthetic construct
MQSKNKNQIGITALYCRLSRDDGTESESNSIGNQKKLLSQKAKEMGLTDTKYYVDDGYTGTNFNRPGFQQLIDDIEIGLVSAVMVKDLSRLGRDYVSVGNYTDSYFPEHNIRFIAVNDAIDSDEGESEIAPFKNILNEMYARDISKKIRSSHRLRGSMGEPLSQPPYGYMKSPENKKKWIIDPEAATVVKSIFKMCLDGKGNETIARELQENEVLIPMAYWRSKGLNRGGKKTQTNPYKWCKTTVQKILSQQEYCGDIINFKTYSKSFKNKTRYENSKENWAVFKNVNEPIIDRETFETVQKFISKTKRRAPKKENGERSIFNGLIYCGDCHSKMRYHTSTSNKEIHYFTCSDNKVDYRGKCPGRHYVRADALEEVVKLELRRLVEMLEIDESYFAQLLLRKNDEEREKDKKFLESELQKAIARSNTVSQLYEKLYEDNVIGKVSDEWFVELSHKYEKERMDLKAKIADTRHQIEELKNTNSEYGKFISAIRRFMQMDNLTSPLLRELIDHIDIFETEGTGKSRTQRIVIYYRFIGYIELPNATKQTHIADTRKGVAVEYITEQFTA

SEQ ID NO: 24150 - protein, 456 aa, synthetic construct
MRNQNTSEVPIRAALYVRVSGEEQKIKGLSIEAQKERLVAYAKERGWIIAGLFVDAAKTARKNMHKRSEFQKMLDLVRADGVDMLLFCRLDRWFRSVRDYYKVMEVLEAHSCQWKTTDEEYDTTTANGRLYINVKLSIAQNEADICGERIHVVFDSKIQHGTVLSGKCPFWLRINNERRYELIPENAAIIQDAFNHFENTTSQRATIRYIRETYDVNWCEATFRRMLRDKLTIGVYDKNGRYNNDFCPPVISKEQFEHVQELLRRNSRHNPAGRVYIFTGILVCEECRHNLVGYYSRGYIYYRCSQHFQRGRCIHNHSAREDVIEAWLFEHLGEEIEKYEVAWNVQAAERKRTAASIDRSVLRRKLTKLKDLYMNDLIDIDEYKKDYETYTAALSALEDPEEEKHIDLSGVRRIISHDFREIYDSLTREEKRTLWKNTLKEIRVNNAHEITGISFF

SEQ ID NO: 24151 - protein, 456 aa, synthetic construct
MRNKEIAPALVRVALYIRVSGEEQKIKGLSLEAQQERLEAYARERGWVIVGIYIDAAKTARKNIHKRTEFQRMMDSVKRDEVDILLFARLDRWFRSVADYYKVMEILQAHNCDWKTTDEEYDTTTANGRLYINVKLSIAQNEADIDGERIDVVFDSKIAHGTVVSGSAPFGFRVNEEKRLEVVPEDAAIVQDAFNYFENTVSQRATVRYIRETYGVNWCDATFRRMLKEKLYTGVYDRGGRYNDQFCPAIISRQQFDRVQALLTRNVRSAPSGKVYIFTSILTCAECGHKLVGYKSSDYFYYRCNQHFQRGRCSHNHSAREDVVEQWLFEHLGEELDRCQLEWDVEAAKKKASVARTDKAALKRKLTKLKELYVNDLIDIEDYKKDYQIYVSALNQIPEPAQEAPPDFAAVRRLLDNSFRTIYDALTREEKRTLWRSVIKEIRIDNDQNITGVVFG

SEQ ID NO: 24152 - protein, 572 aa, synthetic construct
MASRIAEKLAAKKAAIYIRVSTHWQVDKDSLKVQRRELIAYVTLVLGITDYVVFEDPGYSAKNTDRPEYQAMMDRIRTGEFTHLVVWKIDRISRNLIDFAAMHDELQSLGVTFVSKNEQFDTSSAIGEAMMRIILIFAELERKTTAERVTAVMLSRASDGQWNGGRVPFGYSWSKETKTFSIVPEEAKAIRRMAELYEQYQSLLYVAKYLNDTGIVTKTGGQWTPTTVRTILTNPWYIGQYVYNVHSDGKGIEKRDSDEWITVENHHEPILNEDVFCRMKFLLTRNKRGGVPSHKTYVRKNIHIFAGLLRCGQCGSNMTANLDRRRANGFRPSQYACGSRRRKGTSCTNKYISDTTLGPFVLNYVANIIRASKNSSEATTPEVLERKLLRGEAFEDVASVSTDALGQLLDAFRSAGDAVEYRPQIAFSGDDNSIREIDTLRARRRKLDNALARLNALYLYDDEAMPEKDFVMQRGQITKQLEEVNARIEELQNQESSEELGDGFIGKASYYIMANKLIEDRYIDYEKYIRAIDPSIPHSFLQQIIDHIVVNDGRVTSITFKNGATHTFTYKT

SEQ ID NO: 24153 - protein, 513 aa, synthetic construct
MKAVIYARYSPGPNQKDKSVEEQIADCRQFARENDIMIVGDYADRKKTGRNDNRAEFQKMLKDSAKGLFDAVIVWKIDRFGRNREEIAINKVKLRRNGVRVMYAKEHIPDGPEGIILESTLEGLAEYYSANLSQNIMRGMRGVAMKGQSTGGGGHSLGYYVDQDKYFQIDEHGAQIVRQIFEMYSSGKQASEIIKELNGRGLKTANGKPFNHNSIARILSNRRYIGEYRWHDILIPDGMPRIIDDETFERVQKRLEKNKKAPARKIQAGSEEEFLLTTKLFCGHCGATMIGDSGTGKSGKKYSYYTCSTRKRRKDGRKCDKKSVRKDELERYIVEQTVAHVLVDDVIEYIADKVVELQRKELQDTSMLDYYKSSLRDTEKSLKNIVTAIEQGIFTPTTKDRLLELEAEKADLEECIQKEEIARPTFSKEQIIFFLERFKGGDVNDQSYQRQIIDTFVSRIWIYDDKTVITYNYSGEGNTITLEAAEKAADEAVGGCSAQLPPSPPQKNRVGIG

SEQ ID NO: 24154 - protein, 572 aa, synthetic construct
MAFRRIAIDGILRYNDNIACFICRKGRFNMTDKITALYCRLSQDDMLQGESNSITNQKAILKKYAEDSGFSNLVYYVDDGVSGTTFERDGFKAMMADVEAGKVGTVITKDLSRLGRDYLKTGEYIEIIFPDYDVRYIAINDNVDTLKSENELMAFKNIFNDWYARDTSKKIRAIFKAKGQSGKPLSLPIYGYKASEEDKHKWIIDDEPAAVVRKIYKLCISGYGPTQIARKLTEEGIPNPTAYAISQGRNPANKNSRLDRWCTETVIDILEHPEYIGHTVNFRTRRKSYKNKRKIENPKEDWLIFENTHEPIVTQQEFDLVQEMRKDKRRNQKQETVNPFSGICYCADCGKKLYLCRSKSFSEEQEHLKCSTHSADKNSCSSHYIRTVVLKKLVLNALNKLLDNVKDNEAEFVQTAMDNSASKHSSDVFKAKKALDQAEKRITELDRLFVRLYEDNISGKISDERFAVLSAGYEDEQKKLKAKASELTAFIETAEQKCADVISFIKVVQKYEHITELTPEIMHELIEKIVVYAPEKSDGHRTQQIEIHFRFDVAVATAIADSREYEKKKKAA

SEQ ID NO: 24155 - protein, 518 aa, synthetic construct
MQENETYVIYLRKSRADSEKSSLEEVFTKHESELQSLAERTLGNRIPEDKIFREVVSGETITDRPVISQILKVMESKKIKGVFVVDPQRLTRGDLLDKGHLINVFKYTNTKIITPYKTFDLNNDFDLKLFKMELDKGSDYLEYYKMIQARGRIASVRSGQYIGSTAPYGYDKYSYKENKHTVNTLKPNSDEATVVQLIYHLYVNESLSYAAIANKLNTMNIKPRKSTSWSPYSLKEILHNPVYIGKVRWNRRKTVMKYKNESLLKTRPIALNDSIISDGIHEAIIDEALFDSAQECNGKTPRNHSSSKLINPLAGLIFCGNCGRAMSYKTYKNNAGSEKQSPRYLCNNQSNCHTKSAKATDVINQIISALECYIEDFKVKLENDDGNSFNVRSQIISVLNKQLQDLEVREETQYEMLENKIYTPELFKKRRQKLLEEREVLLDKLQEAKVQEPVKIDYQKKIISFTDTVEALKNPDIDILQKNMLLKKCIKKITYTTDKEKGNRWRKSTFEIDITPLI

SEQ ID NO: 24156 - protein, 540 aa, synthetic construct
MENSASVKPKIRLIPAKQRQELVGRATPNGELAKLRIAPYARVSTDHEEQESSYEAQVKHFKQLIESHTDWELVDIYADPGLSGKNIKRPNFQRLMNDCECGKVDMIITKSVSRFARNTLDCVKTVRKLKEMGIKVYFEKENLDTMQESSEFVLTIMASLAEEESRSISNNIRWSVKKRFENGEVILNTAHFLGYTKDENGTLKIVPEQAITVRRIYGEFLDGYSLKEIADGLMRDGILSPSGKSRWHPTTIKSILQNEKYMGDSHLQKTYLPDFLSPRRIKNEGQADSYYVEDSHAAIISKEMFDLVQQEFKGRNELRSSNRTGHGKYSGKYAFSGMIVCGECGETYRRHQQYNAYKKYYIWVCKRHENKGKDYCSAKPISESALERAFIRALNGLIENREKILDKLQKAVVGQISDSCEDDIAQIDKEIQGLQNGIVDLLMDKNKGRLTDKQYERETQLLKFQIDELNLKKEVILNEQGKIQLAEYRAEVVTDLLKTGKILDEFDKTIFKSLVHKIKVIGGKEIEIEFECGIKVTEKL

SEQ ID NO: 24157 - protein, 573 aa, synthetic construct
MYNYNTLTPKERKVVVYARVSTEHEAQLSALENQKDWYKPILAQHPEWTVIRMYVDEGITGTSAQKRPQFMQMIEDADDGEFDLILTREVSRFARNTVDTLQYTRNLKAKGVEVFFINDNIKTFDGDGELRLTIMATLAQDESRKTSIRVKSGQQTSMENGVFYGNGNILGYDRVGKEMVINPEQAKTVRMIFDDYLDGVGIRAIKFRLEQAGRLTAMGKSNWHESNISKVLQNSFYCGIITYHKEFTPDFLEQKKIRNFGDMEFTKVRGSHEPIITEEEFERVQKMIAARRRTLSNVTSGKRKALGEKQPGDVWTELLICECGHKFNRKIWHNKGDIKQYGYQCYSSIRTGSLKTRQNKGLSTEGICEVPMLAGWKLQMMAKHIFREYLKDTVQVLALAESMLEKHIDDVEEPQVNEKIIKQKRDEADKLNKRLHNLIEMRADGEISRDVFKVKKEEIENRLAAIQKELAELEPVQEVVDEATHEEKITLLKYYLEQSVKPTNDEDIPEDVIRAFIVKIVAHKDGFDWYLRFSPDKPPKTLGIEGKRKDSAKVSSLSLPQHRQRSRMAGIKR

SEQ ID NO: 24158 - protein, 507 aa, synthetic construct
MRKKVAYLRKSRADIELENTTGEDTLKRHREIIKKLAKQNSVILDTYFEEVVSGETIQARPKIQELLKEVENNEIDEVYVVDVDRLARGDTEDQGRISKTFKFGNTKIVTPGKTYDPNNEFDEDFFEFGLFMSRREYKIINKRLNRGRLSSINEGKFIGSVCPYGYSKEKLKGQKGYKLIINEEEAKIVKIIFNLALSGIGASNIANHLNRIGSKPRKAEIWVSASIRDIIHNPVYYGMIKWNYRKTIKTMKNGIIYKSRPKQKEYILVEGLHEAIIDEETWKIANNNFKIKEGKSVKKDLTLQNPLAGLVECGICHRTMQRRNYRSGHIDGLICPLPHCKNVGSHLHMVENAILDSLQRYLNQYEETLASYKKNEQVHELDTNNVELIEKEIEKTKNQLNKAFDLLEQEIYDNTTFIERSKSLKIRIDELKKEKEKYSIKTKQEKIEKIKDIIPKLRNAINTYSTSLPATDRNELLKSVINKVYYIKSVRGKGHEEEFELQINIKL

SEQ ID NO: 24159 - protein, 526 aa, synthetic construct
MPYCIYLRKSRADAEAELAGEGEPLARHEKTLLALAKKLKLPITKIYKEILSGETIAGRPVMQQLLQDVEAGIWQGVLVMEVERLGRGNTLDQGIILNAFKYSSTKIITPMKSYDPNDEFDEEYFEFSQFMSRREYKTILRRMQRGREASVKEGKFAGSIAPFGYRRVKLPQEKGFTLEVEGAEAAAVKLAYELYAYGDPQPDGTFADIGRATIAKRLDQMGIRNRKGGTWATASVTRMLQNPVYIGKVHWNRRPEKKHTENGKIKKTRPLAENYLLVDGLHEPIISEELWNLAQAKMKQHYRPTGVNGITQNPLAGLVHCSYCGNAMQRRPYLKTGQPASLICTTHFCPQISSPLYMVEGKILEALSLWMKQHEPTWEEESSADVFSTKIMALEHAIADMEQELQGLQSQFEKIFEFLETGIYTPEVFTARNKTLSEKMAEIRSAIEETQAELSKLKAARKNQVSMIPKIKNILDTYETLTPAEKNKLLKEVLDHVEYHKKIKGKKNVPADNFEIILFPKISPEN

SEQ ID NO: 24160 - protein, 453 aa, synthetic construct
MECVAYMRVSTEKQAEEGNGLDSQRRDIENYCRKNELVITDWYIDDGYTGANMDRPELQRLVSDCDRKRVGYVVAFKLDRISRSMVDGIYLIERVFLKNNVEFKCVHDSICYDNPMEQAYTQMMAVFAQLDKNTMLLRMRGGMLERVKQGYWMGGGNLPYCYTYSKDTGTLIPIPERKEQANKAMDLFLQGYSDVKIRDMLGFKSEFVVKQVLTSPVNIGMIPYKGNIYQGLHEPIFNKEVFEKAQQFRAIRKNKRASCHNIQTNLLTGLCYCGICGCAMRYQKWTHGKHKIYCCSRNKDLHYLPNHNPNCNNTLEWASDIEKAVEDEILLISANISEYKPRMKESKLEILQGQLEKEQTKRKRLYNLYAEGNDDVISMIKEIEKVIEDIRKQIREESAIETNKTRQNVFKNIKNLADIWEDIDKKQKNMLLKSIIEKIVISNGNIEIKLKDF

SEQ ID NO: 24161 - protein, 522 aa, synthetic construct
MGNVMVIPARRQVGNTVKQSDQKKLRVAAYCRVSTDSEEQEISYEAQVTHYTEYIQKNPEWELAGIFADDGISGTNTKKRDEFNRMIDECMAGNIDMVITKSISRFARNTLDCLQYIRQLKDKNIPVYFEKEAINTLDAKGEVLITIMASLAQQESQSMSQNIKLGLQYRYQQGKVQVNHNRFLGYTKDDNGHLIIDPEQAEIVKRIYREYLEGSSMDKIADGLMADGILTGAGKTKWHTSTINKILRNEKYMGDALLQKTYTTDFLTKKRIKNNGTVPQYYVEGDHEAIIAKELFMQVQAELVRRRVVHVSPTGKKRSFSCNHCFAQMVFCGDCGELYRRVHWNNHGCKSIVWRCISRLEPTSAEMDCTNRTVNELLLQEVTVKAFHQILTERDFFLKTLQQNIAKAVVNADTLSPDGIQARLEELQKELIKKANNKQDYDAIADEIFRLRDQKEQSELDSHHREEAMNRIKELQDFISGQETDITEFDEALVKKLIEKITVFNDHFTVEFKSGITIDIES

SEQ ID NO: 24162 - protein, 581 aa, synthetic construct
MSRTTNKRPGKAKSGLSRKQKVAIYIRVSTLYQVDRDSLPMQRKDLIAYASLILGIEEYEIFEDAGYSGKNTDRPAFQEMMQRIRKGEFTHVLVWKIDRISRNLLDFAEMYEELQDLRVTFVSKNEQFDTSTAIGEAMLKIILVFAELERNMTSERVTATMISRANSGLWNGGRIPFGYDYDPDKTAFSIREDEEKVCQMIKNDYMEHKSLVHTSRMLNASGYKTRAGAEWSPTAVWIIISSPFYAGIYRYNRYKGTERRVENPEDEWIMIQNHHPAIFSLEEHEKMLAILDENSRNHRSVGQKHQTERVHIFGGIAYCGKCGSKMVSTPGRLHANGYRPTNYSCPKHRKTKECDNPTVSDTQVGEFVINYILNMLGAKKKFSTIENPEDLERCLLYGNTFSEVEHIDSNGLNEYFNLLSRYSSDDSYTFSVKKSRKKKAEVDPEVEALRKEKEKQERAMKRLQDLYLYSDTSMSEKDFIIRKTEISKRLEEINAMLGMVAKNSEPSLSDEEFVRQASHLLISRELQNRQYIYFKNLAQNVSPEILKAYMETVLDSVLLVDGRVSSIVFRNGLTHKFKYKS

SEQ ID NO: 24163 - protein, 539 aa, synthetic construct
MENVKRVYCLYRVSTVGQVEKDDIPMQKQFCREFVNCHPGWHIENEFYEKGISGYKVSAKDRDAVQEIQRDAVQGKFDVLLVYMFDRLGRRDDETPFVVEWFVRNGIEVWSAVEGQQRFDNHVDKLLNYIRYWQASGESIKTSVRVKTRMEQLTQDGLFTGGSIPYGYRLEKRGRINKRNREVCDLTVDDDAAKIVQLIFYKYVHEGYGAQRLCRYLTELGIRKADGRNFPNTTINRIIKNPIYVGQLHNGDATSERIPELQIIDQDTFDAAQQLMAARATHHADTPLNMKGQSLLVGNIFCGHCGNRLTLTTSGRKAIQKDGTVRREIRCRYQCHYNLRHPGECDGQSGYGVTKLDGIVEKIIRHQFAQIKMASQDDVIAQQHEKAVELARARCNMAEMQLSEKRRELEDYQKEIIKVIRGESRLNVDLLNELIDKAQTDVEALSQTAEAARQELESRTADMETEQQEYDKLKTWADLYDNCSFAAKKVIVSQFIKSVRVYRDYTLEVEFNVSFEQFQQLQAACSGGANERTNVCIEA

SEQ ID NO: 24164 - protein, 544 aa, synthetic construct
MNTVIYARYSAGPRQTDQSIEGQLRVCTDFCKQRGLTVIDTYCDRHISGRTDERPEFQRLIADAKRKKFEAVVVYKTDRFARNKYDSAVYKRELKRNGIQIFYAAEAIPDGPEGIILESLMEGLAEYYSAELAQKIKRGMHESALKCQSTGSGRPLGYRVDEQKHFQIDPESAQTVQTIFEQYIKGESNAAICELLNSRGLRTAQGKPFNKNSINRIIKNRKYIGEYRYHDIVVESGIPAIISKDTFNLAQAEMERRRTRKAPKSPKAEYLLAGRLFCGHCKGPMQGVSGTGKSGNKWYYYYCGNTRGKNKTCDKKQVSRDRLERAVVDFTVRYILQEEVLEELARKVHAAQERQNDTASEIAFYEKKLADNKKSIANVLRAIESGAATQTLPARLQELENEQAVILGEISFLKGKRLAFTEDQILFALMKHLEPYPGESEQDYRRRIISDFVSEVYLYDDRLLIYFNISSEDGKLKSADLSNIEGGEFDEGLVSSTMKADLFRQVCFSYASMQTFVLSFAPPLHAACNCWNCSKETLNSTSSV

SEQ ID NO: 24165 - protein, 514 aa, synthetic construct
MKQCVIYARYSSERQTEQSIEGQLRVCYEFAKNNDLIVVHEYIDRAMTGTNDLRKEFQQMLSDSEKTKEWDICLVYALDRFGRNSIEQAINKYRLQKTGKIVISATQRTSRNIDGSQNLDGIILENMYVGMAEYYSAELSQKVKRGMNESRQKGNFTGGYIPFGYCVTGDRKTGRKVQINEDQAVIVRKIFEDYAAGRLVTDIIDELHEKGIENRGQPFARNTVYYLLKNEKYAGIFRHGDEVFTNIYPPIISQTTYDIVRARIENNKYGKHKPDVEYLLKFKVTCGYCGSPINSDSGTSKSGVIMRYYKCSGRRKGKNCQSTPIRKEVLEKVVIDATYKALATPDLIEDIAERIMGAHQKRMDDQSILHILEERLAEKKSSIDNLIAAMEQGIISQTTKERLNALEAEKAELINKIAVEKLKSNLIIQKHDIVKYLQSAVKKRPLQMIQLLIKQVVLYNDKIEIHFNYTDGKRPDDELHQAFSFYSFNQRITIDQHKIGKEPIVTDYEINLFI

SEQ ID NO: 24166 - protein, 499 aa, synthetic construct
MKTGVIYARYSSDTQTEQSIEGQLRVCNEYAKNNDILILRTYIDRAMTGTNDNRPDFRQMIEDSKKHDFNVVLVYKFDRFSRNKYETTKHKKTLKDNGVKVVSATEYIPDSPEAIILESMIEGYAEYYSAELSQKVKRGMNETRQKGNFTGGTIIYGYKVENHKVVIDEEKAEVVRFIYDQYAQGVYVKDIIKTLTERGIFNRGKKFARNTVYNILKNEKYSGIYRHGNEVFTNMYPQIVPTEIYENVRRKTETNKYGTRSVEVVYLLRNKIKCGYCGSPISAECGTAKNGQKIRYYKCLGRKHQSGCKKSQVRKEILEKYVLDNVCEQMQRPEILDKMATYLLQVQENRIKQNSVLTNLLKEKRQTENTISNIMQAIELGGQSATVMKRMRELEEKLTDIEKRLTIEKSQTAFRLSKEQIIDYYKSALEKKPLQLINYFVKEIQLYDDNMIIIYNTPKTINLDESQGFSFYDKNVKMPFVIQNREYYGLKDFRLIMRV

SEQ ID NO: 24167 - protein, 485 aa, synthetic construct
MPTSDLKIAAAYIRVSTDDQEEYSPDSQVRLIREYARKNGYLLPEEYVFQDDGISAATARKRPAFNRMIALAKEKERPFDAILVLMFSRFARNREESVLYKGLLRKQGISVISVKEPVVDGPFGTLIESIIEWFDEYYLINLSAEVKRGMSEKFLRGEAMGTAPFGYCIDSANKTFTVDPERAEIVCDVFRSYADGAGLRDIAVQLGDAGITTRRGNRPDSRFVEYMLRNPVYIGKIRWTPGHKTRYSRVHIADGVEVVDGKHPPIVSIDLWEAVQRRMDQRKAAYGRYQRQAPAAWMMRGLVRCSACGATLIMAGRSSSCPFLQCHSYAKGACHTSHSLSLRRANAAVLTGLRRSVGTLIFHMVPHLTSAPSRAADYGRLLEQERRRLARCKDAYQAGVDTLEEYRDNKTRLEERIRRIEEQAASAAAAPESFDKAAYGKKAADILRFLETSADEGAKNEVLRSVVDHITYEKASRHLAIYFYT

SEQ ID NO: 24168 - protein, 527 aa, synthetic construct
MNTAVRTVTVIPPSINPMTHLTDTPLYKLRVAAYARVSTDSDEQFTSYEAQIDYYTQYIQRNPEWTFVKVYTDEGISGTNTKHRAGFNEMIEDALAGKIDLIVTKSVSRFARNTVDSLVTIRKLKEKGVQVYFEKENIYTFDGKGELLLTIMSSLAQEESRSISENVTWGQRKRFADGKVNLPYKQFLGYRKGADGFPEVVPEEAVIVRRIYTRFMEGLTPGAIAKELTADGIPTPSGKQRWQTSTVESILQNEKYKGAALLQKCFTVDFLTKKRKVNEGEVPQYYVEHSHEPIITPEEFDKVQTELARRKRISRQYSGKSIFSSRIVCGDCGSYFGSKVWNSTSKYRRVIWQCNGKFKGEHKCETPHLDEETIKARFVAAINAIIDSKDNILEDCRLMQTTLTDCTGIDAEIESLLEEIDVVAELTKRCIAENSQTAQNQNEYAARYNGFVERYEKAKAQLEQLRATKVAREAQAEAIGAFMFEVQELDALTNFDDKLWLTVIDTVTVHADGRMTFKFQGGTEIEA

SEQ ID NO: 24169 - protein, 510 aa, synthetic construct
MTAVIYARYSSDNQREESIEGQIRECTAYAEKNGITVVKHYIDRALSAKTDNRPDFQQMIKDSEKRLFDIVLVWKLDRFARNRYDSAHYEYQLERNHVKLVSATEPISDSPAGIMVKSMLTGMAEYYSAELSEKVVRGMTENVLKGKYNGGTIPIGFKVDEEKFFQIDPLKAPFVVEAFQRYNDGATMKELMNWLNDSGVTTNRNQKFTYNSVQKLLTNKRYIGENHFKDIVMPDSIPAIVDKDLFEEVQLKIKKNSRAPARHKAEDDYLLTTKLFCGMCGAMMFGECGTGRNKVVHHYYKCATAKRFKTCKKKTVRKEWLEDLVVAETMKLIQDDAVIDAIVAEVMELQDQENTTLPLLEKQMREVENGIENMLNAIQAGVLTNSTKSRLEKLEAQQKELEVRITEEKIARPRLSENQVRFWLTRFRKLDPNVKSHRETLINTFVNAVYLYDEKVLITFNYKDGTKTVTFDEIAAKDAPEGNGSDLGCFAPPKNLNVCKYAEVFVLRQG

SEQ ID NO: 24170 - protein, 539 aa, synthetic construct
MKKTKNSVQRAVIYARYSCSNQTEQSIEGQLADCEKFAEKYNYYIVDTYIDRAMSATTDRRPQFQQMIADSATGGFDVIIVWKLDRFARNRYDSAVNKQKLNSNGVKVVSVMEHIEDTPEGALMESVLEGFAEYFSKDLSQKVSRGMRETALKFKATGLIPYGYKKTSDNICVPDEHTAPVVKKIFEMYAGGMINKDICDWLNSHGYRTSNGNLFRNQYLRKILNRRRYTGSYTYGDLELHDENQRIISDELFDRVQIQLQAKKRTGRIAREQYILVGKLFCGYCRNPIRGESGRNHQNRIYTYYKCSVNKTGGKCPKTTVQRDIIENSTIKFILNNFLNDEIINSVVDTIQASETAENNSAELIALRTQIEDTDRKINNLLSAIENGVFTPSTKQRLNDLENAKEKLKYELIVKQSEKNNFNATAFKRFLKNIDVDDFKTTEQRQKLINLVLYREYLWNDKVLYIFNLTPSKPNDSVDIDSYVDALIASTGSTSSTSPTDGVPQVAISELLFGYFFIMGFFPFHKHFALSCFALYIYR

SEQ ID NO: 24171 - protein, 498 aa, synthetic construct
MTAVIYARYSSDNQREESIEGQIRECTAYAEKNGITVVKHYIDRALSAKTDNRPDFQQMIKDSEKRLFDIVLVWKLDRFARNRYDSAHYEYQLERNHVKLVSATEPISDSPAGIMVKSMLTGMAEYYSAELSEKVVRGMTENVLKGKYNGGTIPIGFKVDEEKFFQVDPLKAPFVVEAFQRYNDGATMKELMNWLNDSGVTTNRNQKFTYNSVQKLLTNKRYIGENHFKDIVMPDSIPAIVDKDLFEEVQLKIKKNSRAPARHKAEDDYLLTTKLFCGMCGAMMFGECGTGRNKVVHHYYKCATAKRFKTCKKKTVRKEWLEDLVIAETMKLIQDDAVIDAIVAEVMELQDQENTTLPLLEKQMREVENGIENMLNAIQAGVLTNSTKSRLEKLEAQQKELEIRIAEEKIARPRLSENQVRFWLTRFRKLDPNVKSHRETLINTFVNAVYLYDEKVLITFNYKDGTKTITFDEIAAKDAPEGNGSDLGCFAPPKKFNV

SEQ ID NO: 24172 - protein, 504 aa, synthetic construct
MEDFIYARQSVDKEDSISIESQIELCLREVGNNPHRVFRDKGYSGKNTERPDFQDMMAAVRAGGARRIIVYRLDRISRSVLDFANVISELQKYGVEFVSITERFDTSTPIGKAMLMIAMVFAQLERETIQQRVMDAYRSRSRKGFYMGGRVPYGFELENTVMEGIKTCMYKPIPEQIQVVQLIFSLYAMPQVSFADVVRYLSQNGIKNPNGKNFSRMRIRDIITNPVYAKADASIYEFFHGQGTEIINDISQFIGTNGAYLYTGNKAAKRKSISLDGHVLVLAPHAGCIDADTWIRCRRKCLNVRQIAKPVKAKNTWLAGKIKCIDCGHALSLKSYPRKRSADARYYICNSKYVSASCDGVGAIQASGIEDIVFDEMSRKLKEFNKLSYKEKHGDPIELTKLKIRAEEIEKEIATLIDKIVSASTATMEYINERIDALDEEKKTVKEKIAQMSAEMYDRQNIGVISDYMSKWNDISIDDKLTVVDTLIASIHVGHGKVKIAWKI

SEQ ID NO: 24173 - protein, 513 aa, synthetic construct
MLYAIYLRKSRADLEAEAMGQGETLARHRAALLDYAAHHGLEIGAVYEEIISGESIDARPKMKQLLREVEQGRWAGVLCMDIDRLARGNSADQARVSNTFRISGTLIITPSKVYDQSRESDEEYVDFELFMARREYKAISRRIMRGRIASVKEGHFIGSTPPYGYDKVKVEKGRGFTLLPNSESDTVKQIYSMCISGMGCNAIARRLDIMGVTPRKGSSWSSASIQDILKNPVYCGKIRWQYRKEEKSLTDGIVTTRRRENPDCIIAQGLHPALISEEEFEKAQQFLNSRRIPHKKESTELRNPLSGLVYCGMCGSMMTRLGTGSRNHSDTLRCPNRNCGNVSAKLELVESALVEGVARWLNDCRVNVSRKPAADTAKAERTAAEKVRAELAKLDSQREKIYSFLEQGVYSAGEFRERMESLEKRRTQLSENLRQAEQAVSEAEGNRQLYARIIPRVERVMDIYAQSTPEEKNRLLKTIISRAEYIKTERNTRGNADRCNFTLNVTPLFPETD

SEQ ID NO: 24174 - protein, 513 aa, synthetic construct
MKKQPTGGKRLVAYYRYSGGSHQTEQSIEGQRRDCETYARIHGMVILHEYIDRHISGKTDDRPEFQQMIADAGKGMFDYVICWKTDRIARSRYDSIIYKKKLRDNGVELLYAAEANVEGSGGIIVEGLMEALAEYYSAELAEKVRRGMRESALKGKAIGSSRPLGLTVDKDKKYIIDPAGAAAVRYIFEQYAAGAASSSIVAHLNEQGLCTSRGNPFNKSSVVRIIQNEVYRGVYVSPKFDVRIEGAVPAIIDDDLWERAQKMFIRNRQSRSPRNDRADYILSGKLFCGECGTAMKGVSGHSSNGEVYFYYNCPCKDCHRRNIPKDELEGLVIRTVCNDVLQPDVMDRIADSVIEAQTAELNQPNPEKEALQHELADVQRKAKNLLSALENGTAGAMLTNRLAELEQQADTLSYQLSSLESEPKFPVFSKEEVLYLLEQFLIAPSEKTKAYRRRLIDTFVSKIEVSNTELTIYFNIAEEDCGKMKKAPQSNQPEGCSTEKQMVRVARIELTAS

SEQ ID NO: 24175 - protein, 499 aa, synthetic construct
MIAIYARQSLDKKDSISIETQIELCKKEIGDEPYKEYVDRGYSGKNTNRPQFKAMMQDVENGVISKIIVYKLDRLSRSTLDFGELMDALSKHSVEFSSTREKFDTSTPIGKAMLNIIMVFAQLERETIQVRVQDNFRMRSARGAYDAKAPYGYAKTKVMVQGKAVSTLKPDKAYSLMVKKIFEQYAYTSTSLGYLARTLNQQGIKSANGAAWDSCKLSKLLCNPIYVKADAEVYKYYRAKGMEITNDIDDFRGQYGCVTYGQWDRAKNKFAQLSGLTLSIGLHEGIIDAKTFLACQYKLADNTQINNTGRGKHSWLTGLLKCGCCGKAMKVMTYKETATFRCSGAMNTGLCSDSPSVGVREIEEAVEREIFAHVARHQELVVQKRKEEDNKAHNYKIAIAKLDDQIANLITALADGTELTMKYINGRISELQKQRDILTAELQQHKNATKQQDDIKQFHDIINLWPGMTIPQKHEIAMMLIKRVEIQEDTTRIYWKYDL

SEQ ID NO: 24176 - protein, 461 aa, synthetic construct
MEVYTDEGITGTSTKHREGFKRMVADALAGKIDLIVTKSVSRFARNTVDSLTTVRKLKEKGVEIYFEKENIWTLDSKGELLITIMSSLAQEESRSISENCTWGQRKRFADGKVTVPFARFLGYDRGPDGNLVLNEKEAVTVRRIYSLFLRGMTPYGIARQLTAEGVLSPGGKEKWNAGAVRSILTNEKYKGDALLQKSYTVDFLTKKKKVNEGEIPQYYVEGNHEAIIQPEVFEMVQRELEQRQQRRGRHSGVHLFSGRIKCGVCGGWYGSKTWHSTDKYRRVIWQCNHKFEGDEKCSSPHFCEEEIEQLFVAAVNKLISQKDAIIGQFDLALRTAFDTTALEAERDELQNEMLETSELMQNSIYENAHVALDQAEYQKRYDALTARFDKAKERLEMVDAAIKDKQSRQATIEAYLETLKAQNTLVERFEPSLWCALLDFVTVYSKEDVRFTFKDGTEIRA

SEQ ID NO: 24177 - protein, 586 aa, synthetic construct
MRTVNKIEVKAPQMPSRKKVAAYARVSMESERLQHSLSAQVSYYSALIQKHPDWEYAGVYADDGISGTKTAKRDEFNRLLEDCEAGKIDIVLTKSISRFARNTVDLLNTVRRLKELGISVRFEKEHIDSLTEDGELMLTLLASFAQEESRSISENVKWGTIKRFKEGIPNGQFTIFGYKWVDGRLTIIPEEAEIIRWMYAEYMKGASRIEIGRALMERGIYTRQGKPWVDSNVKVILTNITYTGNFLFQKEYVVDPISKKSKKNRGELPQYFVENTHEAIIPMEEWQAVQAEFKRRRDLGPFGNKALNTCCFTGKIKCPHCGCSYMHSVRNTRNEEYWVCGSKKKKRSDHPCPVKGVINHKVLKSVCAEVLGLPEFNEDIFLEKVDHIEVPLRATLDFYMKDGTSVRREVKSTGHQDCWTPERRTAKGRLIQERQIGPNSTCFTSRIRCELCGANYRRQSARPQCHRPYAIWRCASAGNCESTSIYEDTLKSLAAEAMGVPEFQENLFREQIAYIGIVDKGRLVFHFNDGHTSEASWVNKKRMPKQTPERKAHMSKTMKEIWRKRHGEISNNDSGDDQSIYGIADK

SEQ ID NO: 24178 - protein, 610 aa, synthetic construct
MNTAVNTNQFNYRFKLTDYSLFDRNRARRVAIYGRVSTEHEAQLSALDNQLQWYDDQVRYHPNWDVVAKYIDEGITGTQAKKRPDFLRMIEDAKQGKFDLIVTREVCRFARNVVDTLVVTRELKSIGVEVFFIEDNIWTMDGDGELRLSLMATLAQEESRKTSERVKAGQKISRDNGVLYGNGNILGYDRVGDTYVINEEQAETVRMIYDLYLQGYGSMKIAGILTERKRKTASGLVKWSVSNIMRAIRNATYTGTKCYNKSRSNNFLEQKRINNLDMSTYEYVEGDFPAIISQEIWDKAQEIRESRVKPSLVSATKTTHSKRDSADVWVNKLRCSCGSSFRKNKWHTKLDGKTSYGYQCYNQLNNGNKKKREELGLDTDGYCDTRMITDWKLDFMAKALLEHLWTERRKSVLIAIDLIKCYYKEEKEIGKQSDVVVVQARLDKANTRLTNLIAMRADGEITKDEYQVMRTPIDTEIQELQKVLENIPTDNDNLKGFDLDSIISTLNSLVDFSGSTISHDVINQFVYLVTPTSDTTFEWYVNLNGKPNVKATFTAEGRKKNCLIRLEEIERISSLHRKENESNAQLIKNPCLLTYLHRLLSQTSNPHRMY

SEQ ID NO: 24179 - protein, 527 aa, synthetic construct
MTYQRGGELMKRITKIKENESLAIGKKLRVAAYCRVSTDSDEQMVSLEAQKNHYESYIKANPEWEFAGLYLDEGISGTKKAKRTALLQMMKDCEQGRIDYIITKSISRFARNTTDCLEMVRKLIDLGIFIYFEKENLNTGSMESELMLSILSSLAESESVSISENSKWAIQKRFQNGTFSISYPPYGYKNVDGEMVVEPEQAEVVKFIFAETLAGKSSSAISSELQKRKVPTRKGGNWTPTTVRGILSNEKYVGDVLFQKTYTDSHFNRHTNYGERDQYMMQDHHEAIISREDFKAAGLLINQRAAEKGILKGTGKYQNRYPFSGRIICGECGAKFKRRMHSASKVRYAAWCCSQHIDDISKCSMMYIREDAIEQAFVTMMNKLVFGRKQVLKPLLDALRETSRTNGLGRINELESRLEKNLERRQVLMGLMTKGYLEPALFNQENNELLAEAAQMNTEKENLSYTINGELTRTEEVSSLLRFANKEEMLTAFDGDLFEEYVKQIVVCSRTEIAFHMKCGLILKEGV

SEQ ID NO: 24180 - protein, 668 aa, synthetic construct
MAYVRNKKKILKFWSKKKAALYVRVSTRYQVDKDSLPFQRKKLKEYCKFLGIEDFVIFEDDGYSAKNTDRPHFQEMMSRVRDGEFSHLIVWKVDRVSRNLLDFAAMYQELKDHKVTFISMNEQFDTSTAIGEAMLKIILIFAELERNMTSERVTGIMLDRAEQGLWNGARMPVGYRWNPEIKFPEPDPEETKIVQFIFDEYERVRSTTKIARYLNHNQIASKRGGQWTSKLIRDIIRNPFYIGTYRYNLRESGRGPLKPESEWIVRENNHPAIIAKEQFDRCNAIMDENGTSRDTSDLRARKYVHTFSGRLVCGKCGANMIASKDRARANGWRPSMYRCAQRSRMMDCDNSKTVNESYIGPFIFNYVANLARIQKNFKNIKTLEQLEKELLKGPEFENMKVSKESLRRTFDALAFQEVGKGAYLPDIDLSDGDDDYTAAEQLSILKRELDKCKTAIDRLTDLYLYDPDSMTKEEFAKKKRDLVNKIAGYEKQIEASQATGDKDDLADLEFIRKASAFLVAQRIVSKKHVDYIQMALDLDNEILKDFVDQVIDRIEILEGRVQSIRFVNGLVHEFTYSTPADLPVCQKCGGRIGSTCGCRTRTFDFAGKPYRRIKVGDPGDKFHGVTGAVCPECSAQAGRWHHWKCGIERCPICGEQLIACEHGPNGKD

SEQ ID NO: 24181 - protein, 501 aa, synthetic construct
MEIQIREGSREQKRKLKVCAYCRVSTDADEQENSLENQVRHYETVIKANPDYEYAGVYSDFAISGFKEKRPGLQKMLADAEKGKIDLILTKSVSRFARNTSIVLEATRKLKELNVGVFFELQNINTLSGEGELMLTILAAFAQAESENGSAGAKMVYQRKYEAGIPVQYLERSFGYTKDERGVFVADEAESVWVRKIYEMAADGYTPASIKRYLNENGVKTVGGVQWVDSTVFRLLENEIYKGDYIMHKHFVNEERKLVRNRGEVDAWYIEDDHEAIVSPELWQKAQDALAVKRDYLAEGSVIEEFTEENYPYMNKIYCAKCGYPLYKRIYSKGNRLNWGCSGTKRYGKSFCEGINIPDGVLRSAWHFEENTYIDEKASDKGVKEFTYLKERSWKRRHKKKQPSAIPENTETEYPYREKIFCALCGSRLVRYVNPQNHKVTWVCNRRKRKGKEACDGTRVPDTVIKGWGEIKNDIYIQRKDDKNGKKRYSYTSKKPSGIRV

SEQ ID NO: 24182 - protein, 545 aa, synthetic construct
MAVSRIFFSLCQGKKGERYPRKHLLLLAFRVIYRLPKRKEVRLVEIQIREGSREQKRKLKVCAYCRVSTDADEQENSLENQVRHYETVIKANPDYEYAGVYSDFAISGFKEKRPGLQKMLADAEKGKIDLILTKSVSRFARNTSIVLEATRKLKELNVGVFFELQNINTLSGEGELMLTILAAFAQAESESGSAGAKMVYQRKYEAGISVQYLERSFGYTKDERGIFIADEDEAVWVRKIYEMAADGYTPAAIKRYLNENGVKTVGGAEWIDSTVFRLIENEIYKGDYIMHKHFVNEERKLVRNRGEVDAWYIEDDHEAIVSPELWQKAQDALEAKRDYLAESSVIEEFTEENYPYMNKIFCARCGHPLYKRIYSNGNRLNWGCSGTKRYGKSFCEGINIPDGVLRGAWHFDENMYIGEKPTDKGKKEFTYLKEASWKRRHKKKEPEPIPENTETEYPYREKIFCGLCGSRLVRHVNTKSHKVIWVCNGRKRKGKDFCDGTRVPDTIIKGWGEIKKDIYIQRKDDKNGKKRYSYTSKKPKGADRA

SEQ ID NO: 24183 - protein, 579 aa, synthetic construct
MPNLPYSNEFAKLIIAIYCRVSSEDQAERGTIEIQKEFAAKYVNLYNLEVFDYYCDDGVSGTLPLEQRPEGKRLLEDAAKKRFNMVIFYKLDRLGRKVRVILNAVNDLDALGVTVKSMTEPFENETPTGKFLLTTLAGIAELDRDTILSRMWSGAQYAAKQGRWLGGVIPYGYMVADKKLVISTDPIPNCRLSEEDVIKIIFRMAAKEKANCAEIADYLNSIKIPTRYMLNGISGKRYKKTAEIWRPSRISEIIRSTTYKGLHQYGKNATHKNSKIITRSVPAIVSDEIWQEANNTMKDNRVSCKRNTKNLYLLQGMIRCGLCGLAYSPTFYKARNTSYYCCTCKGQQKTKFYNRDTCIGKPVRVDWLDNLVWSKCLELLKEPEKIYDAKPSTNKEPPNIVPTPTEFELIKSRIQELSTEREKLLDLYRKGIIIESDLTTQINKLYLEETELNNKIIKIDNQPKQELKRSKASTVMVLKEFIEMIKNTDINQLPFELKREVVKMLIDKVFVYTKVDPDKFYPSINVIISWRFDAAPFNIDYIENYTLITFLLQRKKLKTQLQPTLLITLTPVLNCNTRR

SEQ ID NO: 24184 - protein, 572 aa, synthetic construct
MASRIAEKLAAKKAAIYIRVSTHWQVDKDSLKVQRRELIAYVTLVLGITDYVVFEDPGYSAKNTDRPEYQAMMDRIRTGEFTHLVVWKIDRISRNLIDFAAMHDELQSLGVTFVSKNEQFDTSSAIGEAMMRIILIFAELERKTTAERVTAVMLSRASDGQWNGGRVPFGYSWSKEAKTFSIVPEEAKAIRRMAELYEQYQSLLYVAKYLNDAGIVTKTGGQWTPTTVRTILTNPWYIGQYVYNVHSDGKGIEKRDSDEWITVENHHEPILNEDVFCRMKFLLTRNKRGGVPSHKTYVRKNIHVFAGLLRCGQCGSNMTANLDRRRANGFRPSQYACGSRRRKGTSCTNKYISDTTLGPFVLNYVANIIRASKNSSEATTPEVLERKLLRGEAFEDVASVSTDALGQLLDAFRSAGDAVEYRPQIAFSGDDNSIREIDTLRARRRKLDNALARLNALYLYDDEAMPEKDFVMQRGQITKQLEEVNARIEELQNQESSEELGDGFIGKASYYIMANKLIEDRYIDYEKYIRAIDPSIPHSFLQQIIDHIVVNDGRVTSITFKNGSTHTFTYKA

SEQ ID NO: 24185 - protein, 453 aa, synthetic construct
MECVAYMRVSTEKQAVEGNGLDSQKRDIENYCRKNELVITDWYIDDGYTGTNMDRPELQRLVNDCSRKRVSCVVAFKLDRLSRNMIDGIYLIEKVFQKYNVVFKCVHDSVNYDSPMEQAYTQMMAVFAQLDKNTMMLRMRGGMLERIKQGYWMGGGNLPYCYSYSKEQGILIPIPERAEQARRGLELFISGYSDAKIKEICGFKSELVTRSILTGVVNIGMIPYKGKIYQGKHEPIFDKDRFNLGLELRKSRCSAKTYCITEPNLLTGLCYCGICGCKMRYQKWGSEKHKIYCCSRNKSLSYLPNYNASCNNSLEWADEIEKQVEEEILKISLDLSSYKPKEKATKLEIMQSQLEKEQIKLKRLYNLYADGNDTVLEMIKELEAQIKEMKANIAVESKNAINTQKKEFVYENIKKLADIWDKVDKKQKNLILKTIIDKIVIVNGNIEIQLKNF

SEQ ID NO: 24186 - protein, 571 aa, synthetic construct
MMQDRTAPASTNRVAIYIRVSTTHQIDKDSLPMQRQDLIAYAKLMLNTDDYVIFEDAGYSGKNTDRPKFQEMMSQIRQGAFSHLLVWKIDRISRNLLDFATMYKELKDLGVVFVSKNEQFDTSTAMGEAMLKIILVFAELERNMTSERVTATMISRASNGQWNGGRVPYGYNYDYETKDFSINPIEAEIVRLIHDKYEEMRSLVRESRYLNEKGLRTRAGNLWNPVSLHIILHNIFYCGDYRYNVLKEGDRQKVKDESEWITVEDHHEPIISREQKERVVAMLDANKRLDRKRNTYKSEKYVHVFAGLLYCGNCGKPMGATPAAAKKDWQYSKYTCPTRRKLASACNGKFTSDPIVGEFVFNYVLNMLNVQKNFADIHSPEELQAALLIGNTFSYIDHIDEDGLNDLFNMLSSGKIKGTVFGKSAKLKKKKVVSELSKLRNEKQKIERALDRLTKLYLYAEDAMPESEFIIQKSKLTEALDEVNEQIGFSNTDEWNQSVSDEEFVRRASEFIIAQKLTDRNYVSYKRLATSVDTAVIKTFVQGIIDSIIMDAGQVKQIIFKNGLSHTFIFK

SEQ ID NO: 24187 - protein, 605 aa, synthetic construct
MRIINKIEPKIPQMPSRKKVAAYARVSMESERLQHSLSAQVSYYSGLIQKNPAWEYAGVYADDGITGTKTNDRTEFNRMLADCEAGKIDIILTKSISRFARNTVDLLNTVRHLKELGISVQFEKERIDSLSEDGELMLTLLASFAQEEIRSLSDNVKWGTIQRFKQGIPNGKFNIYGYKWVGDKLAVIPEEAKIVRFMYREYMKGASRIEIGRMLMEQGIYTRQGYQWVDSNVKVILTNITYTGNMLFQKEYCLDPITKQRKKNRGELPQYFVENTHEAIIPMDEWQAVQEEFQRRRDLGPFGNKSLHLTAFSTKITCGCCGKHYRRSGKRNTAGEVYYIWICQTKSQKGIKACDSKSIPEKMLQKVAADVLGTAEFDEDIFSKLIKEIMVIGTDTLIFRFYDGHEQTTTWVSTAKADWWTPERRRLWGERHKRKDTNPNKNTYYEFTGFIKCGQCGANYRCQANVRKDGTRTRSWYCTGPRSECSNKGIRDETMKALVTEALDLDAFDESVMDAQIEYATVINNTVTFHFRDGHTVTRPYLDKRHGVKWTAERRERQVQSIRASWTEERRKRHGEIIREIRRKKRGESNDDTGNDNPVHSSTDQ

SEQ ID NO: 24188 - protein, 523 aa, synthetic construct
MAKVTTIPATITRFTAAPISEKKKRRTAAYARVSTDSEEQLTSYTAQVDYYTNYIRGRDDWEFVEVYTDEGITGTNTKHREGFKRMVADALAGKIDLIVTKSVSRFARNTVDSLTTVRQLKEKGVEIYFEKENIWTLDSKGELLITIMSSLAQEESRSISENCTWGQRKRFADGKVTVPFKRFLGYDRGPDGNLVLNKDEAVIIRRIYSMFLQGMTPHGIASRLTSDGIKSPGGKDKWNAGAVRSILTNEKYKGDALLQKSYTVDFLTKKKKVNEGEIPQYYVEGNHEAIIQPEIFELVQQELERRKNSRGRHSGVHLFSGKIKCGQCGEWYGSKVWHSNSKYRRVIWQCNHKYDGEEKCSTPHLTEDEIKTMFVSAVNKLISNKDAVLAPLRASLDIAFDTSALEAETEELQSEIMVTSDLIQKCICENAHVALDQTEYQKRYDGLTARFDSAKAQLEEIDSAIADKKSRRATIEAFMDTLAQADLMEKFDPALWCGLVDFVTVYSKDDVRFTFRNGMEIRA

SEQ ID NO: 24189 - protein, 455 aa, synthetic construct
MKTVACYCRVSTEEQVKYGFSIQAQKDALTKYCKENDYKYDFYIDEGISASSMKKRKALQEMLEKSVAYDMILFTKLDRLSRNVLDANNINKILQDNNCTMKAIDEDDVDTSTADGMFMFNLKVSLAQREIGKTSERIKFVFKNKREKGEVTSGTTKYGYKIKDKKFVVDPEEAENIRNLYKYFISVNGDHKKTYSYFVKHFPGKGQDALFNYLRETAYIGKYKLYRKNVYLDNYIPPIMDKELFDEVQNLLPRVEKVFKKENIPSIFAGMLYCYYCKSRLVRKVDYRSKNKIINYFCDKQYKYKVGINEKQCQNSKVISDKSVEEYLINNLKELCKQYISKSTIKTKPKPQKNNIKINSLKNKLSKLKDLYLDDLINKEEYKQDYIRINKEILELEEAQKEEPQKDFTYLNELINKDIPDIYNTFNIDEKRKFWLKIIDKIYIKEGKIKEVTFL

SEQ ID NO: 24190 - protein, 581 aa, synthetic construct
MPEKIINCAIYTRKSTEEGLEQDFNSLDNQYEFCTNYLKSLNDPALQLLPARYDDGGYSGGSLNRPALQRLLADIQCGLVNRVIIYKIDRLTREIRDFFKLLDIFEKYNVEFVSVKENQYYNTTTAIGRLMVNMFLVFAQFERENAGDRIRDKIATSKAKGMWMGGCPPYGYDIGDRCLVINETEAQNVRFIYQTFCNTHSLADTTDALNSGGIRTKRYTTRQGRTFGGRKFSVKTVQRILQNPLYKGMVAHRGKQYPGQHAAIIDAVQFDMVQAVFAAHKEKRETRRPKMPSSGGERETAALTGLIFCGCCGSAMTPSYCCKGDIRYHYYRCYRRASKLEDKCPINQIRTSEIDRVVMEQVLAILKSRDFFVQYISHHHEFDVSTAFALFNSLDDVWNSLFETEKRRILRELLAKVTIYKDKIVLDVKKAGLAGVFAELSQNNRLAEVEYKENETFQISVAYRATRLANGAKIIVPATAKEESRFNGSLRLARQIAKGFAWRKMIESGLSLQELTASAKTNERDIRFAMRLSMIDPAIVESVLSGKSPEFLTYAFMKKHPIPLLWSDQRKLYGFEERKQQ

SEQ ID NO: 24191 - protein, 543 aa, synthetic construct
MEVTKVPKKIVTVIEPKRSMTVDKEKYRQKRVAAYCRVSTDSEEQLVSYTNQKKVYTEMIASRKDWCFAGLFADEGKSGTRADKRPEFNKMINDCLAGKIDYIITKSVSRFARNTVDCLDYVRMLKSKGIGVYFEEQQIDTLKTDSELYLVIYAGFAQSESESISKNITWSVRKKFEEGTPVFMYKRFLGYKKGTDGEPEIVPSEAAIVERIFNLYLAGETVDNISKMMQAENYDIPGKTISFSKGMIMNMLSNERYCGDVILQKSVTVDCIEKKRKKNTGEAPMYYVQNNHPAIIDRVTFNKVQEELARRKTKTPGSAKSSITSTGKYSRYALTDVLICGNCGTRYRRVTWSRNGVKRIVWRCISRLDYGKKYCSDSPTIMEDKLQEAIVRAVNKFNEQDNATYKALMRATISEALGLNGDPEEVDMLERKIEALNNKMLALVNESVSSGDGIEAHESEFMTLSQEAELLKQRIAAIQESTAKDNGEQNRLEQIQAIIAERESKCMEYDDSIVRQMVECIKVYPGGKLEIIFGGGYLVEESV

SEQ ID NO: 24192 - protein, 513 aa, synthetic construct
MSEVRLITPITRQSTKKMQVAAYCRVSSNTADQLNSYAAQIRAYKKLIGERDDWELVDIFADEGLTGMKSETRDEFQRMIRMCELKQIDLIITKSISRFARNTKDALAYVRKLKLLGVGVQFEKEGISTLSMGDEMLLNTFSALAQEESQSISMNQRLSIVKRMELGEYVDSNAPYGYRLVDKMLAVYEPEAVIVRNIFTLYLQGFSTSEIARELNKLNIPTKSGKETWRPSRVAYILRNEKYIGDSFYQKTYRETTVPFNQHTNRGQEDRFYAKGTHPGIVDKNVFDTVQTLIEKRKENFSKVTTQNIYPLTSRIQCSECGSFYRRRIVSGTVKWVCSLHKDDSTACSSNYYSEERIYDGFISMVNKLRFSEDNILGQVISRLEMTLAAMKRNNTAARDLSKSIAELNAKLLMLEQLRSKGYLAPEVYQAQANEINAELAKLKDVRQEKFNSKAATMLEKVRKLKMLIFELEEPLEAFDEKLFLEIVKSIQINKEDEMSVELLGGLRFRERI

SEQ ID NO: 24193 - protein, 542 aa, synthetic construct
MNNCVIYARFSSYGQNEQSIEAQTRICKEFAENKGLNVIKLYSDKARTGTNDDRPGFQKMIHDAASKSFQYIIVYMFDRFARNRRDSIMYKETLREKYGIKVISALEPIADDEGGEFYEMFLEWNAEKYSKRLSKRVKDGLDTSCANGTFCGGHLLYGYSLVNEPVPNRPNKFIKKVVINEEEASLVRYVFEQYDKGVTKKELAEEFNRKGYLYRGKPFTQKPMEHWLKNQKYTGEFMFGERFCDNMYPPIISKELYERVQKRLEKNQYRLGGQSKANVPYLLSGKAYCGHCGELMCADGGKSKTGHCYLYYTCKNRKKHTCNKKREEKECLEYFITSLIIQFISNDKNAEIIVNDCIKYADTKTSQKNIKSITTKISNTKKKIADLTNAFVLAQNDLIRSNIEMQVDEYGKMLDDLELQKNKLELERGCIPTKEDLLAFIKVIINGDSYNKEFQRTLIDNLVYKVIVTDGAVMIILNLNKNIILEDYSKDQIIKFGNGLKDIKAFGIEPPSSRQEKLRLNSGLDATFFYIKFCRYTNMFYD

SEQ ID NO: 24194 - protein, 498 aa, synthetic construct
MQIEVRKAEMGKEKKRLKVCAYARVSTEASEQENSLENQVSHYTEMIQANPAYEFAGVYADFGISGFKESRPQFLKMMQDAKNGKIDLIITKSVSRFARNTAIVLKASRELKERNVGIFFELQNINTLTEAGELLLTILAAFAQAESESASESSKMAYLHRIENGEVVAYLERSYGYEKDENGEYRAKEPEASVIREIYDLVIQGVNCTNIARVLNARNIQTVQGAEWTASTVFRIVENEIYKGDVLMQKTFIDGKRHQVQNRGEKAMYYAKDNHPPIVSEKIWEKAQRKLEDMRAERAEHSVIQEFTEENYPYMNHIFCAKCGWPLKPRVYSHGHRLSWDCSGQKRGTKKFCTGIHVLDNDLRKMKIEGNRYFSETVDKYGEVHLKHVGERTWKNKHKKKKFNHKDLYPELNEENYPYYRRLYCARCGSRLGRYISHGTVRWICSSYKRKGQAKCPGVRIPDEIIKGWNLPDGKIYIMGKEDKNGEKHYSYTSESAL

SEQ ID NO: 24195 - protein, 465 aa, synthetic construct
MARSITVIPASQPYRVGGRTQQKTRKLRVAAYCRVSTDQEEQLNSFENQVEYYTKYIQDNPLYQMAGIYADEGISGTNTKKREEFKRMIRDCEEGKIDLVITKSISRFARNTQDCLEYSRRLKNLGIGIFFEKEHINTLDASGELLFTILSSLAQDESRNISENCKWGIRSKFKKGIPQVDCTKFLGYDKGEDGKLIVNQEQAKIVKRIYREFLDGYNPAAIAKMLMEDHIKTGTGREKWRSASVRAILKNEKYMGDALLQKTYTADFLTKKVKKNHGEVEQFYVKESHEAIIPKEQWEAAQLELERRDSYMQELGLTFYGYGSEVNPFSCRVVCGKCGAVCGKKSWKSRGVEFWQCNNRSKNHGVKGCASENLPYENLLKGFITAWNQIVAEREQYLPKWEKKKKEGNPLEKLRAEQMIELTLQPPLTKMLPELGQMVLERVIVQGKEIMVIRFLDGTEIKVRI

SEQ ID NO: 24196 - protein, 468 aa, synthetic construct
MDKKINNNMNDFTKKVEEVALYIRVSTEEQAINGDSLRTQREALTKFALANHYHIYGIYEDDGFSATNLNRPALQRLLEDVRKNKINRILLTKLDRLSRGVRNYYKVLDVLDAHCVFWQTIFEKYDSSTASGRLHINIMLSVAENESAQTSERIRSVFNNKIHQKEIISGKIPIGYKKEEKKLVVDDDKKALVIDAFNFYLKSGSVYKTFEYLALFDPSMNYPRTARLLANPLYIGTKVCKYGSIENYCEPIISKETFDEVQNLLKKNQRKRDNSDHEFLFSGLLRCNECGYKMSGKYCKNFPTNCTFYYLCSNARLKKKCNMLKQLNETKIEKKLLEQIVPEINKYIDNNNILEQEKVQIRDISKERDKVNKQLEKLRDLYVNDLIQIDHYEKQYKELTSKLDSLKEEEKPVEEKKTVNYDEFKSFLSRDFVSLYNNLSRTEKRLIWASAIDTIYIDDNYNLRIVFI

SEQ ID NO: 24197 - protein, 469 aa, synthetic construct
MARTIVHIPAQPRATTVSATENTRLRTAAYCRVSTEQEEQLNSYEAQVDYYTHYIKTNPKYIFVGIYADRGITGTNTRHRDDFNRMIEDCEAGKIDFIIAKSVSRFARNTEDCLFYTRKLKDLGIGIYFEKENINTLDGGGELLLTILSSLAQEESRNISENCKWGIRKKFRDGKLHLNANRFLGYDKDEKGKLVINKEQAAIVRRVFYEYIWEGLNPDAIARKLQAEGVPGCMGQPRWAVSTIQAMLQNEKYMGDALLQKTYTPDFLNKRAIKNKGEVEQVRVKGDHEPIIEPEIWDAVQLELQRRHRYTEEHNIRFRGRNSDVQPFSCKVICGVCGTPFWRRTWYRNHRPIKVWQCGKRYQEKGVVTCSSENLKEETLYNAFVVAWNAIVNNRQGLLPEWEETMQKGNALERLRAQQMIELTAGTRLTAIDLSLVGKCLDYVVVNNGGILAFHFLDGSQICVETEAE

SEQ ID NO: 24198 - protein, 407 aa, synthetic construct
MRIKIIKAKPPEERKLRTAAYVRVSTDSEDQEGSLENQTRYYSDFLSHNPAYEFVGVYSDRGVTGYKEKRPGFQQMMHDTMAGSIDLIYVKSISRFARNTEVLLKTVRALKSRGVGVFFEVQNINSLSADGELMLTVLAAFAQGESDNYAELTRLHYKRQFCQGTPSRRTAATFGYCEGNYGELKVNEPQARVVRQIFSLALEGATLSGIANWLNNHKIPAIQGGQWNPTGIRRILRNVTYQGDLMLQKSYLDTKRQRHPNKGQVESWYVQDNHQAIVSREDWQRVQELLDNYTPPVARPVAYARKDEAGQYLLAGMLYCPWCGAVLHHKWCNKKTTEYWACSTTLKKSKNSCPGIYVPAQEAEKWTISEPTTVLQSKDDFGNQHFTPVPKRNYERRVGCPYIKKEA

SEQ ID NO: 24199 - protein, 523 aa, synthetic construct
MAEKTITMIPARKRVGSRKQVTEEKPKLRVAAYCRVSTDRDEQETSYEAQVEHYTEFINRNPEWQLAGIYADDGISGTNTKKREEFNRMIEDCMASKIDMVITKSISRFARNTLDCLKYIRKLKEKNISVYFEKENINTMDAKGEVLLTIMASLAQQESQSLSQNVKLGLQFRYQAGKVQVNHNRFLGYTKDDEGNLVIVPEEAEIVLRIYREYLEGASLFQIGQGLEADGIKTAAGSDYWLQSTLKKILTNEKYIGDALLQKTYTVDFLNKKRVANNGIVPQYYVENSHPAIIPREKFMKVREEMYRRAHMECGPDQKRRIYSSRYALSSIVYCAHCNDIFRRINWNNRGCKSTVWRCLSRVEQNRPSCAARTVKEELLHEVVVRAVNEVITGSASLIPALQASFERCLGDSNSAAVEEIDARLLGLQQELLKMANAKQNYDTLADEIDELRAEKEELLLQEANKDGIRQRMADMVAFLQSEPEEVTEYSESLVRRMIEKITVYDDHFVVEFKSGIEITINK

SEQ ID NO: 24200 - protein, 521 aa, synthetic construct
MKRITKIEGNTVFLNAVRKTRVAAYCRVSTGSDEQLLSLETQKDHYERYIKAHPDWEYAGLYYDLGITGTKKDKRPALMQMVADCEDGRIDRVITKSISRFCRNTTDCLELVRKLLGLGIPIYFEKEDLDTGSMESELMLSILSSLAESESVSIAENSKWSIRRRFENGTFKLAYPPYGYDYIGDGEWAINEEQAKWVRFIYSETLSGKGSDAIVAELIELGAPTKKGGKWTSTTVRGILSNEKYTGDCIFQKTYTDERFNRHTNYGEMDQFYMEGHHDAIVSHEDFEAVAALVEQRAKEKGITKGDAKYQARYPMSGKVFCGECGSPHKRRMNYSTHIQYPALTCSGHLKDKNSCSQKFIREDALQMAFVTMMNKLIFAHKEVLQPLLTSLRSISQKDAISRLSELDERLEKNAERQNTLATLMTRGYLAPALFTQESNDLLTEAQALTEEKEHLVFSVNGEMKKTEKLADLIRFCSWGEMLTEFDGDCFSQYVERVVIHERTTAAFELKCGLTLKERIR

SEQ ID NO: 24201 - protein, 525 aa, synthetic construct
MAKRVTTIQPTLTRLTAVPITEQRRRKVAAYARVSTDHEEQQSSYEAQLDYYTNFIRNHDGWEFVNVYADEGITGTSTKHREGFKQMVADALAGKIDLIVTKSVSRFARNTVDSLTTIRQLKENGTECYFEKENIWTFDSKGELLITIMSSLAQEESRSISENCTWGQRKRMADGKVSVPFSRFLGYDRGENGELVVNPEQAEIVKRIYTEFLQGATPHTIAAGLKADGIRSPGGKDRWNPKTVQSILQNEKYKGDALLQKCFTEDFLTKKQVKNQGQVPQYYVTGDHEAIIPEDVFDMVQREISMRKPGPNRHSGVRVFSSTIYCGECGGMYGSKVWHSNDKYRRVVWRCNRKYDGDQPCGTPHFDEETLKQLFLSALNKLVGKRNEIRDSFDAIRSTVFDTDALEAELAQVEAEMSIAAEQVARSIRENAMVALDQSAYRARHDALCDRYESLKARCAELKETISDKQTRLAAIDDFLRTLMKQEALPTAFDPITYHILVERMTVYGKDKVIVHFRNGMEIEA

SEQ ID NO: 24202 - protein, 587 aa, synthetic construct
MAKSITRIDVKKPDLLQRKRVAAYARVSMDTERLMHSLSVQVSYYSELIQNTPGWEYAGVYADEGISGTKMDSRPEFIRMLADCEAGKIDIILTKSLSRFARNTVDTLNVVRRLKELGIEVRFEKERINSLADEGELLITIMASFAQEEVRSLSENVKWGLRKRFEQGIPNGRFHVYGYRWEGDHLVIQPDEAAIVRRIFQNFLQGKSRLETEREFAAEGITTAKGCRWVDSNIKVVLTNVTYTGNLLLQKEYITDPITKKRKKNRGELTQYYVEGTHEAIIDKETFDYVQQEMARRKALGPRANKSLNLTCFSGKIRCPHCGINYGHLRPRRGSLISYWVCGSKRKKKVGDGCPVKGAMSEVAIRKCCAEALGLDEFDETVFTERVDHLEVPEKDRLTFFMKDGRTFTRDCRNAGHQDCWTPEYRAAVSAYRREHGTNPRGKSCFTSKIKCACGSNYQTSYQKLKDGAIRYWRCPEKCCEKGMREDRLRAVCAEVLDTDGFDEAAFTAQVEYISVLADGVLEFHLANGRAVQHSIDLRRSGTKWSEEQRRRFDESIKGLYTPERRQAMSEHMKQLRKERGENWRKE

SEQ ID NO: 24203 - protein, 525 aa, synthetic construct
MYLEISNPKDYHAALYIRLSKEDENEGPSGSVTNQQSLLHAFVREHRLDVYDTYIDDGWSGTSFDRPGFQRMLRDIEAGRVNMVITKDLSRLGRDYIMTGHYMERYFPEKRVRYISLLDGVDTGIESSANDITPFRAIMNDMYAKDISKKIKSVKHDKQRKGEFIGGKPMYGYRMHPSEKNRIVIDEDAAPVVRRIFAMALAGTSCRQIAVRLNEEGVLSPAAYAGLTLSCHGPYSGQWSSERITAMLKNETYIGNMVQGRTARISYKTKKCLRRQPEQWVVVEHTHEPLIDPETFRKVQLMVNSRRNTRSRTYDFLLKGLIFCHECGYPLAVMNRRNAAGEDRLFFVCRTYQRFTKAGVCSCHSIKEQTVTEAVIERTREVCEAYLNPERLRPIAAAAVAASGRVDGREEELSALHARIDSMTAHLDRMYMDRLNGLLADVDFERLYRRIKAERTALEEKLRELEAQKKTPVPIEDRARELVQQFLHCAFTSRELLVSLIERIELTESKEIIIRFRFRELEAIS

SEQ ID NO: 24204 - protein, 521 aa, synthetic construct
MARITKIEATKDFIGKKKTRVAAYARVSTRSDEQLLSLETQKEHYDNFISANSEWEYAGLYYDEGVSGTKVEKRDGLLALLKDCEDGKIDRVITKSISRFSRNTAECLEMVRSLARLNIYLYFEKENIDTEHMSSELMLSILSSIAESESRSISQNSKWSIKHRFEEGTFIISYPPYGYDNQDGKMVIVPEEAAVVRDIFDMTINGMGTYVIAKALNDRGLQSKKGAKWHPSTVRGILQNEKYTGDVIFQKTYTDDNFNRHNNYGEKNMYLCKNHHEPIISHEIFNKAAAVIEQRAKEKSIEAGIGKYQRLYAFSGKIICGECGATFKRRQHYKPSGDYVAWCCNTHITDKDACSMMYILDEDIKTAFLRMIRKQQTAHTQVLKPFVAGLKGTNNKERLHQVLALEEQIEKNAEQITVLTNLMSSGYIEPEIFHAEKNQLTLEADRLTREKQLISKSINGDLAHLDEAQKLLQFVSKKAEITEFEDEMFLEYVDTMTVHTRDEITFNLKCGLNLTERLVGA

SEQ ID NO: 24205 - protein, 535 aa, synthetic construct
MNDNVTLIPARRRAGNRISKEENKPKLKVAAYCRVSTDSDEQAGSYEVQVQHYTEYIGRNKDWELAGIYADDGISGTNTKKREGFNEMIDDCMAGKVDMIITKSISRFARNTIDCLKYVRQLKEKNIVIIFEKENINTLEASGELLLTIMASLAQQESASLSQNVKLGLQFRYQEGKVQVNHEHFLGYTKDEEGNLIIDEEEAKTIRRIYREYLEGASFRDIADGLERDKIKTGGKRYKWHLSTIRGILRNEKYMGDALLQKTITTDFIEKIRIKNDGTVPQYYVKDSQEPIIARDIFTQVQEEMVRRANLTSGMDGKKKRVYSSKYALSSICTCTKCGDIYRRIAWNNRGKKSTVWRCCTRVENGPSACDAPTVQESELQEATLKAINQLLSCSDSMMQVLRNNIEIALADDNSGEMERLNVILKEKQKELVKLAHAKKDYTSLADEIDILRDKKQELLVQRAEMEGVKKRVAELTDFFQGTVQELTEYDEGMVRKYIEQIKVYEDKFTVCFKAKVEIEIECENNRKIMAVNRD

SEQ ID NO: 24206 - protein, 591 aa, synthetic construct
MIENGMVMPTNVNFNRARQRKVVFYGRVSTEHEAQLSALENQMQWYDDVANRNPNWYVIKKYIDEGITGTQAKKRPAFLKMLQDAKQKKFDLIVTREVCRFARNTVDTLVVTRELKEYGIEVYFVEDNIWTMDGDGELRLTIMATLAQEESRKISERVRAGQKISRDKGVLYGSGNILGYDRDKAKGTYVINEEQAETVRTIYDMYSSGKGISQIRDEMIRRKRKDSSGLVRWENSKISRILHNSTYKGYPAYLKSRRNNFLDQKIIINRDEDTYLYVKGDFEPIIPEEQWDRCKQIREQRTRYSKFRTENGEVLHKTGIHESGDVWTKKLKCRCGYKMRKNKWRKNKNGEVIYGYKCYNQLNNGSKDIRLEAGIDDSKTCNLREICDWKLEMMARHIFAGLWGSKKDILNNVSSLYQIGVFEEYQKAAEIKATVDKEIAKSDEKLKRLMRLRLEDEIPKDSYLELKKEIEQEKIELLGKRRILDAGMVPNEDGEEEPAKKVEDFLLSKMDFTEHYIDREVINHFVHTIVPVTETCFNWYMNFDLIDKPNDMKKLVWEFTIDYKGARSYRKEKDGMLRPNQWQDLTVRVFI

SEQ ID NO: 24207 - protein, 538 aa, synthetic construct
MLRQATQNLITALYPRLSHEDELQGESNSISNQKRILETYAKQNGFTNLRWYTDDGFSGANFQRPGFQAMLADIEAGKVGTVIVKDMSRLGRNYLQVGFYTEMLFPQKGVRFIAVNDNVDSASEGMDNDFTPLRNLFNEWLVRDTSKKIKAVKKSKGMSGKPVTSKPVYGYVMDEDENFIIDEEAAPVVQQIYQLCLAGNGPTKIARMLTEQQIPTPGTLEYRRTGSTRRYHPGYECKWATNTVVHILENREYTGCLVNFKTEKPSYKTKHSVENPIEKQAIFPNHHEPIIDTETWERVQELRKQRKRPNRYDEVGLFSGMLFCADCGHVMYQQRYQNKNRKQDCYICGSYKKRTRDCTAHFIRTDLLTAGVLSNLRQVTEYAAKHESRFVKLLIQQNEIGGKRKTAAATKQLEQAQERIAEVSRIIKRLYEDNVNGKISDERFMELSADYEQEQRELKDRAAALQAELDKSQAATVNAEKFMGIVRKHLAFEELTPTLLREMIEKIVVHECSYDENGTRRQDIEIYYSFVGKIDLPE

SEQ ID NO: 24208 - protein, 548 aa, synthetic construct
MKYAACYCRVSTDEQARFGFSIQAQKDALEKYCKENGYKYEFYIDEGISASSMKKRKALNEMLSKSSTFDMVLFTKLDRLSRNVLDANNINKLLIDNNCTMKAIDEDDIDTSTADGTFIFNLKVSLAQREIGKTSERINFVFKNKREKGEITSGTKKYGYDIVDKHFVVNEKEAENIRNLYQKFIDTNGSPLKTYEYFVTCFPFKGYDAMSNYLRETAYIGKYKLYRKSIYLENYIPRIMDDELFYRVQNLLKRKQKILTKNDKPSLFVGLVFCSVCGNRMYKKQDNRVTSQLIRYCCDNFRKFKIGSTERKCYNSNSIREDTIEDYLLKNLKMKLDEYKVTTKIIKEKAVKSNPKKEENIKNKMYKLKDLYLDDLIDKETYKSEYQKLQAQLQEVQKQTTIVNEKKDFSKVEKILNSDYIKNAGVEDTYIGVAEPIGYGKVASSTVSIFNNILSTRADIAYSVRESLLEAKGNYWSRFINSINPFYWLKIILYIPKSIFSYLGLNTDSILIKVFQLIYWLIGIICTLIITVFPEETKNFIMSFIHFS

SEQ ID NO: 24209 - protein, 593 aa, synthetic construct
MTNPTVQVRKATKQTVSRRKGVHLNTLRVAAYARVSTDSEEQLESYQSQVKYYTELISNNPEWQFVGVYADEAITGTQTTKREDFNRMINDCMNGDIDLIIVKSISRFARNTVDTLQYVRALKEKSVAVMFEEENINTLTMDGELLLTILSSVAQQEVQNISEHVKLGLSMKMQRGEMVGFNGCLGYDYHKEDKTITVNEKEAEAVRYIFNRYVEGVGGKVIARELKNLGYKNKRGESSFSEHGVIGIIKNEKYKGDLLMGKTFTVDPITKRRLDNMGEADQYYTENHHEAIISRELWDKANEILNKRKGSHSRSNGKRDKYSRQYSFSCLLKCGFCGGNLTRRTWNSRTDYKKTIWQCVTATKHGKKECPYCKGVPEALIEEAFIRAYNALCTYDGEFIDGFLEHVRAGLQNNDTDRELKNLNKKITRLKERKSSLVDMRLDDKIDEEIYQIKVTEINEQMDGLLLQKQSLKDKLQDQQDINKRLTEFQNVISKHEILQKFDRHVFESIVDRVIVGEKAENGEINPYKLKFIFKTGYEKDEVASSQPFSFANSCSNGNNDCGIISLQGDNDTCRNVRFIVQTKIYKAHRCRS

SEQ ID NO: 24210 - protein, 577 aa, synthetic construct
MAYRFSQQTAAPDTRTVALYVRVSTGYQVDKDSLPFQKQELRNYCRHVLHIEENRLEVFEDAGKSGKNTKRPAFERMMTKVKAGLVSHVIVYKIDRISRNLVDFSLMYDDFKYNRVTFISLNEQFDTSSAIGEAVLKIILIFAELERKLTSERVTDIMINRALSGQWNGARMPFGWDWNEEKKMPVHSDKEAPTVRLMYDMYEETRSSCRVRDYFNSHDIATKRGGEWTTKTIADLIRNPMNKGDYRYNYRESAKGRRKPDEEVVYVKNVFPPLVPPDQWDRCNQIMDRNAKLRCSSGFSHKSTHVHIFAGLLKCGKCGSYFQVEKMDRVRRNGFAPSLYRCGRRYRKQSCISKSCSEVVIGPFVLNYISAMIRASDMRSQIRSPEELEKILLSDTVFQNVAGIVSDGLNATYAMLSGTDSSAPYRPLPLTSHNVQTDDNIQKWEQGIVRIDRAIERLKKVYLFDDAAMSEKEYLETKSELERERIELDNKIKEQESTAFPVQTEDLAFIKSASSFLLAHRLKAGDHIQYNTFAPLVDDEVLKDFVNLVIKEIVVVDARITEIIFQNGLTHKFLYRE

SEQ ID NO: 24211 - protein, 524 aa, synthetic construct
MRFFNYGRKSVYSDKSDSIDNQFRMSREYCEQKFPGKIESWQEFSDEDFTGANTSRPDLQRMLSYIEEGFCDVLVVYQLDRLSRNVRDFSNIYAMLEEHNVMFISIKENIDTTTPIGRAMMYVTVVFAQMERETTATRVADNMRGLAKKGYWMGGQAPLGYSIKHIVIGDKKHSALELDPDGVRYVTQIFDDFLSSHGSLNAMVTRFRHQGIRTLTGKFFSKAHLHNILTMPYCVEATPEVYDYYAAKGCIMDSASPREKWDGSTGVLIYGRFSDKSQKHLVQPPENWTICLGLQKPFIPAEKWLAVQERFKQNTFCKDAKWPVPLLRGILRCNKCGSLMPVSRRKKVDGTCSSWYYCRKRKDEGSEACDMNQIKCDLIDEKVLEIFRKIALDPDSIHQFVKTESPSEIPNLSFISSRISSVESKIGKLAASLALAENSTASKYIIEEIERLDAELAALKREASHAEMKIHQAAAKERNSQATAIEIAKFINNLDGFSAKEKNEIARSVIRDCRWDGEKLFLTL

SEQ ID NO: 24212 - protein, 544 aa, synthetic construct
MKAVIYARYSSDNQREESIEGQLRECKEYAEKNGITILRSYIDRALSAKTDNRPEFQKMVQDSAKGLFDTVLVWKLDRFARNRYDSAHYKAQLRKNGVKVVSATENISDGPEGIILESMLEGMAEYYSAELAQKINRGLRENALKGKNNGGRIPLGYQLGEDRYLKIDPLTAPIVREIYQRYAQGDSARSIIDSLNERHILTRMNKPFRQSSLHALLRNRKYIGEYRYRDIVLPDAIPAIIPHELFERVQMRVEKNRQAPAMAKAEEEYLLTTKLFCGHCGRMMAGESGTGRNGVIHRYYKCGGAKRKLGCHKKAVKKDWIERIAVQYTVQRVLQDELIAQIADKLVELQNTQDDTLPLLRKQLADTNHGIENMLNAIQQGVLTSSTRERLEELEKLREDLKTSILQAELERPKYSREDIVEWISRFKYGDPDNKEYQRQIIDIFLNSIYVFDDKLVFTYNYKNGTQTVTLADISAAFGSDLQSHSPPKRSGSHVSVGRSSLLYENRPMPLPPRKAVRPFSGSSQREMRRSKRFELRSRESLNG

SEQ ID NO: 24213 - protein, 454 aa, synthetic construct
MECVAYLRVSTEKQAEEGNGLDSQKRDIENYCRKNQLIISDWYEDDGFTGSNMNRPALQRLINDCSKKKLKCVVAFKLDRLSRSMVDGIYLIERVFIPNGVDFRCVHDSVSYDSPMEQAYTQMMAVFAQLDKNTMLLRMRGGMLERVKQGYWMGGGNTPYCYRYSKEDGILVPIPERKEMALRAMNLYISGYSDVRIQKLIGFKSEFVTRQVLTSPVNIGMIPYKGNLYKGRHEPIFDIKVFELAQELRKTRKQSKRFCVNHENQLLTGLCYCGVCGCKMRYQKWTHGKHKIYCYSRDNGMSYLPNYNPNCNNSLEWAEDIEKQVEDEILKISLNLSSHKPKERESCLDILSKQLQKEKTKLKRLYTLYADGNDTVLEMIKETESGIDELKLKIQNEMKNPDNSQKKEFVYDNIKKLADVWEHIDKQSKNRILKTIISKIIIVNGNIEIQLKKF

SEQ ID NO: 24214 - protein, 510 aa, synthetic construct
MSYFIYARKSRKDADLEALGIDVLERHITTLLELAKTLSLPIGAIYREVVSGDSIDSRPVMSQVMAEVESCMWDGCLVMDVDRLARGDTIDQGRVQRAFFYSNTKIITPNKTYDPANEYDNEYFEFSLFMSRREYATIKRRMQRGRERSSSDGYYVGNIPPYGWRRVIAPDGKHFSLAPDPAEAPVLDLMYDLCGNKQYGYQKACTYMTEMGILSRSGRPFTPSTLKGIISNPANIGKVRWGHRKTVRTVKDGKISRSRPHSSDYILADAVWPPQISADLFQRANQPKGSCSAPVRDDRPIQNIFAGLVRCSQCGRLMVRKKAHTKTPYDILICQYTECPTVGIRIDELELALLEWLQNYIDKYELTDALPEDAENVTTKEAIVKNFEKEHEMLLKQRESLFDFLEQGIYTKEIFIERSNALEQRVKECMKHIISAQNDLHATLALQANRKNFVPRCKNLLGEWNGLTIPEKNSALKVLIEKIMFTKTKRNKKGQDRSDFEIDVFPKVPK

SEQ ID NO: 24215 - protein, 559 aa, synthetic construct
MKTKLYSYIRFSSMRQSDGSSYERQIRMAREIAAKYDLELVNDYQDLGVSAFKGANSKTGALSRFLDAIGRSVPVGSWLFIENLDRLSRADIVSAQELFLSIIRRGITIVTGMDNKIYSLDTVTANPMDLMFSILLFIRGNEESQTKRNRTNSSALIKIKAHQENPQNPAVAIEEVGKNMWWTDTTSGYVLPHPVFFPVVQEIVELRKNGRSTAEILDHLNETYAPPPAVSNKKHSKWSRAMVERLFHTRALIGIKEVSVDGVNYELKDYYPRVIDDATFYHLKKNIGARAWNFGDKEEVKPIPLLSGIGLLKCDHCGCAMVKVKGTNKRSDQYRYTCDATRSRRLDCEHPNWSFRGDQLEKAVLQLLADKIWIAEDKANPVPALKVQVDEISRKIDNLIALSAMTGATKELADQITTLNSERETLYNQIKMAEEEMYSVDSQGWEKLAEFDLEDVYNEERLKVRFKIKQALKRIGCSRIDRNKNLFVLEYIDGKTQRVVIENSRGTRKGRIFIDLKTINDRQILESNGLVLHPCLDMLTDKNWKPEEEIPGPLQEFGI

SEQ ID NO: 24216 - protein, 558 aa, synthetic construct
MTNAVIYARYSPGPNQTDQSIEGQIHECTRFCEDNNLRIVGTYIDRKQTGRNDNRADFQKMLRDSSRHGFSTVVVWKIDRFGRNREEIAKNKAVLRMNGVRVLSAKEHIPDGPEGIILESVLEGLAEYYSANLSQNIKRGMRESALKCQFNGSGLSTGYTVDADHKYRIDPDGAAVVRTIFEMYDSGKKIADIQRYLQQSNIKTMRGKEYTHYGISRILRNRVYIGEYHWHDIVVPGGVPQIIDNDLFDRVQKRLEANKHAPAARRGDVDFLLTSKLICGNCKSTMIGDCGTGKNGARWYYYTCRAKKTKSSKCRKKSVPKEALEREVTALTAAYVLRDDVIDYIADKVVEIQKSEHDDKSMLRYFESQLKDTNKAIANIMRAIEAGIITETTRSRLEELEDTKRDLETEIIKEKVARPTIEREQVIFFLEKFRGGNVDDKEYQRKIIDTFVHKVILYDDKITITYNYSTDSTKNAENTVESIESAASAAECKCSNKPSSSPPVTRILLLQCSCYFFRRGSNRTVLRSRIPSVRWTVGKSACVSAHGSAPSVPLRLHQ

SEQ ID NO: 24217 - protein, 579 aa, synthetic construct
MPNLPYSNEFAKLIIAIYCRVSSEDQAERGTIEIQKEFAAKYVNLYNLEVFDYYCDDGVSGTLPLEQRPEGKRLLEDAAKKRFNMVIFYKLDRLGRKVRVILNAVNDLDALGVTVKSMTEPFENETPTGKFLLTTLAGIAELDRDTILSRMWSGAQYAAKQGRWLGGVIPYGYMVADKKLVISTDPVPNCRLSEEDVIKIIFRMAAKEKANCAEIAEYLNSIKIPTRYMLNGISGKRYKKTAEIWRPGRISEIIRSTTYKGLHQYGKNATHKNSKIITRSVPAIISDEIWQEANNTMKDNRVSCKRNTKNLYLLQGMIRCGLCGLAYSPTFYKARNTSYYCCTCKGQQKTKFYNRDACIGKPVRVDWLDTLVWSKCLELLKEPEKIYDAKPSTNKEPPNMVPTPTEFELIKSRIQELSTEREKLLDLYRKGIIIESDLTTQINKLYLEETELNNKIIKIDNQPKQELKRSKASTVMVLKEFIEMIKNTDINQLPFELKREVVKMLIDKVFVYTKVDPDKFYPSINVIISWRFDAAPFNIDYIENYTLITFLLQRKKLKTPLQPTPLITLTPVLNCNTRR

SEQ ID NO: 24218 - protein, 547 aa, synthetic construct
MARKKNIAAGQNAVIYARYSSHNQREVSIEQQVRECMKHAAELGLHVVGTYEDRAISGKTDKRPNFQRMMRDAEKGKFQAVVAWKSNRIGRNMLQAMVNEAKLEDCGVKVFYAEEDFDDTAAGRFALRNMMNVNQFYSENMAEDITRGLYDNASKCMANGRQPLGYKRGEDGRVVLDEANAAVVREIFTRVAAGDLFVDIARDLNAQGIRTSKGANWNKGSFQSICQNERYRGIYIYGDVRVADGIPRIVSDDLWYRVQEAMRMKKNPVGTRHRVGAEDYLLTGKLRCGHCGSYMTGVSGTSRNGELHYYYTCQKRRTEHACDKKNIRRDVIEPAVAQAIKMYCLTDDVIAWIADRTVEYWEKHDNDLQIEALEQQLEENKKATSNMLKAIEMGIITEATRTRMVELETEQSRLSVQLNAAKEDVVKIDREQIISYLELLQQGDIHDRDFQMELFKNFLVAVYVYDDNRMKLVFSCMGDQNSVEIPLETGEDPPDGGLSPDAKMFVLTPDSSTQKALYFVGSAVLFFLHLRTLTMQSVWPYRRSKPR

SEQ ID NO: 24219 - protein, 530 aa, synthetic construct
MAKPEVSELAVVYARYSSHSQGEQSIEGQLSNARDYAAAHGYTIVHEYVDRAKSGRTDNRAEFQQMLKDTAKRQFSVIILWKVDRFGRNREEIAINKMKCRKNGVRVEYVAETIPDSPEGVILESVLEGFAEYYSLQLSQNIRRGRAESAEKCQSLGGNRPLGYKTGPDKKFVIDENTAPTVKMIFTMYADGKTVTEIVDKLNEMGLRTLRGGPFTKNSLHSILKNKKYIGVYEYQGREIKDGVPRIIEDDVFNKVQEMLKINKRAPAKTWSRADYILTDKLFCGKCGALMFGESGTSKTGVKHNYYICSNKKRFRSCDKKAVRQADIEDTVLNATHELLQDDELLDYIVDRTWEYYLAQDNSQEELRNLQRQLAQTDTAISNLIRAIEAGILTEETKKRVDELTQQKADLKASIADREIARGFHLQKSHIAFYLRSLRDADWSDKEAQKRLIQTFVNAVFVYDDHITLTYNFSGDKSTITLRDMQRFEDGEEFGCRASRSTRRTFKVFALKVLFYQKVIGNTTLSGAKR

SEQ ID NO: 24220 - protein, 650 aa, synthetic construct
MTDYIGNYKNRPRRVVFYGRVSTEHEEQLSALGNQMEWYTDLALRNSNWTVVAQYIDEGITGTQMKKRPSFMRMIEHAKEHRFDLIVTRELSRFARNTVDALNATRELKQYGVEVYFVNDGIWTMDGDGEVRLTIMASIAQDESRKTSERVKAGQKMSREKGVLYGSGNIIGYDRVDGTYVINEEQAATVRRIFNLYAEGHGETTVAKMLIEENRKDGGGGLSWTASKVSRVLRKPTYKGYMTYNKSHIDDFLSHNRINHSEEDFVLVKGNFEPIVSEALWETCNQIRSKRAAFVKGKDGRAHKFGVSFPQNKWTKILFCDCGMRFQIEGYDKTANGGKNMRLICARSKMFKKKDAARALNGIPCPAPYASEWKLELMAREVFRTVWKENAEDILGLLRMLDANLNTTGTPNDGNQLENKLSALNEELDDLVSQRASRSITMDDFLSRSTEINNEIINVEGLLQSSIQEQRPKARLDMHSIEAALSDDASFPDGKIEPGFLDRYANRIVKSNNRYIWMLQLVNVQQIMPIQSERQPIAMVTYKSGVPYDIEQEQTGKQDKESAGPDCATICRPQDFFLNMSRTKRKRKLVEWLESCQENQVNVLDEKIPLLSFAVDFVTAYEYQKARGIKIHPGLWKDMRVDIFLVKKEN

SEQ ID NO: 24221 - protein, 501 aa, synthetic construct
MRDMDSARLRVVCYVRVSTREQAEKGYSVSEQQERLKAYCLAKDWVVAQVITDPGFSGAKLERPGMQQLISLVQAKKCDAVLVWKLDRLSRSQKDTLYLIEDVFLKNGCAFVSMNENFDTSTAFGRAMIGILSVFAQLEREQIRERMAVGRVGRAKAGLFHGGGFAPIGYDYKTIAEGGAGLVVNEYEAMQVREVFSLYLQGWPVNRIRKYMAAHYTTKDGDWGSDTTVRDVLKNPLYTGKINWAKKVYDGQHEPLISQETFDAAAARLATSSWKRTCSDGMERNSPFKSTHLLGGIIWCARCGARYFASGNYSGRGENKRYWPYYVCYSRAKSAKHMIRDPNCRNDRWAVAKLDAIIEGEIRKLAFDPAALELAVSGPQQDEDVAQRRAALQQRLNDLRAQMGRVLDLYQMGGSLPASMVGDRVAKLQAEIDGVEAALAEAVEEPPARRMDAARTALVGAEDVLDNGTLDERRELVHSLIRRIDLDGENIDIHWSFSPEA

SEQ ID NO: 24222 - protein, 519 aa, synthetic construct
MKKVTKIAETASSKVKLKKIRVAAYCRVSTDSDAQLESLEAQKTHYENYITSRDDWEFAGLYYDEGITGTKKDKRPELLRLIDDCKAGKVDFVITKSISRFNRNTTDCLELVRKLLALHIPIYFEKENINTGSMESELFLAILSSMAEGESVSISENNKWSIQKRFESGTYKVSYPPYGYDWDGEQMVINPEQAAVVKEIFAALLSGKGTHVIADDLNRRGIPTKRNGRWTATTIRGMLSNEKYVGDCLFQKTYSDSRFVRHNNHGEQTQYMVKDHHEAIISREDFEAAHAFIHQRATEKGVVKGSDKYQNRYTFSGKIICGECGDTFKRRIHSCTGYKYTAWCCSTHIKDKDKCHMLFVKDDDLKQAFVTMMNKLVYAHRIILKPYVDALKNTSSDDSLRRIQEIQTLLAQNTEKRETLTKLMTQGIIDPILFNKETNELLSQADSFRDEINALKNAVSGDVTKVTAATALLHFTEKGGILQEFDDDLFNEYVNRIIVRSRNEVRFELKCGLTLRERM

SEQ ID NO: 24223 - protein, 501 aa, synthetic construct
MRDMDSARLRVVCYVRVSTREQAEKGYSVSEQQERLKAYCLAKDWVVAQVITDPGFSGAKLERPGMQQLISLVQAKKCDAVLVWKLDRLSRSQKDTLYLIEDVFLKNGCAFVSMNENFDTSTAFGRAMIGILSVFAQLEREQIRERMAVGRVGRAKAGLFHGGGFAPIGYDYKTIAEGGAGLVVNEYEAMQVREVFSLYLQGWPVNRIRKYMAAHYTTKDGDWGSDTTVRDVLKNPLYTGKINWAKKVYDGQHEPLISQETFDAAAARLATSSWKRTCSDGMERNSPFKSTHLLGGIIWCARCGARYFASGNYSGRGENKRYWPYYVCYSRAKSAKHMIRDPNCRNDRWAVAKLDAIIEGEIRKLAFDPAALELAASGPQQDEDVAQRRAALQQRLNDLRAQMGRVLDLYQMGGSLPASMVGDRVAKLQAEIDGVEAALAEAVEEPPARRMDAARTALVGAEDVLDNGTLDERRELVHSLIRRIDLDGENIDIHWSFSPEA

SEQ ID NO: 24224 - protein, 573 aa, synthetic construct
MAKVKLPDKPRVAIYTRVSTLHQIDKDSLPMQRQDLINYARLILNTEDYVVYEDAGYSGKNTDRPKFQEMMQQVRLGVFTHILVWKIDRISRNLLDFATMYSELKQLGVVFVSKNEQFDTSSAMGEAMLKIILIFAELERNMTSERVTAAMLSRAANGQWNGGRVPLGYDYDPETKTFTINESEAAVVKIIHDKYEQERSLVSLARYLNGHGYRTRTGCTYSPSTLLIILRNIFYCGDYRYNVLKDGDRQKRKKESEWITVKDHHPAIISREQKEEIARILKENRRLECERRGIYSKKKNVHVFGGLVICGNCGHAMTSTIRPADQDGIRWSVYVCPTKRRSEYLCKGRATSEVVLGEFVFNYILNMLNVQKNFDSINSVEDMEKMLLSGSTFRDVDGIERAGLDDLYNMLASGLTEKAPFDSSVEVRKKPVVSDIELENLNTEKTKIERAAERLQNLYLYSDDSISQKDYIIQREKLMSQLAEVNEQIGMVMSNADEKDVSDEEFVHAASKFILTQKLEGRTYIYYKRLATTVSREVLRSFVMSIIENITIYDGRVQTIVFKNGLSHTFILK

SEQ ID NO: 24225 - protein, 436 aa, synthetic construct
MGYRLLIQKEVKMEIRIEKKNAIAPLPRLKNVAAYARVSSSKDAMQHSLAAQISYYSGLIQSHSGWRFAGVFADDGLTGTKESREGFQKLLAKCRAGEIDVVITKSISRFARNTVTLLSTVRELKSLGIDVFFEEQNIRSASSEGELMLTILASFAQEESLSASENQKWRIKRNFEQGRPWSGKLFGYRLVNGTFILLLDEAVIVRRVFDEYLSGRGTEAIAHGLNADGLTNRGGKWYPSVIAHMLRNVDYTGNLLLQKTYREDHLTKRKKKNDGVLPQYFVEEAHEAIVDSDTFEAVQKEAEGRLAKYKHENKGSEKYAFTGLIVCAVCGRKYKRKKTHAGPVWICPTFNSAGKAVCPSKQIPEETLKELTAGIDLSTVERMTAENGNVLRVRFRDGTERTLVWKDRSRSESWTDDMKRKAKDAAEKRWKKNGER

SEQ ID NO: 24226 - protein, 602 aa, synthetic construct
MPTSKNMARKYAAGGGSDNSCDVEPLRAVIYARYSSSGQREESIEGQLRDCYDFAKKHGIIVIGEYIDKAMTGRVDRRPDFQRMMKDSEKGRFNCVLLWKMDRFARNRYDSAMYKYKLKKNGIRIFYAKETIPDGPEGIILESVMEGYAEYYSENLAQNVKRGNYDSALELKTLGKTCLGLKTGPDGRYMVDQAEAAIVRRIFEEYAEGERAKDIYERLNSEGYRTSRGGKFNKNSLRRILSNKKYIGVYEYEDIYVENGIPAIITDRDLFERVQKMLKINHDAPARGKAQNFLLTTKLFCGLCGSPMIGDGGTSHTGKAYAYYSCTKRKRGRSCKKESVPKDWIEDLVVGELVKIVHNDELIEQIADRVMEYQKREKDQSGLHALEIRQKENEKAISNMLAAIEAGIITPSTKTRLMELEADRADIEKGIAHELLAEPEFERDQIIYFLERFRSGDINDEAYRIMLVDTFLNSVYLYDDDHLVLVMNYSGENCKVDLKLVEGAVSGDGCKGSAFAPSSALNNKTGTKQSVWSLSCCSKPKRALNPWFKVSPPARSARGMRSPGPHSVYAPLRSLQNRRPPDVLQPIFRKAPVVAGQALYID

SEQ ID NO: 24227 - protein, 568 aa, synthetic construct
MKKKFSSVPEPDIQDAVIYARYSSHSQRDCSIEQQVADCELFAQQNGLRVVKIYADRHLSGTTDNRPEFQQMLKDAAHGHWPFVICWKIDRFARNRYDSATYKYKLKKAGVRVLYAKESIPDGPEGILLESVLEGSAEYYSASLAQNIRRGMRFNAENCKVNSGSIPFGYCKGPDGRFAIHETNAEIVRDIFRKAAAGVPFVDIATELNNKGLKTSRGGRWNKNSFVLLKNESYIGVYHFSDIRIEGGMPAIIDPGTFLAANERMNANRRVRGRHHDGGDYLLTGKLKCAHCGSYMIGFSGTAKNGESHYYYGCQKRRRERACKKANVPREWIEKVVVKAALDYVLQPDVMEWITDAVMEYQEREAASSQLAALTAELEENQKATDNLMKAIEAGIITATTKQRLLDLETKAKDLKRAIELEKLSHVRLEREQILYWLEQFQGGSLQSQEFRRKVIDTFVSVVYLSDDHLRIAFNYSGQNRSEADFNLIMDAETASADYPINSFSLPLSPPDKKNPNLFPSGKGSDFSFAAFLTASFSFPVSAARLFYRCRLHIRSGCRLLRQRGGRE

SEQ ID NO: 24228 - protein, 440 aa, synthetic construct
MIAVLRAALYPRVSTEEQKKFGLSIHDQQNDLEEYAKAHNMKVVGVFQDAGFSARKKIEKRPAMLQLLEAVKHDEIDIILVTKLDRWFRNIGEYYKVQEILEAHNVSWKTIYEDYDTSTAAGRLKINIMLAVAQDEADRASERIKRVLDAKKERNEVCTGHLPKGYKIEGKFAVIDKETEPIIRRYFSTFLETGSITKAMDAVPELKLKYLTASQMLDNPGYMGDWHGIKLPPYLTPQEFQRVQGLRTRVTRKSPYNRTYIFSGLIVCGECGRRMTGHPSPRASGKCSYSYYCQGSAQRKGCNNGNFTVEWKIEDYLLSTIDEQIQIKLQAKPRQEPKANQDAQLKALQKKLSKLSELYIDDMISKADYSKKYAELTSQMDEITQVKSQSRAPEEIATLFSAGWQEIYKQLNRENKQAFWKLKIKEIRLYKDRRIEFDFL

SEQ ID NO: 24229 - protein, 574 aa, synthetic construct
MRKKKIDAPKEKPQRAAIYLRVSTAYQVDRDSLPMQRKDLVGYCEYALNISDYTIFEDAGYSGKNTDRPAFQKMMMQIRNGMYSHLLVWKIDRISRNLLDFAQMYEELKMLGVTFISRNEQFDTSTAMGEAMLKMVLIFAELERKTTAERVTATMISRANDGTWNGGRVPFGYDYNKETQTFSVNGDESFIVLEMYDLYEKTDSLVHTARELNDRGYVSRQHNPFSPVSVWTILRNPWYIGTYRYNYYKIPGRKAIKDESEWVVIPDHHTPLVSKERFDRVQKMLDSNARYRNTPGRSATQKNVNIFSGLIWCACCGAAFTASPGKLHASGYRSAKYGCPNVRKTKTCNAKYTSDTVLGEFLLNFILNVINAQKSFDQIKSPADLEARLLRGDTFNNVAGIDSASVAALYEMLAEYSPADSVLLKKPTVKKNLDPELRKLRADKRKTERALARLDHIYLYSNKQMSDKEYLIKKNDLMNDLKEQDKSIGLLTSESWAQSLSDDDFLEQASSFIMSQRLQEREYIYFQGLAECTEPSVLRSFFLSIVDSVRMRNGHVETLTFKNGISHKFTYLAI

SEQ ID NO: 24230 - protein, 514 aa, synthetic construct
MAKRKFNKGGEVRLVAYYRYSGGSGQTEQSIEGQRRDCEAYARLHNMTIQKEYVDRHISGKTDDRAAFQQMIADSDKGVFDMVICWKTDRFARNRYDSAVYKKRLRDNGVEIVYAAESNISGAEGIIIEGVMEALAEYYSAELAEKMRRGMRESALKGQAISRCRALGLKTDEHKRFVIDEKTAPTVRFIFEHYAAGESAMSIVEQLNAKGLRTSQGNPFNKSSIPRIIQNEAYRGVYVSKSYDVRIEGAIPAIIDDELWERAQTMLKLNRQLKAKNEPKADYILSGKLYCSCGSLMRGMSGHSATGEVYRYYTCPNKDCHLRNIPKDDLEGKVMQSIVDHLLQPESMEALAEAMVEVQKADVEKPNAERVAIEQSLADVRRRSKNILDAIENGTANAQLCARLDDLTEQEQTLSFQLSSLEKEKSVVFTKEQYLFLLEQFLMEPSERTPEYGRRLVNTFVTSMVVSGRELVINFNVSDETVNKNKKTSQTNLQKESSSGMRLVRVARIELTAS

SEQ ID NO: 24231 - protein, 552 aa, synthetic construct
MPRKPAKHPAKPKRGKKLEIEEPGVLYGRYSSHNQKDISVEQQFEKGYELAAEYGIRIIDTYADRAVSGRTDKRRDFQRMMTDAAKGKFRYVIAWKSNRMGRNMLEALINEARLQDLGVRVLYVEEDFDDTAAGRFAARSMMNVNQFYSENMAEDIKRGLYDNAANCMVANGHLPYGYKADETLHYAIDEPKAAVIREIFTRVSCGEAFVDIMASLNARGIKTSYGRPWGRSSFQKILSNERYRGIYIYGDVRKEGGIPRIISDELYFKVQEVITTKKNPQGRHRVNGDYLLTGKLFCGHCKSPMTGVSGTGRSGNLHYYYVCQKRRTEKTCDKKNVRRDEIELQVAQAIKDYALKDDVIEWIADSTVAYNERKEAESKVGILEDQLAGTEHGIKNIMSAIEQGIITETTKSRLVELESERATIKANIAAARADIVTVSRDDIISGLEMFRDGDVHDKKYQARLFDTFLVAVYAYDDDLRLVFSFSGNKNTIQIPIESAVNAVENNEAECSFKLCSAPPKKSTCVSKCFFQRNPPFRVGEIPLRGVIYACGV

SEQ ID NO: 24232 - protein, 514 aa, synthetic construct
MQMEYAMYLRKSRADLEAEAHGEGDTLARHEHILMELAKSRALPIGAIYREIVSGERIANRPVMQQLLSEVEDGRWKGVLVTETSRLARGDTIDQGIVAQAFKFSGTLIVTPSKTYDPTQEADEEWMEFGLFMSRQEYRMIRRRQLAGTRASKKEGHYVPGRPPYGYERYKLDGRGWSLRPVEPQAGVIRTIYDMYLSGKGFSEIANELNAMKIRTPLDKKWVPATTRAILQNPHYAGFIPSAMKVNTKIVQKGKLITKRPVNKNCELYEGIHEAIIPRDVWYSVQQRMKDTVTPRVPRKYQQMNPLAGLVYCDQCGKLMSRHPYRREDKVRFGCENPSCSTVSSLFEDVESLVLQSLREFLHEIELSSPALLDTKSEEIALQNIEKQLTDINHRLQRTYELLEDGVYSKETFLQRQSAISQDQTALLNTKHEIERKLYNKQTDIEAQKNSAPLIRHVLDVYPTLEDPKEQNLLLKQVIRRIDYHKTVRVYGKAKSDLHLTIHPKIAIPQTSNI

SEQ ID NO: 24233 - protein, 503 aa, synthetic construct
MNNRIDAIYARQSVDKKDSISIESQIEFCKYELKGGNCKEYKDKGYSGKNTERPQFQQLMQDIESGLVRKVVVYKLDRISRSILDFAKMMDFFQKYEVEFVSSTEKFDTSTPMGRAMLNICIVFAQLERETIQKRVQDAWYSRCQRGFKMGGKTPYGFRTEPYVMDGVRTKKLVIEPTEAAFVRQIYEMYADPQVSLHDITKKLTADGMRTYHGRPLSRATLSVILRNPIYVMADLDIYEFYKSQGTDIYNDAADFAGTNGCYYYQGKGNTEDKHKHLQGQTLVLAPHEGFIPSELWLKCRKKLLASHTYQPARKARNTWMAGKIKCGKCGYALMSAHSNGILYLRCTVHADSKACPGCGCVKLHELEAVVYGAMVKKLKDFKTLTGRNKAAKISPKLTAKRLELAQVESEIEKLLDTLTGASPVLLSYANSKIEELDARRQSIANEIAKLSADAVPMEKMESISGYLDDWENVSFEDKRQVVDALITVIRATNEKVEIEWKI

SEQ ID NO: 24234 - protein, 501 aa, synthetic construct
MEIQIREGSREQKRKLKVCAYCRVSTDADEQENSLENQVRHYETVIKANPDYEYAGVYSDFAISGFKEKRPGLQKMLADAEKGKIDLILTKSVSRFARNTSIVLEATRKLKELNVGVFFELQNINTLSGEGELMLTILAAFAQAESESGSAGAKMVYQRKYEAGIPVQYLERSFGYTKDERGIFVADEDEAVWVRKIYEMAADGYTPAAIKRYLNENGVKTVGGAEWIDSTVFRLIENEIYKGDYIMHKHFVNKERKLVRNRGEVDAWYIEDDHEAIVSPELWQRAQDALEAKRDYLAEGSVIEEFTEENYPYMNKIYCSKCGYPLYKRIYSKGNRLNWGCSGMKRYGKSFCDGINIPDGVLRSAWHFEENTYIDEKASDKGVKEFSYLKERSWKRRHKKKQPPSIPENTEAEYPYREKIYCALCGSRLVRHVDTKSHKVIWVCNGRKRKGKDFCDGTRVPDTILKGWGEIKKDIYIQRKDDKNGKKRYSYTSKKPSGIGA

SEQ ID NO: 24235 - protein, 509 aa, synthetic construct
MSNAVIYARYSSGHQREESIEGQIRECTDFAKRNGLTIVEHYIDRAISAKTDDRPSFQKMVADSSKKTFDTIIVYTLDRFARNRYDSAVYKAKLKRNGVRVLSAKENITSDPSGIILESVLEGMAEYYSVELAQKVKRGMTENALACRWASGRIPFGYTIDADKHLHPDPALVPIVQEAFEMYAAGAKIVDIARKINSYHVVTGMGNKFGRSSFDRMIRSETYIGVFKWNDIRKENAVPPIITPELFYKCQARYNARNRKNVARPSAIYLLSGKLRCGCCGGSMCGMSGKSRNGTMHYYYSCYSTRRRTSHCDIGNIRRDEIEHIIAAHAASILKKPINLDIIANQALKTNNSVKNYRLESLLQQEKDLTQKLENCMKAIDQGLVSITLMDRIKQYEADLQSVKNDISLEKIKSNPIQVTKEHIIFFLEKFALLEGEEFKDRIISTMVKDIVIKKEKDGNYLVTVQYNYANSKELPNEESYSVPESIGSQDVELVEMRGVEPLSENIAI

SEQ ID NO: 24236 - protein, 616 aa, synthetic construct
MTDYSKITALYSRLSVGDEDRDGGESNSIQNQKIFLENYARGQHLTNIRHYIDDDESGRFFDRSAYSRMIEDVESGKIGVCIMKDLTRWGRDYLQVGNAMEIFRRNNVRFIAVNNGIDSEKPDTLEFAPFINIMSEWYAKDISKKVKTGIKTKGMSGKPIVTEAPYGYVKDPDNKNFWIIDEEAAEVVRLIFRLFIGGKNRNQIAVYLTQEQIPTPTFYMKDRGRGTCKNKTLNEDNRCKWNKATLTNILTRQEYCGDVVNFKTTKHFRDKHNHYVDRSQWHITENVHEPIISRSDFETVQRILENAPVRRPNGDGEIHPLSGLLFCKDCGAKMHIRIDYRNGGKRHVAFCSEYHKGKAKNPKCHSPHIMDADLLMQTIAEVLKKIEDYSISNRAEFEALVKKNLAMQQTDQTKKQQKRIPQITTRLEQIDKVLNKLYEDNALGTIPQDRYEQMSQKYSEEYYTLKAEFATLQEQLSAYENAGGRAQKFLKLTECHAAFTDLTPAILNEFISRIEVHERDQKRARYAIQHISIYFNYIGKFENEVTQLAEPTEQEIRQMREEIEEAKKEKSRAYHRQYSREYRARNLEKQREYDRMKAREYRARRKAQAAAAQPTQ

SEQ ID NO: 24237 - protein, 460 aa, synthetic construct
MIERCAIYIRVSTAEQSMKGHSLQAQREYLESYAASHGMRVVGIYADEGQTARKELKKRKAIHALLKDVEADKIDVILFWRMDRWFRNVADFYKVQDILDAHGVRWVSASESNINMKTRDGRLCLNLILTIGQNEVDTTSERIKFTVNNMIQNGRMVWGATNLPFGYVIVEENGCKRMAKDPETACMVEEFYRFFRQTHKKRATVLHMQDTFGINFSYTMLRTMLSSEFYIGKYRSNDNYCPAYLTLDEWKEIQAISENNIKRPRTGRVYFFSGLVHCPVCGTKMAACAGRSIINRKTKEKREYYYYRCNKAVLNKLCSYTSRISQNLIEEYLLNNLDTEYRKYQVRCNKVKETQTHKKKKRSADSVRSEIERLNILFQKGRIEFDYYEEQYRKLEDELKSFDEVIIREKDHSNVIGMLGSDFKEMYSSLSLENRQAFWQQIIKAIYVTKDRNVDYVDFL

SEQ ID NO: 24238 - protein, 514 aa, synthetic construct
MRRKKNSDVIRLVAYYRYSGGSGQTEQSIEGQRRDCEAYAKLHGMTILHEYIDRHISGKTDDRAAFQQMMKDSDKGAFDMVICWKTDRFARNRYDSAVYKKRLRDNGVEIIYAAESNVQGAEGIIIEGLMEALAEYYSAELAEKMRRGMRESALKGQAISRCRALGLTTDENKKFVIDERTAPTVRFIFEHYAAGESSTSIIEQLNAKGLRTSQGGPFNKSSIPRIIQNEMYRGVYVSKAYNVRIEDAIPAIIDDDLWGRAQAMMKTNRQLKAKYEPKADYLLSGKLFCAECGGLMKGVSGHSGGNGEVYRYYACSNPECHKRNIPKADLEGKVIRSIRDHLLQPDTMEALADALVEVQEADATKPDAEREALEQELRDVRRRGKNIMDAIENGSVAPQLVARLNDLTQQENTLTYQLSTIAKETSLAFTREQYLLMLKMFCAQPDEQNEAYKHRLINTFVTSMKISDSELIIYFNISEETENKNKKASQQNFTKKSSTEMRLVRVARIELTAS

SEQ ID NO: 24239 - protein, 535 aa, synthetic construct
MKKKQPNTRHGRAAIYARYSSHNQREASIEQQVKACRELAVRLGLDVVETYEDKAISGKSDRRPSFQRLLRDAEKGYFDCVLAWKSNRMGRNMLQAMTNEARLKDWGVRTFYAEEDFDDTAAGRFALRNMMNVNQFYSENMAEDITRGMMDNASKCLSNGALPLGYKAGENGRIVLDKAQAAVVQEIYTRVACREPFVDIAADLNRRGIKTKRGGPWTKSSFYTICRNERYRGIYIYDDVRVEGGVPRIVSDGLFYRVQEVLKVKKTPQSARHHTGAEDYLLTGKLFCGKCGRPMTGVSGTSRSGEMHYYYTCQKRRREHACDKKNVIREQIEKSVAQAIKQYMLTDEMIQHMADATMAYNARQEKDLHLQDLQGQLAAVKTSAANLLKAIEMGVITETTKARMVELEQEQGRLNAQIENARAELVPITRDNFVSLLHIYRDGDINDSKYLASLFETFLVRVDLYDDHFLIWFNPLGQKPPADIPITSIENGDVDEFFDECRGKNVFDWGGKWSTKIKAPAVPRRVFLFWCSVSC

SEQ ID NO: 24240 - protein, 687 aa, synthetic construct
MQSAFFFIPFFGSWRKGLFMAYVRNKKKILKFWSKKKAALYVRVSTRYQVDKDSLPFQRKKLKEYCKFLGIEDFVIFEDDGYSAKNTDRPHFQEMMSRVRDGEFSHLIVWKVDRVSRNLLDFAAMYQELKDHKVTFISMNEQFDTSTAIGEAMLKIILIFAELERNMTSERVTGIMLDRAEQGLWNGARMPVGYRWNPEIKFPEPDPEETKIVQFIFDEYERVRSTTKIARYLNHNQIASKRGGQWTSKLIRDIIRSPFYIGTYRYNLRESGRGPLKPESEWIVRENNHPAIITKEQFDRCNAIMDENGTSRDTSELRARKYVHTFSGRLVCGKCGANMIASKDRARANGWRPSMYRCAQRSRMMDCDNSKTVNESYIGPFIFNYAANLARIQKNFKNIKTLEQLEKELLKGPEFENMKVSKESLRRTFDALAFQEVGKGAYLPDIDLSDGDDDYTAAEQLSILKRELDKCKTAIDRLTDLYLYDPDSMTKEEFAKKKRDLVNKIAGYEKQIEASQATGDKDDLADLEFIRKASAFLVAQRIVSKKHVDYIQMALDLDNEILKDFVDQIIDRIEILEGRVQSIRFVNGLVHEFTYSTPADLPVCQKCGGRIGSTCGCRTRTFDFAGKPYRRIKVGDPGDKFRGVAGAVCPECSAQAGRWHHWKCGIERCPICGEQLITCEHGPNGKD

SEQ ID NO: 24241 - protein, 514 aa, synthetic construct
MPKKNPSGGKRLVAYYRYSGGSHQTEQSIEGQRRDCETYARIHGMVILHEYIDRHISGKTDDRPEFQQMIADAGKGMFDYVICWKTDRIARSRYDSIIYKKKLRDNGVELLYAAEANVEGSGGIIVEGLMEALAEYYSAELSEKVRRGMRESALKGKAIGSSRPLGLTVDKDKKYIIDPAGAAAVRYIFEQYAAGAASSAIVAHLNEQGLCTSRGNPFNKSSVVRIIQNEVYRGVYVSPKFDVRIEGAVPAIIDDDLWERAQKMFVRNRQSRSPRNDRADYILSGKLFCGECGTAMKGVSGHSSNGEVYFYYNCPCKDCHRRNIPKDELEGLVIRTVCNDVLQPDVMNRIADSVIEAQTAELNQPNPEKEALRHELADVQRKAKNLLSALENGTAGAMLTNRLAELEQQADTLSYQLSSLESEPKFPVFSKEEVLYLLEQFLIAPSEKTKAYRRRLIDTFVSKIEVSNTELTIYFNIAEEDCGKMKKAPQSDQPEGCSTEKQMVRVARIELTAS

SEQ ID NO: 24242 - protein, 590 aa, synthetic construct
MRVSVNLNAQKPDTTTNAVIYARYSSHGQTEQSIEGQLAKGHEYAAAQGYTVVHEYIDRAMTGRNDNREAFQKMLSDTGKHQFQVVIVWKVDRFGRNREEIAFNKHTCKKNGVRVEYVAESLPNSPEAVILESVLEGMAEYYSIQLSQNIRRGQLESAKKCQCVGGSVPLGYTLDSDKHFVIDPQTAPVVKKIFDLYAEGATISEITGQLNEQGIRTIRKQLFTKNSLTKLLKNEKYIGVYTYKDIVRVEGGVPAIVDKSTFDRVQELLKINRRAPSHTWTKVEYLLTDKLFCGHCGSPMVGESGFSHTGAKYSYYGCIKRRREKACDKKPVRQDWIEALVLDETVKLLHDDELMEYIIDRTWEYYQVTDKVQEEKAVLEAQLAEVDKAINNLVRAIEAGIFNAATKSRMDELDAQKAALTTSLADLELTSGIRITRDHIEYFLLRLRDLDVKDRECQKRLVQTFVNAVFVYDDGRVKITYNYSGQSSTITLNQIASAEKGKGFVCCLPCSTFSPRFPRGVAALFCFLGKTAANQLPISAVLCYNGSENGGGGTENEKAACCVPNGARLLGLCGVRGRNTGRRYGHVRAI

SEQ ID NO: 24243 - protein, 569 aa, synthetic construct
MDVIGYIRVSTNNQDLQRQRYLINKYCTENGYTLVHIYEDFAISGANLDRKEYQNLLNIKKGDADLIVISELSRFSRNENYLKTANDIYELLDKANIVLLDKPENILTKEDFLDIDKFIPFIFEAKGSAYERKKIITRAITGKDAKVAMNPLAITESYYSIPFGFKAVSNPNYVSGKTPKSLLAVDDEAMEIVKDVFKYISEGMTFQATTDKINMMYGDTISKQTAQNIIHNTIYKGLRKRKGEYFRLPIEQPISDDLWEKANYSCANNRLFKGNSTKHFNPIKGIGKCICGKNLTVGNTPSKLGSSLSYECAERAVLYSKSRCKNPNINFHLLNRIVWDIVKQNVLSKNYTIKSNEAIKALENENKKLQTAIASLEKEKEKLDSEKNTIITNGLLSTDSSVMKIVNEKVAEYNDKLKDIETKITNIKKEVTKNKKKITDEKKSQTSKELNEMSLEGKSKIFYQMLESIVTYSVKAKSGMVIVTFNNGLQVIALWKNYIKPSVWYLPVGFQFDMEKRMIYVKTMPKTEGFDFTISDDETKFYEYRDLFKHFDLAQYQVEIPKEELERKN

SEQ ID NO: 24244 - protein, 578 aa, synthetic construct
MNTLSALNITPSPPRMCRVAIYIRVSTLQQVDKDSLPMQRKDLIAYSKLILNTDDYVIFEDAGYSGKNTIRPRYQDMMDQIRTGAFTHLLVWKIDRISRNLLDFAQMYQELKELNVTFVSKSEQFDTSTAMGEAMLKIILVFAELERNMTSERVTATMISRANTGKWNGGRVPYGYKYDPVEEDFLVIANESNTVKLIHDKYEELQSLVYLARYMNEHGYRTRSGNEWSPPSLSIILKSWWYCGCYEYNKRKAGNRQKLKNESEWIMIEDHHIAIISYDQKERVLAILKGNKRFATEHNLYVKGIHVHVFGGLCWCKNCGKKMTSTSSNKNRSWQYSKYLCSTRRQSLTKCRGRSTSDPVLGEFIFNYILNMLNAQKGFDSIHSPADLQDALLTGDAFSDIKSIDQEELNDLYNILSSSVVGNIYGRSFNVNKAKKNDEVQSSLTILKAEKKKLDRALDRLTNLYLYDDMAISEKDYMTKKTEIETKIAEIDEKIGIVNKNSVDDSITDEEFVDKASTFIITQKLTDRNYISYKRLATTVDPKILYMFTHDVIDYIDIYNGKVQRIVFRNGLSQTFIR

SEQ ID NO: 24245 - protein, 498 aa, synthetic construct
MEIQIREGNREQKRKLRVCAYCRVSTDADEQENSLENQIRHYETVIKANPAYEYAGVYSDFAISGFKEKRPGLQKMLADAQKGKIDLILTKSVSRFARNTSIVLEATRKLKELNVGVFFELQNINTLSGEGELMLTILAAFAQAESESGSAGAKMVYQRKYEAGIPVQYLERSFGYTKDERGVYIADESEAVWVRKIYEMAADGYTPAAIKRYLNENGVKTVGGTKWIDSTVFRLIENEIYKGDYIMHKHFVNEERKLVRNRGEVDAWYIEDDHEAIVSPELWQKAQDAIEAKRDYLAEGSVIEEFTEDNYPYMNRIFCAKCGHPLYKRIYSNGNRLNWGCSGTKRYGKSFCEGINIPDGVLRKAWHFDGNMYIDEKPSVKGTKEFTYLKESSWKRRHKKKVPEAIPENTEEAYPYRKKIFCGLCGSRLVRHVNPKSHKVIWICNGAKRKGVAFCGGTRIPDSVIRGWGEIKKDIYIQRKDDKDGKKRYSYTSKKPTA

SEQ ID NO: 24246 - protein, 510 aa, synthetic construct
MQTEYALYLRKSRADLEAEAHGEGDTLARHEHILMELAKSRALPIGAIYREIVSGERIANRPVMQQLLSEVEDGRWKGVLVTETSRLARGDTIDQGIVAQAFKLSGTLIVTPSKTYDPTQEADEEWMEFGLFMSRQEYRMIRRRMTAGTSSAKKEGRYLASRAPYGYERCKLPGRGWSIRPVEPEAGTVKKIYEMFLSGKGASEIANYLNLIAVPSPAQGRWVRQTVGLILRNPHYAGLIPSAMHPHKKVIKDGAITVKRPLNKQCELYEGMHEAIIPRAMWEETQRNITRNHVPRVASALQQHNPLAGLLYCDKCGRKMQRHPQTGRSFERYNCVTVGCPTVSAPLEEVESLVLQSLKEFLKNLELQTPEIPDMKAEHDALKSIDTQLADQKKRLTKTFELVEDGIYTRETFLQRQSEISGEMERLQKARMEIWQKIELGKAEIASREDAAPRIRHVLDVYDRKLSPAERNKLLKQVIERIDYHKTTKQRWSTENDLSIAIHPKILSHP

SEQ ID NO: 24247 - protein, 534 aa, synthetic construct
MPRKPAKHPAKPKRGKKLEIEEPGVLYGRYSSHNQKDISVEQQFEKGYELAVEYGIRIIDTYADRAVSGRTDKRRDFQRMMTDAAKGKFRYVIAWKSNRMGRNMLEALINEARLQDLGVRVLYVEEDFDDTAAGRFAARSMMNVNQFYSENMAEDIKRGLYDNAANCMVANGHLPYGYKADETLHYAIDEPKAAVIREIFTRVSCGEAFVDIMASLNARGIKTSYGRPWGRSSFQKILSNERYRGIYIYGDVRKEGGIPRIISDELYFKVQEVITTKKNPQGRHRVNGDYLLTGKLFCGHCKSPMTGVSGTGRSGNLHYYYVCQKRRTEKTCDKKNVRRDEIELQVAQAIKDYALKDDVIEWIADSTVAYNERKEAESKVGILEDQLAGTEHGIKNIMSAIEQGIITETTKSRLVELESERATIKANIAAARADIVTVSRDDIISGLEMFRDGDVHDKKYQARLFDTFLVAVYAYDDDLRLVFSFSGNKNTIQIPIESAVNAVENNEAECSFKLCSAPPKQSQTNHAGSPGFCS

SEQ ID NO: 24248 - protein, 590 aa, synthetic construct
MIDNCLRAVFYARVSTQEEQQLKALPKQIQENRDKIREKGWVLVDGYVDEGKSGTVIKRRDEYQRLLEDMELNKFDVVVVKDQERLQRNTRDWYNFIDRLVQNKLKLYFYLDNTFYSPDNALITGIKAIMAEEYSRNLSKKMNNSNKRRIEKARAGEEVSAMGNGQTYGYSIVNGKWVVDESQRELVKKMYEFYTELHSIRKVRDALNEQGYRNQRGNLFTDENIGRIVKNVMHKGWVILNRHHREFDSKETIEKLEDEWVIVKNDHEAIVSEELWDAVNDEIQSHRNKGNSGTRGKRGGTDTLSGKMVCNCCGRVLWKHASQGSYKSKEGRKYTYKRYTQWYCSGKMGRGELACTDPATISGVKLQKYLVEMADMFLDYSTVEYSKNLLKRRTISWLEDLKDKLTTPTDNGKIEQDLKALEGKRGKLIDLYTDELISKEEFKSRSVDLDAEIEKKRSLLVPVEENPDIKAIEDTIANIDAEIEALFEDEAMVEEKKVQFIQEHIKKIYVSKNSDVFIILDNVAGAFLFIDKEDTRIEVVPVAEYNPEELSEEGITENDFVPFDRESMPFPNVRIRIKRHGGTAWLDRTI

SEQ ID NO: 24249 - protein, 456 aa, synthetic construct
MRNKEIAPALVRVALYIRVSGEEQKIKGLSLEAQQERLEAYARERGWVIVGIYIDAAKTARKNIHKRTEFQRMMDSVKRDEVDILLFARLDRWFRSVADYYKVMEILQTHNCDWKTTDEEYDTTTANGRLYINVKLSIAQNEADIDGERIDVVFDSKIAHGTVVSGSAPFGFRVNEEKRLEVIPEDAAIVQDAFNYFENTVSQRATVRYVRETYGVNWCDATFRRMLKEKLYTGVYDRGGRYNDQFCPAIINRQQFDRVQVLLTRNVRSAPSGKVYIFTSILTCAECGHILVGYKSSDYYYYRCNQHFQRGRCSHNHSAREDVVEQWLFEHLGEELERCQLEWGVEAAKKKASVARTDKAALKRKLTKLKELYVNDLIDIEDYKKDYQIYVSALNQIPEPAQEAPPDFAAVRRLLDNSFRTIYDTLTREEKRTLWRSVIKEIRIDNDQNITGVVFG

SEQ ID NO: 24250 - protein, 530 aa, synthetic construct
MEQYLIYLRKSRSDLEAEAHGEGETLSRHEHTLLELAKRQHLNVTDIYREVVSGDTIAARPMMQRVLSEVEQGVWSGVLVMEVERLARGDTIDQGIIAQTFKFSGTKIITPIKTYDPDNEFDEEYFEFGLFMSRREYKIINRRLQRGRLASAKEGKWPSGLAPFGYRRVKLKNEKGCSLEPIEEQAAIVRMIFDLYTVGLQDEDGSARPLSLGSIAARLNDMRVPSPSGSQWTRITIRGIIKNPTYIGMVRWGSRETKKKVVDGKVVSVRGPADPEKECVFKGIHPPLIPKETFELANDKLTRSENTSTHTEKVVRNPLAGLLVCSECGRQMMRMMNPVHPDMPVVRCPRRGCPNCSSYLPIVEERVIQGLSEWMKGYELEWSSAAASSSVSSVGVREKALASAEAELRKLQQQLERTHDFLEQGIYDTDTFLSRSRMLSDKIAAAKDSVTRCSRELTEEKLRETSRRDIIPKVKNLLDVYPLLETAEEKNALLKEVLEKVVYQKLNEKRKKSPDGFTIEIYPRIPKSEK

SEQ ID NO: 24251 - protein, 544 aa, synthetic construct
MSVSVNLNAQKPDTTTNAVIYARYSSHGQTEQSIEGQLAKGHEYAAAQGYTVVHEYIDRAMTGRNDNREAFQKMLSDTGKHQFQVVIVWKVDRFGRNREEIAFNKHTCKKNGVRVEYVAESLPNSPEAVILESVLEGMAEYYSIQLSQNIRRGQLESAKKCQCVGGSVPLGYTLDSDKHFVIDPQTAPVVKKIFDLYAEGATISEITGQLNEQGIRTIRKQLFTKNSLTKLLKNEKYIGVYTYKDIVRVEGGVPAIVDKSTFDRVQELLKINRRAPSHTWTKVEYLLTDKLFCGHCGSPMVGESGFSHTGAKYSYYGCIKRRREKACDKKPVRQDWIEALVLDETVKLLHDDELMEYIIDRTWEYYQVTDKVQEEKAVLEAQLAEVDKAINNLVRAIEAGIFNAATKSRMDELDAQKAALTASLADLELTSGIRITRDHIEYFLLRLRDLDVKDRECQKRLVQTFVNAVFIYDDGRVKITYNYSGQSSTITLNQIASAEKGKGFVCCLPCSTSSPRFPRGVAALFLFWGKIGCESTTNFSCFVL

SEQ ID NO: 24252 - protein, 530 aa, synthetic construct
MEQYLIYLRKSRSDLEAEAHGEGETLSRHEHTLLELAKRQHLNVTDIYREVVSGDTIAARPMMQRVLYEVEQGVWSGVLVMEVERLARGDTIDQGIIAQTFKFSGTKIITPIKTYDPDNEFDEEYFEFGLFMSRREYKIINRRLQRGRLASAKEGKWPSGLAPFGYRRVKLKNEKGCSLEPIEEQAAIVRMIFDLYTVGLQDEDGSARPLSLGSIATRLNDMRIPSPSGSQWARITIRGIIMNPTYIGMVRWGSRETKKKVVDGKVVSVRGPADPEKECVFKGIHPPLIPKETFELANDKLTRSENTSTHKEKVVRNPLAGLLVCSECGRQMMRMINPVHPDMPVVRCPRRGCPNCSSYLPIVEERVIQGLSEWMKGYELEWSSAAASSSVSSVGVREKALASAEAELRKLQQQLERTHDFLEQGIYDTDTFLSRSRMLSDKIAAAKDSVTRCSRELTEEKLRETSRRDIIPKVKNLLDVYPLLETAEEKNALLKEVLEKVVYQKLNEKRKKSPDGFTIEIYPRIPKSEK

SEQ ID NO: 24253 - protein, 574 aa, synthetic construct
MRKKKIDAPKEKPQRAAIYLRVSTAYQVDRDSLPMQRKDLVGYCEYALNISDYTIFEDAGYSGKNTDRPAFQKMMMQIRNGMYSHLLVWKIDRISRNLLDFAQMYEELKMLGVTFISRNEQFDTSTAMGEAMLKMVLIFAELERKTTAERVTATMISRANDGTWNGGRVPFGYDYNKETQTFSVNGDESFIVLEMYDLYEKTDSLVHTARELNDRGYVSRQHNPFSPVSVWTILRNPWYIGTYRYNYYKIPGRKAIKDESEWVVIPDHHTPLVSKERFDRVQKMLDSNARYRNTPGRSATQKNVNIFSGLIWCACCGAAFTASPGKLHASGYRSAKYGCPNVRKTKTCNAKYTSDTVLGEFLLNFILNVINAQKSFDQIKSPADLEARLLRGDTFKNVAGIDSASVAALYEMLAEYSPADSVLLKKPTVKKNLDPELRKLRADKRKTERALARLDHIYLYSNKQMSDKEYLIKKNDLTNDLKEQDKSIGLLTSESWAQSLSDDDFLEQASSFIMSQRLQEREYIYFQGLAECTEPSVLRSFFLSIVDSVRMRNGHVETLTFKNGISHKFTYLAI

SEQ ID NO: 24254 - protein, 519 aa, synthetic construct
MKKVTKIAETANSKVKLKKIRVAAYCRVSTDSDAQLESLEAQKTHYENYITSRDDWEFAGLYFDEGITGTKKDKRPELLRLIDDCKAGKVDFVITKSISRFSRNTTDCLELVRKLLALHIPIYFEKENINTGSMESELFLAILSSMAEGESVSISENSKWSIQKRFESGTYKVSYPPYGYDWDGEQMVINPEQAAVVKEIFAALLSGKGTHAIADDLNRRGIPTKRNGRWTATTIRGMLSNEKYVGDCLFQKTYSDSRFFRHNNHGEQTQYMVKDHHEAIISREDFEAAHAFIHQRATEKGVVKGSDKYQNRYTFSGKIICGECGDTFKRRIHSCTGYKYTAWCCSTHIRDKDKCHMLFVKDDDLKQAFVTMMNKLVYAHRIILKPYVDALKNTSSDDSLRRIQEIQTLLAQNTEKRETLTKLMTQGIIDPILFNKETNELLSQADSFRDEINTLKNAVSGDVTKVTAATALLHFTEKGGILQEFDDDLFNKYVNRIIVRSRNEVRFELKCGLTLRERI

SEQ ID NO: 24255 - protein, 520 aa, synthetic construct
MGNVMVIPARRQVGNTVKQSAQKKLHVAAYCRVSTDSEEQETSYEAQVTHYTEYIQKNPEWELAGIFADDGISGTNTKKREEFNRMIADCMDGKIDMIITKSISRFARNTLDCLKYIRQLKERNIPVFFEKENINTLDAKGEVLLTIMASLAQQESQSLSQNVKLGLQFRYQRGEVQVNHSRFLGYTKDENGRLVIDPEQAEVVRRIYREYLDGYSTDKIAAGLERDGILTGAGNPRWHTSTVAKILRNEKYMGDALLQKTYTVDYLSKKRIKNNGIMPQYYVENDHEAIIPKEIFMRVQDELVRRRLVKVSPNGRKHGFSSNHVFSQMIVCGECGELFRRVHWNNHGCRSIVWRCLSRLQPTGVICHARTVNEEVLKNVVIQAFNEMLGSRSTYQKRLRDNLARVLCGYEDEQALEIDKRLAELQQELINHASRKEDYNDIADEIFRLREMKQKNFTDTAVRDEQIKRINELNEFIEQQDSELTEFDESLARRWLKEIVVLDDRFSVELKSGVIIEIEI

SEQ ID NO: 24256 - protein, 687 aa, synthetic construct
MQSAFFFIPFFGSWRKGLFMAYVRNKKKILKFWSKKKAALYVRVSTRYQVDKDSLPFQRKKLKEYCKFLGIEDFVIFEDDGYSAKNTDRPHFQEMMSRVRDGEFSHLIVWKVDRVSRNLLDFAAMYQELKDHKVTFISMNEQFDTSTAIGEAMLKIILIFAELERNMTSERVTGIMLDRAEQGLWNGARMPVGYRWNPEIKFPEPDPEETKIVQFIFDEYERVRSTTKIARYLNHNQIASKRGGQWTSKLIRDIIRSPFYIGTYRYNLRESGRGPLKPESEWIVRENNHPAIITKEQFDRCNAIMDENGTSRDTSELRARKYVHTFSGRLVCGKCGANMIASKDRARANGWRPSMYRCAQRSRMMDCDNSKTVNESYIGPFIFNYAANLARIQKNFKNIKTLEQLEKELLKGPEFENMKVSKESLRRTFDALAFQEVGKGAYLPDIDLSDGDDDYTAAEQLSILKRELDKCKTAIDRLTDLYLYDPDSMTKEEFAKKKRDLVNKIAGYEKQIEASQATGDKDDLADLEFIRKASAFLVAQRIVSKKHVDYIQMALDLDNEILKDFVDQVIDRIEILEGRVQSIRFVNGLVHEFTYLTPADLPVCQKCGGRIGSTCGCRTRTFDFSGKPYRRIKVGDPGDKFQGVSGAVCPECSAQAGRWHHWKCGIERCPICGEQLIACEHGPNGKK

SEQ ID NO: 24257 - protein, 516 aa, synthetic construct
MPKTEEKQAVKAVIYARYSSDRQREESIEGQLRVCEDYARRSNITILHTYADRAMTGRSDQRPEFQMMIRDAATMAFNVILVYKLNRFARNRYDSAKYKHKLKRYGVKVVSAMENIADDPSGILLESVIEGMAEYYSAELSENVLRGMTQNALEGKWPGGVIPLGYKLDKCGRLIINEEKAPIVRMIYQMFLGGMPVARIERELNDKKYTTGAGKVFSRSRVYYILHNERYIGTFQWKDIKKEGIIPPIIPKETFHAVQERINAMKSSSYRTNNNYLLAGKAFCASCGAKVSGTSGKSQNGNKYCYYGCSHHHRSARYEYCETKNIRADVLEKLVCDKTHEILSSKKAIKEIARQAVKLRPRDESELEIRAIKNHISSCQKKIDNCIKAIENGVMSNALVESLNENERTLDMLKEKLAKALLMQGSGLLTEEKIQFFFETIREKAKETEKYNDILLTSLVRAVYICNEYVEIQYNYAEQLPILTNPVRIESCSYKCTNGGTIWIRTKDLFDVNEAL

SEQ ID NO: 24258 - protein, 525 aa, synthetic construct
MYLEISNPMDYHVALYIRLSKEDETEGPSQSVTNQKSLLNEFVQQHRLSVYDTYIDDGWSGTSFDRPDFQRMIGDIEAKKVNMVITKDLSRLGRDYIMTGHYMERYFPEKRVRYISLLDGIDTGVESTANDITPFRAIMNDMYAKDISKKIKSVKRDKQRKGQFIGGKPMYGYKMHPTEKNKIVIDEKVAPVVRRIFAMALDGMSCRKIAATLNEEGVPTPATYCGWNMGRKGPYAGLWSSERISEMLQNETYLGNMVQGRTVKISYKSKKCLKQDRENWVVVENTHEPLIDKETFQKVRMLVNSRKHTRSRTYDFLLKGLIFCHECGYPMAVLNRPPVSGEDRLFFVCRTYQRFTKAGVCSCHSIKEQVVTEAVLAKVREVCEAYLDPKKLQPIAADAVEKARQTESHEAEIQSLHGKIDSLTANLDKMYMDRLTGLLAEADFERIYQRVKIERNSLEDKLKELEAQKESPISTEDRARELVQQFLDSAYTSRELLVSLIERVELTEDKQIIIKFRFRELEAIS

SEQ ID NO: 24259 - protein, 667 aa, synthetic construct
MAYAKNKVVKLWTQKKAALYVRVSTRYQVDKDSLPFQRKKLKEYCKFLEIDKYVIFEDDGYSAKNTDRPHFQEMMSRIRTGEFSHVIVWKVDRVSRNLLDFAAMYQELKDHKVTFISMNEQFDTSTAIGEAMLKIILIFAELERNMTSERVTGIMLDRAEQGLWNGARMPVGYRWNEQTKFPEPDPEEVKIVQLIFDRYEEWRSSIKIARFLNNKNFKSKRGGEWTSRLIYDIIRNPFYIGTYRYNMRESGRGPLKPESEWIVRENNHPGIISKDQFDRCNKIMDENASRRDTSEMRARKFVHTFSGHLVCSNCGSNMIACKDHARTNGWRPSIYRCAKRSRMMTCDNSKTVNETYLGPFVFNYIANLARVQKNFTKITSTEKLESELLKGEAFETVSGIIPDSLNSTFQALLYSNLGNGTYVPDIALLSKFDEVQDHNQIDLLNTEIEKSKNAITRLTDVYLYDPASMTKEEFAAKKKELIKKIEEMEHQLAELLDNSEDNDLTDLSFIKKASAFLVTQRIVSKSFIDYVQMAQELDNEILKNFVDQIVDRIVIKDGRIQSITFVNGLTHEFFYSRPTELPVCKKCGGRIGSTCGCRTRTFSFNGKRYQRIKVGDPRDALYGQKNPVCPECYAKEGRWHHWLCGIELCPICGKPIQTCEHGANGKE

SEQ ID NO: 24260 - protein, 497 aa, synthetic construct
MQFLNVAAYARYSTENQDENSIETQFDNIAQYCQTHQYNIVAHYFDKAKSGTNIERADFQEMISAAREGKFSAIVIYDITRGSRDVADWFTFRKQMMQAGVQIISTHDNIGDLLNPNDFLTELIGVGIGQHHVLTSRLKSIDGTTMKAHEAIFLGGCPPLGYDVKDGKYIINESEAKIVRKIFSMYASGESYSNIIDSLNGAIGKKGRPIGKNSLSSILRNDRYIGIYTWNRRKIKIMGKWAGGVPNERIVQIKDAIPRIIDQPTWERVQIRLKSKTNSSSKATRSYLLTGKIVCAECGARYCGRTSVNQRGYQNPYYVCGNKTRTRQCHSKNIKCEDLDNFCRNAVREYILNYDLSETAQRVVTTYNATVSQYTNEKKELAEISRKIKNGTDAILNGFSSEELFQQMGKLQMRQKELEKIIADDAADELDLDLVTKLLKNMLEDVSTNIDEVVKQFVTKIYAHPNGDCTVHLGVAHFTSSGREIRTLDTTGMNRML

SEQ ID NO: 24261 - protein, 523 aa, synthetic construct
MTTAKNVMVIPARRRLGNTVQAEERPKLRVAAYCRVSTDSDEQATSYEAQVEHYTAFIKQNSEWEFAGIFADDGISGTNTKKREEFNRMIGECMAGNIDLIVTKSISRFARNTLDCLKYIRELKEKNIPVFFEKENINTMDSKGEVLLTIMASLAQQESQSLSQNVKLGLQYRYQNGEVQVNHNRFLGYTKDEDGHLIIEPVEAEVVKRIYREYLEGASLLQICRSLKADSILTAANKPHWRPETVKKILQNEKYIGDALLQKTYTVDFLTKKRVKNNGIVPQYYVENSHEAIIPRDLYMQVQEEMVRRANLHSGANRKKRVYSSRYALSSHVYCPKCGDIYRRIAWNNRGKRSTVWRCVNRVEHGPDCCDAPTVKEEELQNAVVKAINVALGGKDDMIAALEENIAMVLALEDDTSMESIDAKLEELQQELLKRANAGQDYDDLADEIDSLREKKQEVMADNAEREGQKQRIAEMQQFLVGQTEQIEEYDENLVRRMVEKITVYEDKFTIEFKSGTSVDVRR

SEQ ID NO: 24262 - protein, 537 aa, synthetic construct
MKQPIYNTALYLRLSRDDELQGESSSITTQRSMLRQYAAENGLNVVAEYADDGWSGTNFDRPDFQRMIEDIEAGKINCVVTKDLSRLGRNYILTGQYTELYFPSRGVRYIAINDGVDSANGESEIAPFKNIINEWVARDTSRKVKSAMKVRFAEGAHYGAYAPLGYRKDPDAKGKLLIDEDTRWIIEKIFDLASHGMGAAKIAKTLIEEKVPTSAWLNFQKYGTFAHIFEGQPESKRYLWTIGQVKNLMKDETYIGNSVHNKQSTVSFKSRKKIRKPEEEWYRVVDTHEPLVDKDVFRQVQEQIKGRRRERKDKTTQIFAGLVKCADCGWSLRFGTNNQNKTPYSHFSCSYYGQFGKGYCSAHYIRYDVLYAYVLSRLQYWSQEAEQDEGNLLHRLLKTGDRERAAAKKKAASELKKAEKRQREIDTLFMKMYEDRAAEKITERNFSMLSTKYQNEQAELSEKIQTLQERLVKSEQENSDAEKWIALIKQYSNPAELTAPLLNTLIEKIVVHNAVINTYGEREQEVEIFYRFIGKID

SEQ ID NO: 24263 - protein, 524 aa, synthetic construct
MPKKEALFMPKTEEKQAAKAVIYARYSSDRQREESIEGQLRVCEDYARRNNITILHTYADRAMTGRSDQRPEFQMMIRDAATMAFNVILVYKLNRFARNRYDSAKYKHKLKKYGVKVVSAMENIADDPSGILLESVIEGMAEYYSAELSENVLRGMTQNALEGKWPGGVIPLGYKLDKGGRLIINEEKAPIVRMIYQMFLDGMSVARIERKLNDKKYTTDAGKVFSRSRVYYILHNERYIGTFQWKDIKKEGIIPPIISKEAFHAVQERINAMKSSSYRTNNNYLLAGKAFCASCGAKVSGTSGKSQNGNKYCYYGCSHHHRSARYEYCETKNIRADVLEKLVCDKTHEILSSKKAIKEIARQAVKLRPRDESELEIRAIKNHISSCQKKIDNCIKAIENGVMSNALVESLNENERTLDVLKEKLVKASLMQGSGLLTEEKIQFFFETIREKAKETEKYNDILLTSLVRAVYICNEYVEIQYNYAEQLPILTNPVRIESCSYKCTNGGTIWIRTKDLFDVNEAL

SEQ ID NO: 24264 - protein, 581 aa, synthetic construct
MPEKIINCAIYTRKSTEEGLEQDFNSLDNQYEFCTNYLKSLNDPALQLLPARYDDGGYSGGSLNRPALQRLLADIRCGLVNRVIIYKIDRLTREIRDFFKLLDVFEKYNVEFVSVKENQYYNTTTAIGRLMVNMFLVFAQFERENAGDRIRDKIATSKAKGMWMGGCPPYGYDIGDRCLVINETEAQNVRFIYQTFCNTHSLADTTDALNSGGIRTKRYTTRQGRTFGGRKYSVKTVQRILQNPLYKGMVAHRGKQYPGQHAAIIDAVQFDMVQAVFAAHKEKRETRRPKMPSSGGERETAALTGLIYCGCCDSAMTPSYCCKGDIRYHYYRCYHRASKLEDKCPINQIRTSEIDRVVMEQVLAILKSRDFFVQYISHHHEFDVSTAFALFNSLDDVWNSLFETEKRRILRELLAKVTIYKDKIVLDVKKAGLAGVFAELSQNNRLAEVEYKENETFQISVAYRATRLANGAKIIVPATAKEESRFNGSLRLARQIAKGFAWRKMMESGLSLQELTASAKTNERDIRFAMRLSMIDPAIVESVLSGKSPEFLTYAFMKKHPIPLLWSDQRKLYGFEERKQQ

SEQ ID NO: 24265 - protein, 527 aa, synthetic construct
MSYCIYLRKSRADYEAEARGEGETLARHRTALVELAQKRDLPIDQIYEEIVSGETIAARPVMQKLLAEVRDGKWNGVLVMEIERLARGDTIDQGLVAQTFKYSDTLIITPMKTYDPNNEFDEEYFEFGLFMSRREYKTIRRRLQRGREAAAKEGKWLCQAPYGYVRKKIENDKGYTLEINPETSKVVKMIFDWYTDGAEINGSRKRLGIQSIARRLNELGIPPHRKDYWSKETIRDIISNPAYAGLIRWGYRKQKKQMTPDGIIIKRPITSEECIIAEGLHEAIVTREQFEHAQQQLAEAPPAPVGYKSAVKNPLAGLLICRKCGKKMVKRIGYNGKPDYIVCHDRWCKQVSTPYPLVEERVLQILKQWSEEYAVPSADTQIRQIDNIKCLEAALRSAEKEYDKLKLQLSRARDLVEQEVYTIQEYKERAAELREKIENLEERCEELRDQIMEEQQRQKAKIEFAPKVANLVNVYNDLETPAEKNKLLKEVLEKIIYNKDLSGQYNPNNVTAFELTAYPLLPKPDSK

SEQ ID NO: 24266 - protein, 467 aa, synthetic construct
MIRMARSVTVIPARNRQRETGRRAVQEKKIRVAAYCRVSTDQEDQLHSFEAQVDYYTKYINDHENYEMAGIYADEGISGTNTKKREQFKRMIADCESSKIDLVITKSISRFARNTQDCLAYSRKLKNLGIGIIFEKENINTLDSTGELLFTILSSLAQDESRNISENCKWGIRTKFKNGEMHLNTFKFLGYDKDENGKLVINKEQAKTVRRIYRDFLIGINPAQIAKELTEEKVPGCNGQTKWYPSTIVGILKQEKHMGDALLQKTYTADFLTKRQVKNNGEIAQVYVKDSHKGIIDKQTWNAVQEEFERRERFMEAHGTDRYSYGADCMPFCEKVFCEECGSLFTRHSWRSRGIVQWQCKNHRKDGKVACTNAYVDNADLEKGFVKAFNRLVADRDKHMERWQQMKSDGTPLEKIRAGQMMEAVGNEPLTRFVPEIAQLVLAEVTVLGAKKYEFFFQEGSKVKVSV

SEQ ID NO: 24267 - protein, 498 aa, synthetic construct
MEIQIREGNREQKRKLRVCAYCRVSTDADEQENSLENQIRHYETVIKANPAYEYAGVYSDFAISGFKEKRPGLQKMLADAQKGKIDLILTKSVSRFARNTSIVLEATRKLKELNVGVFFELQNINTLSGEGELMLTILAAFAQAESESGSVGAKMVYQRKYEAGIPVQYLERSFGYTKDERGVYIADEEEAAWVRKIYEMAADGYTPASIKRYLNENKVKTIGGAEWIDSTVFRLIENEIYKGDYIMHKHFVNEERKLVRNRGEVDAWYIEDDHEAIVSPELWQKAQDAIEAKRDYLAEGSVIEDFTEENYPYMNKIFCAKCGHPLYRRIYSNGNRLNWGCSGTKRHGKSFCEGINIPDGVLRKAWHFDGNMYIDEKPSVKGTKEFTYLKESSWKRRHKKKVPEAIPENTEEAYPYRKKIFCGLCGSRLVRHVNPKSHKVIWICNGAKRKGVAFCRGTRIPDSVIRGWGEIKKDIYIQRKDDKNGKKRYSYTSKKPTA

SEQ ID NO: 24268 - protein, 498 aa, synthetic construct
MKTAVIYARYSSDKQTEQSIEGQLYDCYNYAKANNITVIGEYIDRAMTGRNDDRPDFQRMISDSAKHTFELVLVWKLDRFARSTEDAAYNRGKLKRNGVRLLSIKEDFGDSSAGDLMMHVMESFNEFYSADLREKTVRGMHQSALKCQSTGGQIPIGYKIEGKKYVIDESARFIPETVFRMYAEGKRLAEIARYLNEKGYRTRMGRKFTTGSFYTMLSNEKYIGVYKYGDVRIEGGYEAMIDPVLFDAVQKKLVENKKRAPKISERENFYLTGKLFCGHCGEPMNGMSGNSAKGKHLYYRCNGVRKHTGCDKRTERKEELENEIIGAIQRAFANADPEELTRKVIENYEKNSRPADQVKVMKAELQKITNKVDNVVNAIAEMGGNETLYTQLRQLTEQKEQKETEIRIAEHKADDMPTVELVKKILDIIQNADTMTDEGRQLLIDGAVSRIYVYDDSLDIYFKGGKNTEIPLNPANKDDVSDNSFACCKEWGAKLSLK

SEQ ID NO: 24269 - protein, 494 aa, synthetic construct
MRVVGYARVSTREQADHGYSIGEQNSRLRAYCQAKDWTLLRVIEDPGFSGAKMQRPGLQQVLEMVRRRECDAVLVWKLDRLSRSQKDTLYLLEDVFLANGCGFVSMLENFDTSTAFGRAMVGILSVFAQLEREQFKERSAIGRVGRAKAGLFHGGGYAPIGYDYYTKEDGGQGLVVNEYEAMQVREVYRLYLAGWAVHKIQVYMHKRYTTKNGCWASDTTVRSVLSSPIYLGRITWAGKTYEGQHEALVSQNDFDQVAARRESLKWQPAEPRAACDLIKNSPFRSTHILGGITWCARCGARYFASGNYSGRGENRKYWPYYTCYSVAKSSKKMIKDPNCKNKRWAVGKLDAIILAEISRLEFDPAALAKAAGPVDVSDVEEKRRVLEARVAEVRPQMERLLDLCQTGGLPVASVSGRLAALQKELDALNGELSGLAVPETVDRLAVAQEMLAGASAVIENGTPEQKRALVHSLIGRIDIDGEDITIHWLFAPGN

SEQ ID NO: 24270 - protein, 536 aa, synthetic construct
MPRKKKLQEVGGLRLVAYYRYSNGGQQTEQSIEGQRRDCEAYAKAHGYKIVHEYIDRHISGKSDSRPAFQQMISDSDSHLFDAVICWKTDRLARSRYDSIIYKTRLRKNGVKILYAAETVVDGPEGIIIEGLMESLAEYYSAELAQKLRRGQRESALKCIALGGNRSFGYDIGPDKHYCINEKQAPAVRYIFEQYAAGATAADIVRELTARGYRTSRGNPFNKNSICRIITNEMYLGVYKYADIRIEGGVPAMIDRELFNRCQTQLAFNRAHGGGKGAPRADYVLVGKLDCGLCGHAMKGASATGHTGSKHYYYTCTQHVEKKCPKTSIEKNYLEQIIVDGVAKYVLTPEKISQIVDCMMELQAKEQEPKGNPEKDALEAELAECRRKQNNILEAIEEGGSARLAARLRALEEQEAQLTFALGEINNAPAPPQFSREALTFMFEQFRREEDEVDEEYRRRILDTFVSSILLYEDRAEVKFNITDQKTGDFERVILPISANKKPPEDDDTTSNSEGSTALRLVEAMGVEPMSEKSSV

SEQ ID NO: 24271 - protein, 552 aa, synthetic construct
MPRKKKLQEVGGLRLVAYYRYSNGGQQTEQSIEGQRRDCEAYAKAHGYKIVHEYIDRHISGKSDSRPAFQQMISDSDSHLFDAVICWKTDRLARSRYDSIIYKTRLRKNGVKILYAAETVVDGPEGIIIEGLMESLAEYYSAELAQKLRRGQRESALKCIALGGNRSFGYDIGPDKHYCINEKQAPAVRYIFEQYAAGATAADIVRELTARGYRTSRGNPFNKNSICRIITNEMYLGVYKYADIRIEGGVPAMIDRELFNRCQTQLAFNRAHGGGKGAPRADYVLVGKLDCGLCGHAMKGASATGHTGSKHYYYTCTQHVEKKCPKTSIEKNYLEQIIVDGVAKYVLTPEKISQIVDCMMELQAKEQEPKGNPEKDALEAELAECRRKQNNILEAIEEGGSARLAARLRALEEQEAQLTFALGEINNAPAPPQFSREALTFMFEQFRREEDEVDEEYRRRILDTFVSSILLYEDRAEVKFNITDQKTGDFERVILPISANKKPPEDDDTTSNSEGSTALRLVDEPQRRTNPCVEISPYSVIFIIPLPGKLVR

SEQ ID NO: 24272 - protein, 515 aa, synthetic construct
MNVVIYARFSSHSQTEQSIEGQLKVCYDYAAQHSYTVIAEYIDRAISGKTDDRPQFQQMIDDSSRHLFEGVLVYQLDRFARNRYDSAIYKKRLQKNGVRVFSAKENIADDPSGILIESVLEGMAEYYSAELAVKIRRGMDLNGEKCLVTGGGTALGFKVDKETKKYVIDEERAPVVRRIFEMYADGSTVADICRYMNAHGVKTSQGNEFNKNSLRKMLTNKRYIGIYTYKGKETPGGMPRIIDDDLFYRVQEKMQKNKKAPARVRAKEEYLLTTKLFCGHCGEMMTGYGGTGKSGKVHHYYICNGVKRKSGCHKKTVRKQYIEDLVIDVCRKMLTDENIDQIVQGLKAAIDKQPKNTELEAFRKELKDVERKRANLLNAVMECNIDLVRQSLYEQLEVIEQQRSELEYNISVEEKRNTQFTPEMVAFFLYELKKGNADDPVYRRALVATFINKVFLYDDKITVHVNTGGDPVEITGELMEEIEKSDAEAECSFKGASAPPKHTGTNSFGLGMCSA

SEQ ID NO: 24273 - protein, 492 aa, synthetic construct
MAAYCRVSTDSDEQATSYETQIEHYTTYIHNHPDWKLAGIYADDGISGTNTKKRDEFNRMIEDCMAGTIDMIITKSISRFARNTLDCLKYIRQLKDKHIPVFFEKENINTMDSKGEVLLTIMASLAQQESQSLSQNVKLGLQYRYQRGEVQINCNHFLGYAKDENKHMVIVPEEAEIVKRIYREYLEGASMLKIARNLTADGLKNGAGHTKWRDSNIRQILQNEKYMGDALLQKTYTVDFLTKKRVKNTGIMPQYYVKDNHEAIIPRDIFLQVQEEMVRRSSIHLKNGRKLTYSSNHCFSQRIRCGKCGEIFRRIHWNNRGKKSIVWRCVNRVDHTGKCDARTISEFALEQVCLTAINQVLCGKKDFLAMLQHNIETVLSHNNDETLATIDTRLEELQTQLVKLASSKAGYDDVAEEIYHLREQKQQALAKNANQDEIRSRIENMATFLKTTSTAITQFDDYLVRQLIKTITVFEDSCTVEFKSGVTVDVEK

SEQ ID NO: 24274 - protein, 516 aa, synthetic construct
MPKTEEKQTAKAVIYARYSSDRQREESIEGQLRVCEDYARRSNITILHTYADRAMTGRSDQRPEFQMMIRDAATMAFNVILVYKLNRFARNRYDSAKYKHKLKRYGVKVVSAMENIADDPSGILLESVIEGMAEYYSAELSENVLRGMTQNALEGKWPGGVIPLGYKLDKCGRLIINEEKAPIVRMIYQMFLGGMPVARIERELNDRKYTTGAGKVFSRSRVYYILHNERYIGTFQWKDIKKEGIIPPIISKETFHAVQERINAMKSSSYRTNNNYLLAGKAFCASCGAKVSGTSGKSQNGNKYCYYGCSHHHRSARYEYCETKNIRADVLEKLVCDKTHEILSSKNAIKEIARQAVKLRPRDDSELEIRAIKNHISSCQKKIDNCIKAIENGVMSNALVESLNENERTMDVLKEKLAKALLMQGSGLLTEEKIQFFFETIREKAKETEKYNDILLTSLVRAVYICNEYVEIQYNYAEQLPILTNPVRIESCSYKCTNGGTIWIRTKDLFDVNEAL

SEQ ID NO: 24275 - protein, 525 aa, synthetic construct
MWMLPPMSVDDIIMYLRKSRTDDPALTVQEVLSKHEQMLDDWVARNIPDDGRRIPEANRYREVVSGETIESRPCVQEVLRRVESPRVKAVLVVEPQRLSRGDLEDIGRLVKLLRYSNTIVITLQYTYDLRDERDRDMFERELKRGNEFLEYQKRIMGNGRLLSVQNGNFIGQKPPYGYNKVVIKEGKRKCHTLEPDPERAPIVKMVFEMYAGGTSASQIAKILRTMGVTTADGGKWVTSSVKQMLTNDHYIGMVHWNKRKTVKVVEDGEVVATRPRNSDFLVYPGKHQPIIEKELWDAVQAIKGNIPPIKNRAKYANPFAGLVVCRCGGKMVRQQYIRDGVERCAPRLVCPNQAECHTASCSLPEFTEAVIEALEKGIKNFELMMADAPEDDATQQERLIAQLEKRLAELDRLELAQWDKYTQEAMPKHVFDALNKKVVQEKEETLQALKTAMETVPIRVDYEKKRETFAAAVRTLQDPDASVKEKNLLLKQCIERINYNRKPKESDNRRFGNPEPLELEFQFKV

SEQ ID NO: 24276 - protein, 542 aa, synthetic construct
MEQTAQRQVRIIPATKNVNAPLKGAQKHQRVAAYCRVSTDSEEQITSYEAQKAYYTQKIEENPDWELAGIFADKGLSGTSMKKRENFNKMIAACKRGKIDTILTKSLSRFARNTVDCLETVRMLKAHGIGVIFEKENINTLTESSEFLITLFSGFAQAESESLSKNIIWGKEESKKAGKVPFQYKKLLGYRKGLDGKPEIEPQEAETVRRIYRRYLDGCSLSQIQQELEADRVPTAQAVQRWSYQVIRNILTNERYIGDAMLGKTFITDCISKRVKKNNGERGQSYVENNHPAIIPRELFYRVQEEMTRRASKRKVMQKTGKTELGKYSAKYALSELLVCGECGTPYKRVTWARNGKKRIVWRCISRLEFGTKYCHNSPTLDEEKLHQAIQEAINEFAQAGTEVKEDMLTFTAMAWGGDAIDGVSLIDLRQKLKDITAQQALLLDQVLEHMDDEILNAQLKAMMDEKQALQEQIAAAEQSQTHNAAQESRMAELREWMAKLEVNQQYSDEQVRMAVERITVVDAETIRIRFRYPGAELEKKL

SEQ ID NO: 24277 - protein, 517 aa, synthetic construct
MAANVTYIPPKAAKPEPLRVAAYCRVSSDSSDQLRSYATQIKAYTEQIGAHADWELVDVYADEGLTGTRMDKREDFQRLLADCRKGKVDRVLCKSISRFARNTRDCLVALRELSALGVTVYFEKENIDTGTLTSELMVSVSGALAQQESISISQNQRMSYRRRMEKGEFITCYAPYGYDLKGQELVINEEQAAVVRYIFQQYLNGCSVERLAHDLTQMNVPTGFGQSKWWDYPIRYILKNEKYVGDTLCQKFYTTEHLPFINKMNHGEREQYYIENTHPPIVSREVFQKAQALLEKKSAKNVTHIAHILSLKICCGRCGTSYIRRVSLNGFATWVCRKHDRKAVDCSNGRIPETEIYAAFVRMYNKLKENADIILAPALKQLDDLETAMQRENPAMLEINRAIAQVAEQSHNISKLQTAGLLDADACAAKLSSIQTKLTQLRRERRRLLEHDDIEDAISRLHRTADTIKSGPEQLDTFDESLFEELVERIIAESQTCIRFRLWGGVELAEKVRRAKR

SEQ ID NO: 24278 - protein, 429 aa, synthetic construct
MRFAIYSRKSVLTGRGESIENQVELCRSYLAAHYPGVRPEEVAVYEDEGFSGKDFQRPQFRRMLEDIRRARPEALVCYRLDRVSRSVGDFADLIRRLEGWGVAFLCIRERFDTSTPMGKAMMYIASVFAQLERETIAQRVRDNMCLLARTGRWLGGTTPTGFRAERTAEVIVDGRARTACRLVPDPAEWGRAAAIFRLFLARQSLSGLSRALAEEGITARTGRPFSLPGLRELLQNPVYCAADGDAWDYFAALGADLCFPRADCDGRRGLLAYQKRDYSGGRAPRNPVDRWIIALGRHPALVSGATWRAVQELLTPDRAPAVHNRRALLSGLLFCARCGEKLLPKARKGGSYDYICRAKLRRGAAACSCPNLSGAAADQAALDALSAQFPRLAPRLEELAREEQRAACRILLQRADWDGAALAFTLCRL

SEQ ID NO: 24279 - protein, 532 aa, synthetic construct
MNGQTAISGSLALDKVPSVITIPASGPVRTRKLRVAAYARVSSNSEDQLHSFAAQNAYYTELITGNPEWEFVDVYADEGITGTSAEKRDDFQRLLKDCRRGRIDKVLTKSTARFARNTSESLIAVRELRDLEVGVCFEEQGIDTAQMSGELLTAIFSMIAQKESEAISENIRWTYQKKMKKGSFITCKAPFGYRLVKGELEIIEAEAQIIRLIFQRYLNGNSMEDIAKEITRYGIPTRDKTPYWQTTSIQYVLHNEKYAGDSLAQKTYTTRTLPHRKKRNQGEYDQYFVPGSHPAIIDRELFDRAQALLKQKGAVIHPKSGVTYPWTGTVICGQCGSIFKRKKCRESAYWTCRLHDKSPDKCQITQIPESEFERAFLRLYYKLRHHGMPVLSQLLTDLQTAQNRKLLWSLDIVELNKQIADIVRQERLLAELKQQGLVDPDIYITRSNTLAEQLRTAKLEKERFLESEEDQTIRQTQVLLEILETGPEFLEAFDEELFSELVAKIIVENNECLRFRLINGLELTETIERTVR

SEQ ID NO: 24280 - protein, 503 aa, synthetic construct
MNAVYTRQSLDVKDSLSIESQLDACLNENGSAEYQHYNDKGYSGKNTERPAFQQLMADVRKGTIERVIVYRLDRLSRSLLDFAEMIDVFKKKDVEFVSCREKFDTSTPIGNAMLSIIMVFAQLERETIQMRVKDNYATRMERGAYDGVAPYGFGKAIAKVGGKQVHTLDVNEESDIVRSMFNEYAYTGDSLGAIAKRLNAQGIPSPGEAPWDGGKISRILSNPIYVRANADIFAYYNALGMTITNPIEDFIAVNGCITYGGWERSRRKFSQYDRLKLSIGLHPGLVDSDTFLRCQTKLKANRQICNAGKGKHSWLTGMVKCGYCGHSLKVMVDQKGRGIKRFVCSGNTNCGICSQFGSQRVDELEAGVEHELMQMVERRRDIEAKIEMELDTEESRIKIEQAKISEKLNRLIDALAEGEPSSASAVMKKIAELEEKKKLLGVELRSHRAKLPSQQELLQFRDTARLWPHMTIQQKREVAKLLIDKIEVKYGEIQIYWKYNFEA

SEQ ID NO: 24281 - protein, 498 aa, synthetic construct
MTAVIYARYSSDNQREESIEGQIRECTDYAEKNGITVIKHYIDRAFSAKTDNRPEFQQMIKDSGKKLFDVVLVWKFDRFARNRFDSANYKMILKKNGVHLISVMEPIAEGSQGILVETLLEGMAEYYSAELSEKVIRGQTENALKGKCTGGTGTIGYKIDDDKFYHLDPLTAPLVLEAFQRYDNGDKMVEIVNFLNDKGVRNMLGGKMTHSSVNTMLKNRRYIGELSFRDIVVPEAIPVIVPKDLFDRVQKRLDKNKRAPACGKADEEYLLTTKLFCGKCGALMFGESGTSATGRTYYYYKCANVKRRKGCNKKTVQKDWLEDMVVRETMKLIQDDAVIDKIVQLVMDVQNQENTTIPLLEKQLREVNKKLDNLMKAIEDGLYTRTTKERLEALESQKDELTVKIADEKLKKPSFNEDFIRFWLMKFRKFDISQKKQRKALIEIFVNAIFLYDDRMLLTFNYKDGTQTVRLEDTLTADSAEEKSSDLSSSAGRSTNRT

SEQ ID NO: 24282 - protein, 456 aa, synthetic construct
MRNKEIAPVLVRVALYIRVSGEEQKIKGLSLEAQQERLEAYARERGWVIVGIYIDAAKTARKNIHKRTEFQRMMDSVKRDEVDILLFARLDRWFRSVADYYKVMEILQAHNCDWKTTDEEYDTTTANGRLYINVKLSIAQNEADIDGERIDVVFDSKIAHGTVVSGSAPFGFRVNEEKRLEVVPEDAAIVQDAFNYFENTVSQRATVRYVRETYGVNWCDATFRRMLKEKLYTGVYDRGGRYNDQFCPAIISRQQFDRVQALLTRNVRSAPSGKVYIFTSILTCAECGHKLVGYKSSDYYYYRCNQHFQRGRCSHNHSAREDVVEQWLFEHLGEELDRCQLEWDVEAAKKKASVARTDKAALKRKLTKLKELYVNDLIDIEDYKKDYQIYVSALNQIPEPAQEAPPDFAAVRRLLDNSFRTIYDTLTREEKRTLWRSVIKEIRIDNDQNITGVVFG

SEQ ID NO: 24283 - protein, 513 aa, synthetic construct
MQENKQNIRFTALYCRLSSDDELKGDSNSIIHQKQILQDYALKNSLTPTEVYVDDGFTGTNFDRPDFKRLLSDVENDLVKTIIVKDLSRFGRNYLKVGYYTEILFPSKGVRFISVSDNLDTSAKDEINDFIPFKNIMNEWYAKDLSRKQRAVIKSKGNAGKRLSTRPIYGYKKAENGDWIIDEPAAIVVRKIFDLYLKGYGPASIANYLFANKVKIPSLTGLQISDKTRNPYRWSKDSVAHILTCQDYCGDMINFKRSDVDNLVIFPDKQEPIISREIFAEAQKLRLSKKPVRHSYSEPVLFSDFLRCADCKNRMYAQRRYKGSTSYTCSTARKVQGCSSHYINENRLSDCVKSEINKLIANKTKVVEFAKAKMHTDAKTAQCASVKNLKNAQTRISEIDAILKNLYEDKVRGNITLETFKKLENEFLREQANLNQTVINQSRIKVNIDSQSKKICEFLRKLEMYKVPIQELSRNVLIDLIDKIEICEAEKENNKRSQQVHIYYLGIGKIDLE

SEQ ID NO: 24284 - protein, 536 aa, synthetic construct
MPEALNAVIYARYSSDRQTEQSIEGQLRECYAFAKANDIAVIDTYIDRAISGKTDNRPAFQKMIEDSAKRQFQAVIVYRLDRFTRNRYDSAIYKARLKKNGVKVLSAMENLNGSPESIIMESLLEGMAEYYSVELSQKITRGMRENALKGKALGGQRVLGYKVNSDCYFEIDETTAPVVVDIFKLYSSGKTVKEICDILNARGVKTARGGAFNKNSLHTILTNKKYIGIYKTKYGEIVGGIPAIIDKELFEMVALRMEQNKKAPARAKAEINYLLSTKLFCGKCRSAMVGESGTSKTGKKYYYYACVKKKREKACDKSNVKKDWIEDLVIQRTVTDILKDDVIDKIADRLVELQKAEAAESGTMLYLENSLAEIQVSIKNIMTAIEKGIITESTKTRLTELEDEKRNVEIEIAKESIARRIISREQIIYWISSFKDGNITSEKYRQQLIDTFVHAVFVYDDKIVITYNYSGENNTATISDLDLSSPPNQKSEPLSEGTEVRIFLVCSWYCRGMNSKRRMHDPWSIICLYVEQRSTT

SEQ ID NO: 24285 - protein, 521 aa, synthetic construct
MGNVMIIPAKRQVGNISRQQEDKPKLRVAAYCRVSTDSDEQASSYETQVEHYTEYIKKNPEWEFAGIYADDGISGTNTKKREEFNRMIEACKTGEIDMIITKSISRFARNTLDCLKYIRMLKDKNIPVFFEKESINTMDAKGEVLLTIMASLAQQESQSLSQNVKMGLQFRYQNGQVQVNHNHFLGYTKDREGNLVIDPEQAEVVKRIYREYLEGSSMDKIAKGLEKDGILTGAGKKKWWTSTINKILRNEKYIGDALLQKTYTTDFLNKTRVKNNGIVPQYYVENNHEAIIPKDIFLRVQEELVRRRVVKTSANGKKRSYSCNHCFAQIVICGECGEMFRRLHWNNRGVKSIVWRCISRLESTGLECHARTINELVLQDAVVKAINQMLGDKSNYQAQLQLNIAAVIRASQATSVENIDEKLMALQQELIQKAQSKEAYDEIADEIFRLRELRQQTTIDTAARDEQIKRINDLQDYIAQQTTHLTEFDESLVRRWIKQITIWDDHITVELKSGVSIDVDV

SEQ ID NO: 24286 - protein, 519 aa, synthetic construct
MKKVTKIDKIQPAKNAENKLRVAAYCRVSTATDAQLESLEAQKSHYENYINSRDDWCFAGVYYDEGITGTKASKRPELMRLLADCKAKKIDFVITKSISRFSRNTMDCLEIVRTLLNLNIPVYFEKENINTGSMESELFLSVLSTMAEGESASISSNNKWSIKKRFENGTYRLSSAPYGYKLESGGLQVVPEQADIVKRIFRELLSGKGMYSIAKKLNAEQVPTQKGGRWTSTSVHNILTNEKYTGDCIFQKTYADSNFNRHINNGELNRYLIQNHHEAIISHEDFKAAAALIEQRAAEKGIESGSDKYQKRYAFSEKLICGECGNTFRRRIHKGKYNSYVAWVCNTHLSDTNRCSMLFVRDDALKLAFVTMLNKLIFSYRLLLKPYLAAMQSNTADEALLRIQYLEKQLDQNAEQRSTLHKLMAQGYIDQILYTQESNELLLQARDFRSEIEALNNTVAGDTTKVYETERLINYCKRGEMLTDFNESLFELFVDHILIYSRQKIGFVLRCGLTFEEMI

SEQ ID NO: 24287 - protein, 516 aa, synthetic construct
MKAVIYARFSSHNQREESIEGQVRACQRFAKEHDMTVIEIYADRGLSGLHADNRPEFQRMIADSDRHKFQALIMWNLDRFSRDKYDTAVYKSRLKKNGVTLYYSDQNIPDTPEGIILESLLEGFAQYYSANLSRNAKRGLQENARKCLWNGGGLPLGYTIDETKHFVIDPAGATCVRLIFQMYADNHSIKEIVSTLNEKGYRTVKGNKFRLGSIQGVLRNRKYIGEYHASGITVPNGVPAIVDVELFNAVQEKIGVVSTAKARNKAEIPYLLTTKVFCGHCGSPMIGESGTGKGGSTYRYYKCSCRKNRKGQCDKRTEQKEWLEETVVAQTVEKFLHPNVIEDVSNACAAVLEQDCQNNALLKALNAQLADVEKSSRNLIKAIEAGVFTASMRERLAELEQQKEDITVQIAREQLRKPQLSAEQIAFFLRSFLDGDAHDPNFQERIIESLVRRVDVYDEGSGNRKLTVFYNLKKNNHSSVSVKCSDSESVGLPKGRLQKQPIFLFASCRRTRIGRQ

SEQ ID NO: 24288 - protein, 541 aa, synthetic construct
MKPKSTYHAALYMRLSRDDDGATESASISTQRKMLRSYAAEHGFVVYEEYVDDGWSGTNFDRPGFQRMIADIEAQKVNLVLTKDLSRLGRDYITAGQYTEIYFPSKGVRYIAINDGYDSDGAYADIVPFKNILNEMYARDTSRKIRSALETKMREGAYIAAFAPYGYQKDPLDKNHLVVDAVSGGVVREIFSMAANGALPVEIARTLNARAVPPPAVYRCMTHDGLDVNRYSRRKEWTSTAVSKMLRNPVYLGHMAQGKTTKVSFKSRMMVNNPRDEWFVVQHTHEALVDEETFDLVRRRTAARTCSKNGTFYNMFSGIAKCADCGRNMSATGTRKKGSPANLTCGGYKLYGSGECSNHFIDYNVLYEIVQKSLEEQLCLSREERSAIVDHVQNRRQKQERKADEASALVAFKKRLQELEHIIGKLYEDNAAGRLSSVRMEALVSKYEREAEALEARVAALEQQTDESGTSDRESREKLDEMLRQITEIKELTPGLLFRLIDHIEIGQGYYEQGEHGRVKHQTVKIFYRFQTEATVKTYTL

SEQ ID NO: 24289 - protein, 480 aa, synthetic construct
MTQKKVEVIPATKRSVHNGGQLKVQSNIRVAAYCRVSTGDESQQTSYTTQKAFYTNLITNKPGWRFAGIYADEAKSGTSREHREDFNRMMADALDGKLDYIVTKSISRFARNTVDTLNCVRQLRQQNPPVGVYFEKENIDTLDATGELILTILSALAQDESRSISDNIRWSIQKNFQAGKPKVDLNRMLGYDKGANGEWVINPEQAKTVRYIFERYVCGQTANRIAKELNELGRKTVNKKNWSASSVLTVLRNEKYVGDIEMQKTITKDFLTHRSTINKGEAPRYYVENHHVGIIDRSTWDKAQTMLYEKPSKVGDSVSAQKKKRGYTGSPFGNLVCGAVLEHGERAGKECGEGFFRVTYTGVATGYTDDRSIAATGGDTDIYLEKYAYAYPVWRCKQKMGKREGEKPRQNGTPDQKRYCREKHGRLSDAERKAANERCPSESIHECALEQSFMEMSVFPLTMMSRFLPMSFRKITILST

SEQ ID NO: 24290 - protein, 501 aa, synthetic construct
MEIQIREGSREQKRKLKVCAYCRVSTDADEQENSLENQVRHYETVIKANPDYEYAGVYSDFAISGFKEKRPGLQKMLADAEKGKIDLILTKSVSRFARNTSIVLEATRKLKELNVGVFFELQNINTLSGEGELMLTILAAFAQAESESGSASAKMVYQRKYEAGIPVQYLERSFGYTKDERGVFVADEAESVWVRKIYEMAADGYTPASIKRYLNENGVKTVGGVQWVDSTVFRLLENEIYKGDYIMHKHFVNEERKLVRNRGEVDAWYIEDDHEAIVSPELWQKAQDALAVKMDYLAEGSVIEEFTEENYPYMNKIYCAKCGYPLYKRIYSKGNRLNWGCSGTKRYGKSFCDGINIPDGVLRSAWYFEENTYIDEKASDKGVKEFTYLKERSWKRRHKKKQPSAIPENTETEYPYREKIFCALCGSRLVRYVNPQNHKVTWVCNRRKRKGKEACDGTRVPDTVIKGWGEIKNDIYIQRKDDKNGKKRYSYTSKKPSGIRV

SEQ ID NO: 24291 - protein, 463 aa, synthetic construct
MARSVTVIPARNRQVSGYRAAPQKKIRVAAYCRVSTDQEDQLHSFEAQVDYYTKYINDHENYEMAGIYADEGISGTNTKKREQFKRMIADCEKGKINLVITKSISRFARNTQDCLMYSRKLKNLGIGIIFEKENINTLDSTGELLFTILSSLAQDESRNISENCKWGIRTKFKNGEMHLNTFKFLGYDKDENGKLIINREQAKTVRRIYRDFLWGLNPAQIAKELEDEQVPGCLGQTKWYASTVIGILKQEKHMGDALLQKTYTADFLTKRQVKNNGEVAQVYVKDSHKGIIDKETWNAVQEEFERREKFMQKHGTDRYSYGSECYPFCEKIFCGECGSLFTRHSWKSRGIIQWQCKNHRKDGKVACTNAYVDNADLEKGFVKAFNRLVGEREKHIERWNSMKLDGTPLEKIRAGQMMEATESGQLQQYVPEAAQLVLEEITIFGAKKYEFAFLEGSRVKVSV

SEQ ID NO: 24292 - protein, 543 aa, synthetic construct
MEVTKVPKKIVTVIEPKRSMTVDKEKYRQKKVAAYCRVSTDSEEQLVSYANQKKVYTEMIASRKDWCFAGLFADEGKSGTRADKRPEFNKMINDCLAGKIDYIITKSVSRFARNTVDCLDYVRMLKSKGIGVYFEEQQIDTLKTDSELYLVIYAGFAQSESESISKNITWSVRKKFEEGTPVFMYKRFLGYRKGADGEPEIVPSEAVIVERIFNLYLAGETVDKISKMMQAENYDVPGKAISFSKGMIMNMLSNERYCGDVILQKSVTVDCIEKKRKKNTGEAPMYYVQNNHPAIIDRVTFNKVQEELARRKTKTPGSAKSSITSTGKYSRYALTDVLICGNCGTCYRRVTWSRNGTKRIVWRCISRLDYGKKYCSDSPTIMEDKLQEAIVRAVNKFNEQDNATYKALMRATISEALGLNGDPEEVDMLERKIEALNNKMLALVNESVSSGDGIEAHESEFMTLSQETELLKQRIAAIQESTAKDNGEQNRLEQIQAIISERESKCMEYDDSIVRQMVECIKVYPGGKLEIIFGGGYLVEESV

SEQ ID NO: 24293 - protein, 513 aa, synthetic construct
MPEVRLITPITRQSTKKMQVAAYCRVSSNSADQLNSYAAQIRAYKKYIGARDDWELVDIFADEGLTGMKSETRDEFQRMIRMCEFKHIDLIITKSISRFARNTKDALAYVRKLKLLGVGVQFEKEGISTLSMGDEMLLNTFSALAQEESQSISMNQRLSIVKRMELGEYVDSNAPYGYRLVDKMLTVYEPEAGIVRNIFALYLQGFSTSEIARELNKLNIPTKAGKEIWRPSRVAYILKNERYIGDSFYQKTYRETTVPFNQHPNRGQEDRFYAKGTHPGIVEKDVFDAAQTLIEKRKDVFAKATTQNIYPLTSRIQCSECGSFYRRRIVSGTVKWVCSLHKDDSTACDSNYYSEERIYDGFISMVNKLRFSEDNILGQVISRLEMTLAAMKRNNLAARDLSKSIAELNAKLLMLEQLRSKGYLAPEVYQAQANEIGAELAKLKDVRQEKFNSKAAIMLEEVKKLKMLIFELEEPLEAFDEKLFLEIVKSIQINKEDEMSVELLGGLRFRERI

SEQ ID NO: 24294 - protein, 501 aa, synthetic construct
MEIQIREGSREQKRKLKVCAYCRVSTDADEQENSLENQVRHYETVIKANPDYEYAGVYSDFAISGFKEKRPGLQKMLADAEKGKIDLILTKSVSRFARNTSIVLEATRKLKELNVGVFFELQNINTLSGEGELMLTILAAFAQAESESGSASAKMVYQRKYEAGIPVQYLERSFGYTKDERGVFVADEAESVWVRKIYEMAADGYTPASIKRYLNENGVKTVGGVQWVDSTVFRLLENEIYKGDYIMHKHFVNEERKLVRNRGEVDAWYIEDDHEAIVSPELWQKAQDALAVKRDYLAEGSVIEEFTEENYPYMNKIYCAKCGYPLYKRIYSKGNRLNWGCSGTKRYGKSFCDGINIPDGVLRSAWYFEENTYIDEKASDKGVKEFTYLKERSWKRRHKKKQPSAIPENTETEYPYREKIFCALCGSRLVRYVNPQNHKVTWVCNRRKRKGKEACDGTRVPDTVIKGWGEIKNDIYIQRKDDKNGKKRYSYTSKKPSGIRV

SEQ ID NO: 24295 - protein, 530 aa, synthetic construct
MEQYLIYLRKSRSDLEAEAHGEGETLSRHEHTLLELAKRQHLNVTDIYREVVSGDTIAARPMMQRVLSEVEQGVWSGVLVMEVERLARGDTIDQGIIAQTFKFSGTKIITPIKTYDPDNEFDEEYFEFGLFMSRREYKIINRRLQRGRLASAKEGKWPSGLAPFGYRRVKLKNEKGCSLEPIEEQAAIVRMIFDLYTVGLQDEDGSARPLSLGSIATRLNDMHIPSPSGSQWARITIRGIIKNPTYIGMVRWGSRETKKKVVDGKVVSVRGSADPEKECVFKGIHPPLVPKETFELANDKLARSENTSTHKEKVVRNPLAGLLVCSECGRQMMRMINPVHPDMPVVRCPRRGCPNCSSYLPIVEERVIQGLSEWMKGYELEWSSAAASSSVSSVGVREKALASAEAELRKLQQQLERTHDFLEQGIYDTDTFLSRSRMLSDKIAAAKDSVTRCSRELTEEKLRETSRRDIIPKVKNLLDVYPLLETAEEKNALLKEVLEKVVYQKLNEKRKKSPDGFTIEIYPRIPKSEK

SEQ ID NO: 24296 - protein, 544 aa, synthetic construct
MAVSRIFFSLCQGKEGERYQRKHLLLLAFRVIYRLPKRKEVRLVEIQIREGSREQKRKLKVCAYCRVSTDADEQENSLENQVRHYETVIKANPDYEYAGVYSDFAISGFKEKRPGLQKMLADAEKGKIDLILTKSVSRFARNTSIVLEATRKLKELNVGVFFELQNINTLSGEGELMLTILAAFAQAESESGSTGAKMVYQRKYEAGIPVQYLERSFGYTKDERGIFVADEAEAVWVRKIYEMAADGYTPAAIKRYLNENGVKTVGGAEWIDSTVFRLIENEIYKGDYIMHKHFVNEERKLVRNRGEVDAWYIEDDHEAIVSPELWQRAQDALEAKRDYLAECSVIEEFTEENYPYMNKIYCSKCGYPLYKRIYSKGNRLNWGCSGMKRYGKSFCDGINIPDGVLRSAWHFEENTYIDEKASDKGVKEFSYLKERSWKRRHKKKQPPSIPENTEAEYPYREKIYCALCGSRLVRHVDTKSNKVTWVCNGRKRKGKDFCDGTRIPDTILKGWGEIKKDIYIQRKDDKNGKKRYSYTSKKPSGIGA

SEQ ID NO: 24297 - protein, 463 aa, synthetic construct
MARSVTVIPARNRQASGHRAAPQKKIRVAAYCRVSTDQEDQLHSFEAQVDYYTKYINDHENYEMAGIYADEGISGTNTKKREQFKRMIADCEKEKIDLVITKSISRFARNTQDCLMYSRKLKNLGIGIIFEKENINTLDSTGELLFTILSSLAQDESRNISENCKWGIRTKFKNGEMHLNTFKFLGYDKDENGKLIINREQAKTVRRIYRDFLWGLNPAQIAKELEEEQVPGCLGQTKWYASTVVGILKQEKHMGDALLQKTYTADFLTKRQVKNNGEVAQVYVKDSHKGIIDKETWNAVQEEFERREKFMQRHGTDRYSYGSECNPFCEKIFCGECGSLFTRHSWKSRGIIQWQCKNHRKDGKVACTNAYVDNADLEKGFVKAFNRLVSERKKNMERWNAMKSDGTPLEKIRAVQMMEATESGQLQKYVPEAAQLVLEEIIIFGAKKYEFAFLEGSKVKVSV

SEQ ID NO: 24298 - protein, 510 aa, synthetic construct
MSSVDKIAVVYARYSSHGQTEQSIEGQIAAAQKYAEQHGYTIIHIYADRAMTGRNDDREEFQRMLSDTATHQFGVILLWKIDRFGRNREEIAFNRYRCKKNGVRVERVAEDVPDGPEGVILDSVLEGMAEYYSLQLAQNVRRGQRESAKKSQTVGGCKIIGYNVNPDTKRYEVDPKTAPFVTEVFKRYANGETISEIVAWLNARGVRTTRGGEFTVNSLHRLLKNEKYTGVYIFHDIRNEGGMPALIDHATFDKVQEMLKVNRRAPARVWSKTEYLLTDKLFCGHCGSMMVGESGHGRNGTKHNYYTCWNRKKKKLCDKKPVRQDVIEPLVLKSIGKLLENPATLESIANQVWAAYERSDTSGDTIKALDKQIADVNKALSNVMKAIEMGIINEMTKTRMDELTDQKQALSAARAEAGLAGGFKLTRDMILFFLQEIAALDMADRDSQKRLIKTFVNAIYLYDDHFDIAFNYTDNGKVVVRMQEINDAACGEVFGRCAQSPAKSCLSRLR

SEQ ID NO: 24299 - protein, 501 aa, synthetic construct
MEIQIREGSREQKRKLKVCAYCRVSTDADEQENSLENQVRHYETVIKANPDYEYAGVYSDFAISGFKEKRPGLQKMLADAEKGKIDLILTKSVSRFARNTSIVLEATRKLKELNVGVFFELQNINTLSGEGELMLTILAAFAQAESESGSTGAKMVYQRKYEAGIPVQYLERSFGYTKDERGIFVADEAEAVWVRKIYEMAADGYTPAAIKRYLNENGVKTVGGAEWIDSTVFRLIENEIYKGDYIMHKHFVNEERKLVRNRGEVDAWYIEDDHEAIVSPELWQRAQDALEAKRDYLAECSVIEEFTEENYPYMNKIYCSKCGYPLYKRIYSKGNRLNWGCSGMKRYGKSFCDGINIPDGVLRSAWHFEENTYIDEKASDKGVKEFSYLKERSWKRRHKKKQPPSIPENTEAEYPYREKIYCALCGSRLVRHVDTKSNKVTWVCNGRKRKGKDFCDGTRIPDTILKGWGEIKKDIYIQRKDDKNGKKRYSYTSKKPSGIGA

SEQ ID NO: 24300 - protein, 463 aa, synthetic construct
MSFFTPNPQLFGLRVVKYIRCSHDDQVLHGDTLEAQDLILEDFIKVNRMILVDTFIDEALTARKKFNKRKEFVRLLDGVKAHAFDLIIFTKLDRWFRNIGDYHKIQEILEANGVQWKAVTENYDTTTTNGRLHINIRLSVAQDECDRDSDRIKDVFAYKLKNKTYVSGSLPRGLKLDAEKHVIIDPEWNCFALDMFDRFEATCSKRDTQLFLQDKYNIRVCYDTVARYLKNPLFKGQYRDDPDFCPATISPERFERIQKLAIRNVRIRHTQQFYIFSGLLICSSCNHYMCGTVTYRRMADGSEKMYKNYRCNFKAQSKLCDRGKTYREADLEEYMLAHIRPALSDYIAKYEVTAASTVQKNPVTEIAKIERKMKKLYDLFMDDLIDKEAYRSEYDKFKAQIEELQKCSTAAPMRSLDSVKKLLSEDWEAVYHTFSDQEKNTFWKSFVESVLVYEDGSMDIRFL

SEQ ID NO: 24301 - protein, 513 aa, synthetic construct
MPEALNAVIYARYSSDRQTEQSIEGQLRECYAFAKANDIAVIDTYIDRAISGKTDNRPAFQKMIEDSAKRQFQAVIVYRLDRFTRNRYDSAIYKARLKKNGVKVLSAMENLNGSPESIIMESLLEGMAEYYSVELSQKITRGMRENALKGKALGGQRVLGYKVNSDCYFEIDETTAPVVVDIFKLYSSGKTVKEICDILNARGVKTARGGAFNKNSLHTILTNKKYIGIYKTKYGEIVGGIPAIIDKELFEMVALRMEQNKKAPARAKAEINYLLSTKLFCGKCRSAMVGESGTSKTGKKYYYYACVKKKREKACDKSNVKKDWIEDLVIQRTVTDILKDDVIDKIADRLVELQKAEAAESGTMLYLENSLAEIQVSIKNIMTAIEKGIITESTKTRLTELEDEKRNVEIEIAKESIARRIISREQIIYWISSFKDGNITSEKYRQQLIDTFVHAVFVYDDKIVITYNYSGENNTATISDLDLSSPPKQYNPNLLPIGHGFGFIVLMEEIEDW

SEQ ID NO: 24302 - protein, 528 aa, synthetic construct
MSTAAVRSVTIIPPTINILTHLSTATTQKRRVAGYARVSTDSDEQFTSYEAQIDYYTQYIRCNPEWEFVKVYADEGISGTSTKHRTGFNEMIDDAMSGKIDLIVTKSVSRFARNTVDGLVTIRKLKEKGVEVYFEKENIYTFDSKGELLLTIMSSLAQEESRSISENVTWGQRKRFADGKVNLPYKQFLGYRKGADGLPEIVPEEAAIVRRIYARFMEGLTPHTIAKELTTDGIPTPSGKTNWPTSTVESILQNEKYKGAALLQKCFTVDFLTKKKKLNEGEVPQYYVEHSHEPIITPEEFDKVQTELARRKRISRQYSGKSIFSSRIVCGDCGSYFGSKVWNSTSKYRRVIWQCNCKFKGEHKCETPHLDEKTIKAQFVAALNAIIDSKDNILEDCRLVQATLTDCTGVDAEIDSLLTEVDVVTELTRRCISENAQSSQNQQEYTARYNGLAERYEKVKAQLEQLRATKTAREAQADAIGAFMFEVQELDVLTEFDEKLWLAVIDKVTVHTNGRMTFRFRSGTEIDV

SEQ ID NO: 24303 - protein, 504 aa, synthetic construct
MQKYLMYLRKSRADGEHETIEEILARHEKILQEYAEKNIRKAVPEENIFREIVSGETIKDRPLMNKLLKCIQNEQITGVLVIEPQRLSRGDLHDCGTIIRAFQYTNTLVYTPTKTYDLSEKYDRKFFEMELMRGNDYLEYVKEILMRGRLASVSDGNYIGSIPPFGYSKEKIDKNYVLVENDESNVVRLIFDLFVNQNMGTSKIANHLNSIGIKPRKNNYWSDSTIRDILRNPVYIGKIRWNWRKTVKTYKDGEIVCSRPKSTPDSWIIIDGKHNGLISEEVFNAAQKRFGQNPRVKKEYEIVNPFAGLVKCECGKSMVYKKFNKSSPRIICPNQPRCENRSVLYSEFESEVIIALKKYINDFKIKISNGDNQSESIQNGILESLIKELKTIENQQDKLYELLEQGIYTNAIFIKRNTALAEKRKKITSEIENLKTSIPNSINYEEKIVQLSNALNTLQNPDIHPKIKNEFLKVIINNIYYTRKNDNRTRNDDSPFTIKIILNL

SEQ ID NO: 24304 - protein, 567 aa, synthetic construct
MSIDKYETLNQERKIQNMKKKVAAYCRVSTDNDDQANSFESQQRYFRQYIERNPDWELYAIFADEGISGTNTKKRKEFNRMIACAKNGDFDLIITKEISRFARNTLDSIFYTRDLKKHGVGVIFLNDNINTLDGDAELRLAIMSSIAQEESRKTSERVKWGQKRQMEQGVVFGRSMLGYDVKDGKMTINEDGAKIVRLIFRKFVDEGKGTHVIARELREEGINPMRVKEWSNTVILRVIRNEKYCGDLVQKKTYTPDFLSHEKKYNRGQEEFVILKDHHEPIISRELFDKANRILDAKSLSQEGKAKHSNRYPFSGKIKCGRCGASYVARYKTRKDGSQYKAWRCFESAKHGSPHIDKAGNQVGCSGTSIRNEEAIHIMYLVCKQLTIDRQKIADNLIKTINKVISLDMTGADTNTLEDKIEATQKKRTDLIDLYTSGDIDRDEFTALRAKYDAEIDSLKSMVESMEKQQVVIAKQKELMEDIKNAVDELIGGIEYEDEFYTQLLDKMVINDRENIDVYLNLLPLKWSYTVATASKKALASERNISEASLPREASEMFQIKANFAAL

SEQ ID NO: 24305 - protein, 485 aa, synthetic construct
MPTSDLKNAAAYIRVSTDDQEEYSPDSQVRLIREYARKNGYLLPEEYVFQDDGISAATARKRPAFNRMIALAKEKERPFDAILVLMFSRFARNREESVLYKGLLRKQGISVISVKEPAVDGPFGTLIESIIEWFDEYYLINLSAEVKRGMSEKFLRGEAMGTAPFGYRIDSANKTFTVDPERAEIVCDVFRSYADGAGLRDIAVQLGDAGITTRRGNRPDSRFVEYMLRNPVYIGKIRWTPGHKTRYSRVHIADGVEVVDGKHPPIVSMDLWEAVQRRMDQRKAAYGRYQRQAPAAWMMRGLVRCSACGATLIMAGRSSSCPFLQCHSYAKGACHTSHSLSLRRANAAVLTGLRRSVGTLTFHMVPHLTSAPSRAADYGRLLEQERRRLVRCKDAYQAGVDTLEEYRDNKARLEERIRRIEEQAASAAAAPESLDKAAYGKKTADILRFLETSADEGAKNEVLRSVVDHITYEKASRHLAIYFYT

SEQ ID NO: 24306 - protein, 538 aa, synthetic construct
MLRQATQNLITALYPRLSHEDELQGESNSISNQKRILETFAKQNGFTNLRWYTDDGYSGANFQRPGFQAMLADIEAGKVGTVIVKDMSRLGRNYLQVGFYTEMLFPQKGVRFIAVNDNVDSASEGMDNDFTPLRNLFNEWLVRDTSKKIKAVKKSKGMSGKPVTSKPVYGYVMDEDENFIIDEEAAPVVQQIYQLCLAGNGPTKIARMLTEQQIPTPGTLEYQRTGSTRRYHPGYECKWATNTVVHILENREYTGCLVNFKTEKPSYKVKHSIENPVEKQAIFENHHEPIIDKETWERVQELRKQRKRPNRYDEVGLFSGILFCADCGHVLYQQRYQNKDRKQDCYICGSYKKRTRNCTAHFIRTDLLTAGVLANLRQVTEYAAKHESRFVKLLVQQNEIGGKRKTAAAIKQLEQAQERISEISRIIKRLYEDNVNGKISDERFMELSADYEAEQAELKKRAAALQAELDKSQAATVNAEKFMGIVRKHLAFEELTPTLLREMIEKIVVHECSYDENGTRRQDIEIYYSFVGKIDLPE

SEQ ID NO: 24307 - protein, 518 aa, synthetic construct
MSIMSFNNIIIYLRKSRADDPTMTVEEVLAKHESILQDYCIAEFDQPMPESRIYREVVSGETIQDRPVMQRVLRLLESGNIDGVLVVEPQRLSRGDLEDCGHIINSFRYTNTAVITPTKTYNLQDEYDRKFFEMELTRGNDYLEYTKKILARGRLAAVMSGQYIGSVRPYGYNKVVYGSGKNRIRTLDKFKKENDILVLMKRLYLDNDYTPEEIARTFDSMGIEPPKGKHWTASAVRRLLASPINNGKIVWNKRQTVVEWKNGKQVKSRAKSNKDDVIIVQGKHPATYDDETYAAIMAKLSIHSVKVTNQRGLRNPFAGILFCQCGRAMSLRSTHNGHSVILICNDHFYCHTRSVAFNPVLEKVKRALSEAITDFTVKISNKEQTESELYALNISTLENKLEQLYKKDLVQKDAYEDGVYSKAEYIQRNTQLQEQISVIANSLKEAKAKAPEVINYKDCIIRFQDCLNALEDNNVSIEVKNALLKACISKIVYHSVNSNPEYSGRTKNPFNLEVFFKL

SEQ ID NO: 24308 - protein, 527 aa, synthetic construct
MAKRKVTTIPATINKFTAKPVDSKKKRKVAGYARVSTGHEDQQTSYEAQVDYYTNYIKGRDDWEFAGLYSDEGISATNTKHRDGFNQMIADALAGKIDLIITKSVSRFARNTVDSLSTIRKLKEHNIECYFEKENIWTFDSKGELLLTIMSSLAQEESRSISENVTWGHRKRFADGKVSFAYSRFLGYEKGPDGTIVVVPEQAKTVKLIYKLFLDGMTMHTIAGELTKRGIKTPGGKDKWNQSTVRSILTNEKYKGDALLQKSYTVDFLTKKTKTNEGEVPQYYVENNHEAIINPQIFELVQAEVAKRNKGKERYSGVSIFSTKVQCAECGGWYGSKVWHSNDKYRRIIYQCNNKFRNKTGCSTPHLAEYEIKEYFIKAMNRLITEKNEIIANTEMIRKMLCDNSELEAKRDALQEEIAVTVELTQNAVAENARVAQDQDDYNKRYNALVERYDRLKAQYDEVSTAISDNEARYEQMGRFITVLKDQTGIITEFDDALWSSLVEKIVVKSKEDVTVVFKDGTEIKAK

SEQ ID NO: 24309 - protein, 592 aa, synthetic construct
MRKISKIEPTMPAVAAKKKVAGYARISMESERMHHSLSAQISYYNALIQKKPEWEFAGVYADDGISGTGTAKRSEFLRMIADCEAGKIDIILTKSIQRFARNTVDLLQTVRHLKDIGVEVRFEKENINSMSGDGELMLSILASFAQEESRSISENVKWGTRKRFEQGIPNGRFQIYGYRWEGDHLVVEPEEAKNVKMIFDDFLNGLSAESTEKKLEQMGVKSHKGQHFSSTSIRQILSNVTYTGNLLFQKEYVSDPITGKSKINRGELPQYWVENTHEAIIPLETYRAVQEERKRRRELGVFANWSINTSCFTSKIKCGNCGVSYRRSGKRQRKDKNEVYYVWVCRTYDRKGKAACSSKTIPEIKLKAVCAEMLGLKEFDETVFSEKVEQITVIGDDTLEFHFTDGTMRQKKWSSTAKTDWWTAERRKEWGERHKNKSTNPNRVRYKAFTGFIKCGNCGENYRSQETTYVDGTKNRYWRCCKACGNTGIKQSTMETLVSEVLGLDTFSEERMDVQIEKAVIKDGMVTFHFKDGHTECQSYEEKKRGVPHTEEYKQHMRQLMKERWTPEVKQQMSESMKNLRKERGKAWQKEK

SEQ ID NO: 24310 - protein, 538 aa, synthetic construct
MKKAVLYARVSSKRQEEEGFSIPAQIKFLKEYALKNNIEVVEEFVEAKTAKKAGREQFNEMLSYLQEHEDERIILVEKVDRLYRNLLDYAIVDTIKGLEIHFVKENEILSDNSRSSIKFINGIRVLMAKQYVENLAEESEKGLNERIEQGYALYPPLGYMYGNDGTHKHAIIKDPERAEYAVRAFNLFVHENLSASSINNILYEEGLRNPKGNKYAVSTIQRMFRNPMYVGDYIYQGKLYPNGKHEPLISRKLFQLAQEKLNNANDTTRQHDLEFPYIGLFKCGVCGCSYTAERKVKTSGKEYIYYHCTGKGKVKTCKKTSYINESKIDKFIAEILKGLENIPQSLIREIKESLREIHELKNNYSNTTQDNIYKRIKEIDRMIQNGYKRMLKSNNDMENELWNATYAELRAEKEQLMDKLSCISKADDEFYKQSDLILKFCKNASQIFMKATPSEKRTICEIIGSNFTANAKKIDITLYPLFYDVIEMNRLGRSQNGRFELSQTQSGTKKEPLVKALKLNGGNDEARTRDLMRDRHAL

SEQ ID NO: 24311 - protein, 519 aa, synthetic construct
MKKVTKIDKIQPAKNAEDKLRVAVYCRVSTATDAQLESLEAQKNHYENYINSRDDWCFAGVYYDEGITGTKASKRPELMRLLADCKAKKIDFVITKSISRFSRNTMDCLEIVRTLLNLNIPVYFEKENINTGSMESELFLSVLSTMAEGESASISSNNRWSIKKRFENGTYRLSSAPYGYKLESGGLQVVPEQADIVKRIFRELLSGKGMYSIAKKLNAEQVPTQKGGRWTSTSVHNILTNEKYTGDRIFQKTYADSNFNRHINNGELNRYLIQNHHEAIISHEDFKAAAALIEQRAAEKGIESGSDKYQKRYAFSEKLICGECGNTFRRRIHKGKYNSYVAWVCNTHLFDTNRCSMLFVRDDALKLAFATMLNKLIFSYRLLLKPYLAAMQSNTADEALLRIQYLENQLDQNAEQRSTLHKLMAQGYIDQILYTQESNELLLQARDFRSEIEVLNNMVAGDTTKVYETERLINYCKRGEMLTGFNESLFELFVDHILIYSRQKIGFVLRCGLTFEEMI

SEQ ID NO: 24312 - protein, 521 aa, synthetic construct
MGNVMIIPAKRQVGNTSRQQEDKPKLRVAAYCRVSTDSDEQATSYETQVEHYTEYIKKNPEWEFAGIYADDGISGTNTKKREEFNRMIEACKTGEIDMIITKSISRFARNTLDCLKYIRMLKDKNIPVFFEKESINTMDAKGEVLLTIMASLAQQESQSLSQNVKMGLQFRYQNGQVQVNHNHFLGYTKDREGNLVIDPEQAEVVKRIYREYLEGSSMDKIAKGLEKDGILTGAGKKKWWTSTINKILRNEKYIGDALLQKTYTTDFLNKTRVKNNGIVPQYYVENNHEAIIPKDIFLRVQEELVRRRVVKTSANGKKRSYSCNHCFAQLVICGECGEMFRRIHWNNRGCKSIVWRCLSRLEATGMECHARTVNETVLENVVVQAINTLLGDKSTYQAQLQQNIAKVIREAQKNTTDGIDEQLMELQKELLKKANNKEAYDEIAKQIFKLREQRQQCTVDTAARDAQIARITDLQDFIKQQRTDLAEFDETLVKRWLKQITVWEDHFTVELKSGLNIDIEG

SEQ ID NO: 24313 - protein, 556 aa, synthetic construct
MNRYGKRCVLYPRVSTEMQVDGYSLEGQKNMLTRFADREEMIVVDTYEDAGKSGKSIEGRPAFQKMLRDIEDGLDIDYILVYKLSRFGRNAADILNSLELVQSYGVNLICIEEGIDSSQTSGKLLISVLSAVAEIERENIIEQTMNGRREKARQGGWNGGFAPYGYTLEDNKLMIEETEAVAIRKIFELYTSSEIGLGGIANQLNLQGIRKIPRQNGTLEDWTGHFIKLILDNPVYCGKIAYGRRTKEKVKGTKNDYQMKRNDDYILTEGQHKGIVSEEVWEKAHAKRLRTGVKQPSKIGRDRVHLLSGLLKCPVCGSPMYTNKHAWTNKDGTYKEIYYYVCSRNRMVRGKHCEYKAMLKKTDIEPMVIEAIREIVRNEEYAQAIKKRIGVQIDTKAVDKELEGYQAKLKEVDLNKTRLEREIDSLPADAKYRERKLHDMTLRLDSLYDVIVELEEKIEDARFRRDAIKQQAITLENIYKIMVNFDCVYNIINDEEKRNVVTALIKEIEIYRNDESEYPLKRIGLNFPVFKDGGEVTELLWDKGNTVETVVLMSRK

SEQ ID NO: 24314 - protein, 541 aa, synthetic construct
MDNLITTEEKITALYCRLSQEDEKEGDSNSIENQKAMLTKYAIENGFRNIEVFVDDGYSGVFFDRPAFQKILNLIEENKVDTLITKDLSRLGRNYISVGNYIEMEFPHRDVRYIAVNDNYDSQDINSSSNELAPFKNLFNEWFARDTSKKIRAVIKSKAERGERIGSHIPYGYKKDPDRKGHLIINEETAKNVKLIFQLCATGMGPRNIAKILAEKKIPRPSVYRYENDGVIIQKTDITDRYSWATKTIVGMLENEVYLGHTVNCKTTTLSYKDRKKKVVPIENQFRFKNTHEAIIDKETWDIVQKVREGRKRITKSGNINKYSGLLYCADCGARLTYNSGNKPKPKSYYFMCSSYRRHKDGDCILPHRIREIVLDEIVREEINQAIYYAVNEKNKFVECISKRSLSESRKKLSQKITELDKLNNRKNELNVIFRKLYEDNALGKIPDDQYRLLSDSYTAELHELKAKIPELQNQINEIKTEESNVDRFIALANKYIYIEELTPEILRTFVSKITIHENDKDNPGAKYEIDIFLTHIGKFW

SEQ ID NO: 24315 - protein, 522 aa, synthetic construct
MGNVMVIPARRQVGNTVKQSAQKKLRVAAYCRVSTDSEEQETSYEAQVTHYTEYIQKNPEWELAGIFADDGISGTNTKKRDEFNRMIDECMAGNVDMVITKSISRFARNTLDCLQYIRQLKDKNIPVYFEKEAINTLDAKGEVLITIMASLAQQESQSMSQNIKLGLQYRYQQGKVQVNHNRFLGYTKDENGHLIIDPEQAEIVKRIYREYLEGSSMDKIADGLMADGILTGAGKTKWHTSTINKILRNEKYMGDALLQKTYTTDFLTKKRIKNNGTVPQYYVEGDHEAIIPKELFMQVQAELVRRRVVHVSPTGKKRSFSCNHCFAQMVFCGDCGELYRRVHWNNHGCKSIVWRCISRLEPTSAEKNCTNRTVNELLLQEVTIKAFNQILTERDVFLKTLQQNIAKAVVNADTLSPDGIQSRLLELQKELIKKANNKQDYDAIADEIFRLRDQKEQSEVDSHHREEAMNRIKELQDFISGQETDITGFDETLVKKLIEKITVFADHFTVEFKSGITIDIEA

SEQ ID NO: 24316 - protein, 557 aa, synthetic construct
MNRQSDKITALYCRLSRDDELQGESNSIINQKSIVEKYAKENGFKNTKFFVDDGYSGVSFTRPAFMELMELAEAGKIETIIVKDHSRLGRNRLVVGQLLEEDFVRLGVRYIAIMDNIDTKDGLSDFLPVQDWFNEMHAKNTSKKVRAVFQNKGMSGKPLTTVIPYGYKKNETNHDEWLVDEEAAEIVRKIFRLCVEGYGPTQIANILFSEGIPTPTEYWQSQGRKTSALPAVPHKWAARTVADILERQEYIGDTVNFRSTTRSFKDKTKIERPKEEWKVFENTHEAIIDRETWELVQTLRANKRRPNRTGEVSMFSGLLYCGDCGEKLYYSVTNNYSREQAYFFCSSYRKNTANCTAHYIREKVVYALVLESLRRVLFYVQAFEKQFIQEQLEKSSEEQKKELAKKRRELAKSEKRIEELDVLFQRIYEDNISGKLTDERFAIMSASYEAEQKSLKETVAMLRNEIEAQDDKTANVLAFVEKVKRYTEIKELIPAIVNEFIDYIMVSKKQVIDGKTVYPIDIYYNGVGIITAPSAEEYEEMFQERLKQKRAKEQKTA

SEQ ID NO: 24317 - protein, 421 aa, synthetic construct
MKLRKIEPLKPKQKKLRVCAYARVSTDSLKQGESFENQVSTYERVIKSNPEYEFVSVYADQGMTGRSENRPEFQRMIADCKAGKIDLIITKSISRFARNTTTVLKYTRELKEIGVGVLFEENNINTLSSEGELMMTVLASFAQEESRSISENNKWTLKKKFERGEGMVNTARFMGYDKDETGDLVINKEEAKVVRLIFKMYLSGIGCHRIAKALNEEGVPTIAESSWHASTIKGMLTNEKYKGDFHIQKTYIPEGTHQSVKNNGQVQSYYVTEDHPAIISAEEWQQVQELMEYHRKQRNIGKGEKYQKRYPMSGMLVCPYCGKSLRRRYVYNRKVEWLCATYIHKGKEACKGIRIRDTELTGLSFSEPMVVEEVMINGEKHYGYTSKRAYDAGERAADRIEKESSSVLPRVNGPRRTVIKL

SEQ ID NO: 24318 - protein, 446 aa, synthetic construct
MCQKIVVTLPNNLRIRVALYIRVSTEEQAKHGLSLADQREALIAYAAAHGMEVVGIYEDAGISARKPYKKRPALMRLLDDCRAGKIDTILFVKLDRWFRNVAGYYAVQEVLDKNHVDWQAIREDYETRTASGRLKVNIMLSVAQDEADRTSERIKAINEGKRAKGQPTNGKTPIGICVKNRRYAIDEETADAARDMFPAFIRLQSILALRRYMATEWGIKRSYNKYKDALKSRLYLGEAFGVENALPALVDRETFDLAGKILERRSQRNASADRIYLFTGILRCRECGRNMQPETVKQVYKYYRCRTHTLDPADCPHILRIREDVLEDYLLREFEGIAKKYYSKSKTAEKKPPKTAEQIKRKMQKLKDLYLSDLIEIEEYKKDYTELKQQLAAINPEPIKEFDLETLRRELKEYPDLDRQAKKEFWVRTIQRIDADNDGAFFVTPS

SEQ ID NO: 24319 - protein, 520 aa, synthetic construct
MNTVIYARYSAGPRQTDQSIEGQLRVCTDFCKQRGLTVIDTYCDRHISGRTDERPEFQRLIADAKRKKFEAVVVYKTDRFARNKYDSAVYKRELKRNGIQIFYAAEAIPDGPEGIILESLMEGLAEYYSAELAQKIKRGMHESALKCQSTGSGRPLGYRVDEQKHFQIDPESAQTVQTIFEQYIKGESNAAICELLNSRGLRTAQGKPFNKNSINRIIKNRKYIGEYRYHDIVVEGGMPAIISKDTFNLAQAEMERRRTRKAPKSPKAEYLLAGRLFCGHCKGPMQGVSGTGKSRNKWYYYYCGNTRGKNKTCDKKQVSRDRLERAVVDFTVHYILQEDILEELARKVHAAQERQNDTASEIAFYEKKLADNKKSIANVLRAIESGAATQALPARLQELENEQAVILGELSFLKGKHLAFTEDQILFALMKHLEPYPGESEQDYRRRIISDFVSEVYLYDDRLLIYFNISSEDGKLKSADLSNIEGGEFDEGLVSSTKRGSVELFFYKNEFALVYRLGDA

SEQ ID NO: 24320 - protein, 521 aa, synthetic construct
MGNVMVIPAKRQVGNTARQQDAKPKLRVAAYCRVSTDSDEQATSYDAQVEHYTELIQKNPEWEFAGIYADDGISGTNTKKREDFNRMIDDCEAGNIDMIITKSISRFARNTLDCLKYIRKLKEKNIPVFFEKEAINTMDAKGEVLITIMASLAQQESQSLSQNVKLGLQFRYQSGQVQVNHNHFLGYTKDAGGNLIIDPEQAEVVKRIYREYLEGYSMDRIAKGLEADGILTGAGKTKWWTSTINKILRNEKYIGDALLQKTYTTDFLNKTRVKNNGIVPQYYVEGNHEAIIPKDIFLRVQEELVRRRVVKTSANGKKRSYSCNHCFAQIVICGECGEMFRRIHWNNRGCKSIVWRCISRLEPTGQECHARTVNETVLENVVVQAINMLLGDKSTYQAQLQQNITKVIRSAQQNTADGIDERLQELQKELLKKANNKEAYDETADEIFRLREQREKCTVDTAARDAQIARINELQDFIKLQPAHMEAFDEALVKRWLERIIIWEDHFTVELKSGLKIEIEG

SEQ ID NO: 24321 - protein, 519 aa, synthetic construct
MKKVTKIDKLQPSQTSKKKLRVAAYCRVSTDSDAQLESLDAQKEHYKNYITSRDDWTFAGLYFDEGITGTKADKRPMLLRLIDDCKAKKIDFVITKSISRLSRNTTDCLEIVRTLLSLDIPIYFEKENINTGSMESELFLSILSSMAEGESASISENNKWSIKKRFLDGTYKLGYVPYGYRWKDGEILVDPAQAEIVKRIFRELLSGKGTEAIAKELNQEQVPTKKGGRWTSTSIRDIIRNEKYTGDCIFQKTYTDSNFNRHKNDGHLDQYYVPDHHEAIISHEDFEAAAALIEQRASEKGIKKGNAKYQQRYAFSSKIICGECGNTFRRRIHSSTYGKYAAWVCNTHLEDTSRCSMLYIRDDDLKLAFTTMINKLVYCHKLVLKPYLKALQENTGDASLLNIQQLEILLEQNTEQRETLHKLMGQGYIDQILFTQENNVLLSQAGEYRNQIELLNRSQSLDATKVYETERLLHFCERGEMQLEYSEELFELFVDHIEVYSRQKIGFALHCGLILKEMI

SEQ ID NO: 24322 - protein, 607 aa, synthetic construct
MRKNEEKIAIYSRKSKFTGKGESIGNQIELCKDYVRNMFGERYVELCEVFEDEGFSGGNLKRPAFQRMMADVRKRKFKVIVVYRLDRISRNISDFTGLIDELTKLDVSFVSIREQFDTSTPMGRAMMFIISVFSQLERETIAERIRDNMHELAKTGRWLGGTAPLGYRSKPVSKITIDGKERKSFCLEPVPEEIDIPKLIYDLYTQSDSLTAVEAELLRRRIKTKLGKNFSRFAIKAILQNPVYMVADEDAYDFFLERKAEVCFPKSAFDGSCGIMAYNRTDQEKGRAMILLPMEEWIIALGKHPGIVPSKQWITVQQSLERNKSKGYRKPRNNEALLTGLIYCSCGERMYPKLTERRTGSGELIYTYVCKMKERSKRTRCNKRNANGNILDAAIIEQMKTLTEKDSAFMKQMEKSRQFYTGNREQYDTQLTKLREELAQNEKIIAGLLDSLGMVGDSIARPSVLRRIEELTEANRVLDCRILELEGLVTANHLSDGEFDLLRQVLAMLRENVDQMSVEEKRAAVRTIVRKVIWDGENAHVVLFGAEDGNLDYPNIDDRLSEAGEDDENDLEDLIDVECEESDTNDAFLEENGTFAASKSRWGDGSK

SEQ ID NO: 24323 - protein, 602 aa, synthetic construct
MKKKFSSVPDPDIQDAVIYARYSSHSQRDCSIEQQVADCELFAQQNGLRVVKIYADRHLSGTTDNRPQFQQMLKDAAHGHWPFVICWKIDRFARNRYDSATYKYKLKKAGVRVLYAKESIPDGPEGILLESVLEGSAEYYSASLAQNIRRGMRFNAENCKVNSGSIPFGYCKGPDGRFAIHETNAEIVRDIFRKAAAGVPFVDIATELNNKGLKTSRGGRWNKNSFVLLKNESYIGVYHFSDIRIEGGMPAIIDLGTFLAANERMNANRRVRGRHHDGGDYLLTGKLKCAHCGSYMIGFSGTAKNGESHYYYGCQKRRRERACKKANVPREWIEKVVVKAALDYVLRPDVMEWITDAVMEYQEREAASSQLAALTAELEENQKATDNVMKAIEAGIITATTKQRLLDLETKAKDLKRAIELEKLSHVRLEHEQILYWLEQFQGGNLQSQEFRRKVIDTFVSVVYLSDDHLRIAFNYSGQNRSEADFNLIMDAETASADYPINSFSLPLCPPHKKNPNLFPSGKGSDFFVCRISYRVIFISSLSSAAFLSMPPAYPVRLPFVPTTRWQGMMIEITLCPTAPPTACADIRERPRSAASCLASAP

SEQ ID NO: 24324 - protein, 520 aa, synthetic construct
MLEKNIIIYLRKSRSDDPGMSVEDVLAKHELQLQEYAVSEYGEQIPEDHIFREVVSGETIADRPVMKQVMRLLEAGNITAVLVIEPQRLSRGDLEDCGRIINIFRYTHTLVATPPKTYDLTNEYDRKFFEMELMRGNDYLEYTKKILNRGRIASVKKGNFIGSVAAYGYKKVKIGTGKDACHTLEIIPEQADAVKLMFKLYLEGNGFTNIAKTLDELKIKPLRSETWSPAAISDMLENPVYVGKIRWNYFKTIKKIEDGQIVKSRLINQDPSDWFLVQGKHPAIIDQATFDAAQERRGRTPKIKRFNELKNPFAGLLYCQCGKAMSLKIYNQKKGKCEPTKLMLCNKQSWCKTKSVKYDTFLERIVETLESTIADFEIKLKEDNGDATQLHKNIVNNLETNLKKLKDKDIRQKDAYEDGIYTKEEYASRNAKLQEQISETTKALCQAKDSVPPTINYKEKIARFTDCLNALNDVSVPAAEKNMLLKACFEKIIYHNDMPSISGHGRWIENKFKLEIFLRL

SEQ ID NO: 24325 - protein, 516 aa, synthetic construct
MARKKKVSPGNRLVAYYRYSGGSQQTEQSIEGQRRDCEAYARQHGLTIVHEYIDRHISGRGVESRLAFQQMIADSSKHLFDLVICWKTDRFARNRYDSAVYKKKLRDNGVRILYAAESSVEGPEGIILEGLMESLAEYYSAELAQKMRRGMRESALKGKAINPNRPLGLTTDEHKRFIIDEKNAPTIRFIFEHYAAGESSASIVDQLNAAGLRTSKGNAFNKCSIPRIIQNEAYHGVYICKAYDVRIDGAIPAIIDDDLWKRAQKMLTLNKQHRAPHSSHADYLLSGKLFCGCCHSLMRGISGHNCRNDVYYYYACGNKADGGTCKKKNIPKDVAENLVVNAICENILRPDTLEDLADAIAAAQQADVNQPDPERAMLEQNLADVHRKINNIIESIENGTASSRLSARLADLEQQESTLNYQLESLKEVHPPVLDRERILFLLEQFLISPNERTEDYNRRIIDTFVNRIEITDTEMLIYFNLSEASASEKQKNSQPNSCSTGNHLVRVARIELTAS

SEQ ID NO: 24326 - protein, 504 aa, synthetic construct
MEDFIYARQSVDKEDSISIESQIELCLREVGNNPHRVFRDKGYSGKNTERPDFQDMMAAVRGGGARRIIVYRLDRISRSVLDFANVISELQKYGVEFVSITERFDTSTPIGKAMLMIVMVFAQLERETIQQRVMDAYRSRSRKGFYMGGRVPYGFELENTVMEGIKTCMYKPIPEQIQVVQLIFSLYAMPQVSFADVVRYLSQNGIKNPNGKNFSRMRIRDIITNPVYAKADASIYEFFHGQGTEIINDISQFIGTNGAYLYTGNKATKRKSISLDGHVLVLAPHAGCIDADTWIRCRRKCLNVRQIAKPVKAKNTWLAGKIKCIDCGHALSLKSYPRKRSADARYYICNSKYVSASCDGVGAIQASGIEDIVFDEMSRKLKEFNKLSYKEKHGDPIELTKLKIRAEEIEKEIATLIDKIVSASTATMEYINERIDALDEEKKTVKEKIAQMSAEMYDRQNIGVISDYMSKWNDISIDDKLTVVDTLIESIHVGHGKVKIAWKI

SEQ ID NO: 24327 - protein, 485 aa, synthetic construct
MPTSDLKIAAAYIRVSTDDQEEYSPDSQVRLIREYARKNGYLLPEEYVFQDDGISAATARKRPAFNRMIALAKEKERPFDAILVLMFSRFARNREESVLYKGLLRKQGISVISVKEPAVDGPFGTLIESIIEWFDEYYLINLSAEVKRGMSEKFLRGEAMGTAPFGYRIDSANKTFTVDPERAEIVCDVFRSYADGAGLRDIAVQLGDAGITTRRGNRPDNRFVEYMLRNPVYIGKIRWTPGHKTRYSRVHIADGVEVVDGKHPPIVSMDLWEAVQRRMDQRKAAYGRYQRQAPAAWMMRGLVRCSACGATLIMAGRSSSCPFLQCHSYAKGSCHMSHSLSLRRANAAVLAGLQRSVGTLTFHMVPHLTSAPSRTADYGRLLEQERRRLARCKDAYQAGVDTLEEYRDNKARLEERIRRIEEQAASAAAAPESLDKAAYGKKAADILRFLETSADEGAKNEVLRSVVDHITYEKASRHLAIYFYT

SEQ ID NO: 24328 - protein, 537 aa, synthetic construct
MRKINKIEPRLPVLPTRKKVAAYARVSVETERLHHSLSTQVSYYSELIQANPEWEYVGVYADDGITGTKASKREEFQRMLDDCEAGKIDIILTKSISRFARNTVDLLETVRHLKELGIEVRFEKENINSLSGDGEVMMTLLASFAQEEITSLSNNVKWGVRKRMEQGIPNGHFRIYGYRWEGDQLVIEPEEAAIVRRIFQNFLDGKSRLETEREFEAEGITTANGCRWVDSNIKVVLTNITYTGNLLLQKEFIEDPITKRRKKNRGELPQYYVEDTHEAIIDMETFQYVQEEMARRKELGAFANKSLNITCFTSKLKCCHCGCSYVRNQRSNRTKHTSTYDDTIVAWGCGTTKKKGGRCSNKDIPERVLREACATALGLDEFDEDIFLERVDYIQVLEGQVLEFHFYDGTTALQEWVSTAKKDCWTDEHKDRQREWIKSPARRLPPTPTRWCSTFWRRSTPPAPASSAATGAREIRSASPRPILSVCSTPSPWAASAADCCWCSDASSSVCSRTSRRSSTPVWIVCGSWRSPTASAP

SEQ ID NO: 24329 - protein, 541 aa, synthetic construct
MSVDIKWQVPKAQPEASELAVVYARYSSHSQGEQSIEGQLSNARDYAAAHGYTIVHEYVDRAKSGRTDNRAEFQQMLKDTAKRQFSVIILWKVDRFGRNREEIAINKMKCRKNGVRVEYVAETIPDSPEGVILESVLEGFAEYYSLQLSQNIRRGRAESAEKCQSLGGNRPLGYKTGPDKKFVIDENTAPTVKMIFTMYADGKTVTEIVDKLNEMGLRTLRGGPFTKNSLHSILKNKKYIGVYEYQGREIKDGVPRIIEDDVFNKVQEMLKINKRAPAKTWSRADYILTDKLFCGKCGALMFGESGTSKTGVKHNYYICSNKKRFRSCDKKAVRQADIEDTMLNATHELLQDDELLDYIVDRTWEYYLAQDNSQEELRNLQRQLAQTDTAISNLIRAIEAGILTEETKKRMDELTQQKADLKASIADREIARGFHLQKSHIAFYLRSLRDADWSDKEAQKRLIQTFVNAVFVYDDHITLTYNFSGDKSTITLHDMQRFEDGEEFGCRASRSTNTILHKTLFLCRRLCRHGMGRVATRQRVF

SEQ ID NO: 24330 - protein, 433 aa, synthetic construct
MERTIQVVQPMKLSERKVLRVAAYARVSCDKDAMKHSLAAQISYYNKYIQRHSDWAFAGIYADEAYSGTKDDRPHFVQMIKDCTDGKIDRIITKSISRFARNTVTLLTVVRDLRRRGIGIYFDKENIDTLSEAGELMITLLASKAQEESRATSENCKWRIKKMFEEGYTTHFNLVGYHAVDGLVEVVPEEVETVRRIFQLYLEGYGKQAIANILFEEGVPSCLGGEWAASTIQSMLHNEKYAGDLLLQKNYITDHITNASKRNRGELPQYFIPDDHEPIISREMYEAVQKEHERRLVRYSGISGKTSELSSLIKCGICRKSYQRKKAVARMLWCRTTYNRRGKKYCASNSIPETVLQDACCQALGLAAYDAEEVRSRIVQIEAMPENILIFYLADGTSHEVKWSFPSRAESWTEEMRQKAAEQTRRQHAKTSD

SEQ ID NO: 24331 - protein, 530 aa, synthetic construct
MMLRIRASDGCEIILIREKKMDTLADVVVYARYSSAGQNDQSIEGQVKTCREFAAQRGFRVVQEYADRAISGRHAETRPAFQQMIADARKKTFQYILVWKLDRFARNRYDSAIYKKELRKYGVRVLSVTEGIDEGNESILLEAILEAMAEEYSRQLSQNVRRGMRQNAEKGLSLGGGTPYGYRLQGKRYVIVDREAEVVRFIHEAYAEGRPSREIINECKSRGYHTRKGADFTMNAIARMIANDKYAGAFLFKGELVVGDLYPPIVPQELKERAKKRLALKARAPGHEKAKVEYILHGKLFCGHCGAPMVGESGKSKSGTVYNYYACAEKKKRHGCKKKNERKDFLEWYIAEQITEYVLTDSRIEEIADAVIAEYKKSFDASGIKRLEKKIKDADAELDKLVDALIKTSADAAVKRINARIEEVEQYRAQLEDDLSSLRIASRVEIKKDDVAKWLRSMRRGDLMDDEYRKKIVEIFVNAVYLYDDRVAIFFNVKDCKQVSYIDMIDATGWAACSDLSSNALPLRFSRFWS

SEQ ID NO: 24332 - protein, 527 aa, synthetic construct
MNTAARTVTVIPPSITPMTHLTNTQLYKLRVAAYARVSTDSDEQFTSYEAQIDYYTQYIQQNPEWTFVKVYTDEGISGTNTKRRAGFNEMIEDALAGKIDLVVTKSVSRFARNTVDSLVTIRKLKEKGVQVYFEKENIYTFDGKGELLLTIMSSLAQEESRSISENVTWGQRKRFADGKVNLPYKNFLGYRKGADGFPEVVPEEAVIVRRIYSRFMEGLTPGAIAKELTADGIPTPSGKLRWQSSTVESILKNEKYKGAALLQKCFTVDFLTKKKKINEGEVPQYYVEHSHEPIVSPEEFDKVQSEFNRRKQLGRQYSGKSIFATRIVCGDCGSFFGPKVWNSNSKYRRVIWQCNGKLQGEKKCSTPHLGERTIKDGFLAAFNQLLGDKERILDDCRLMQNTLTDCEGIDSQIAELEQEIEVVTELTKRCIAENARASLSQTEYAARYNGFVERYEKAEARLEQLRTTKAAREARAEAIGAFMFEVQELDALTEFDEKLWLTIIDTITVHADGRMTFKFQGGTEIEA

SEQ ID NO: 24333 - protein, 573 aa, synthetic construct
MAYNAQNKTGARVAIYVRVSTLHQIDRDSLPMQKQDLLAYAKLMLNTDDCVIFEDAGYSGKNTDRPKFQEMMSQMRAGAFTHLLVWKIDRISRNLLDFATMYNELKALGVTFVSKNEQFDTSTAMGEAMLKIILVFAELERNMTSERVTATMISRANNGLWNGGRIPYGYDYDYETHEFSVNEEESKVVILMHDMYEQERSLVRVVRELNERGYRSRAGNLWSPVSLLIILRNVFYCGDYRYNMLKEGDRQKVKDESEWVTVENHHVAIIPKDQKERIMATLDSNSKLCKQRNIYKSSKHTHVFGGLIYCGSCGKPLGSTPGNLTRDGWHYSKYTCPTRRKSVTLCTGKSTSDPIIGEFVFNYILNMLNAQNGFDKISSPEELEKLLLIGDTFTYIDHIEPNGLNDLFNVLSSGAVKGAVFGKGASLPTKKATVEPEVARLRNEKQKTERALDRLRSLYLYADEAMSEAEYMIQKNKLEETLEDINDQIGMMNTDSWQQSVSDEEFIQRASEFIIAQKLSGRKYVNYKRLAMSVDSEVLKNFVVSIIDSITIQDGLVSNIVFKNGLCHTFIFR

SEQ ID NO: 24334 - protein, 550 aa, synthetic construct
MYRPPELTLNPDEVLVYLRKSRSDDPLMSVEEVLAKHETILDEWSEKNLGGLVPEENKYREVVSGETLKERPEINTVLRRIESPKIKAVAAVEPQRLTRGDLEDIGRLMKLFKHTKTLIITPTRTYDLQDDYDWDAFERELKRGNEFLEYTKKILNRGRLLSVSQGNYIGSIPPYGYKKVFVTDGKRKCPTLEVVEDQAEVVRTIFDLFVNQNYGSCKIRNYLNDMHVPAPRGEKWTENGMRDMLTNVHYIGKVKWNWRKNITTVEESEIVTHRPKAQPGEYLIFEGKHEAIISEALFSAAQEKIGHTGRVKSEHEMVNPFAGILFCKCGKALTMKVQKGADGNMSSRFYCANLRNCGTSSCMCNEIVEKVSDTLKQAIQDFTVMLDSGDKESIKRHTARIKILETKLQDLEKREMALWEAQADPDLSVRMPNHIFLALNDKIVKEREQTTLMLEQAYASMPNPKLYRENIQRFSDAVEALNSPEVPAAIKNKLLKACIERIEYSKPKAERIKSSSKRIWVNGHRIRTNPLPTGGNWTSPEISLDIKLRV

SEQ ID NO: 24335 - protein, 548 aa, synthetic construct
MKFKYPAMGTTKNAVIYARYSSHSQREESIEGQLRICHEYAKVEGLAIVGEYIDRAISGTTDARPDFQRMIDDAKKKQFSYVIVYRLDRFARNRYDSVLYKHELKQCGVKVVSATEGIGTGDESILLEALIEASAEYYSMELSRKIKRGRQDSAMKGNFLGGAVPLGYKVVDSKFIIDDETAPIVRYIFERYAAGIGKKQIIDELTAKGYMRRTGKPFTYRAFDSVLRNRKYTGEFTQTGITVEGGCPAIVDTEMFEKVQARLEINRRAPAKAKAKTEYLLSGKMFCGYCGEPMIGISGTGRHEKTFYYYSCVGRRGKSGCKKQHEKKDFIEWYVCEQTVQYMQDPERLSHVAKRIIEINDAEFDGGKVKELERAVENCDNDIRKLVDALTTIPDAGRAALYDKIERIGAAKADMEIDLAKLRVLSEVRYKQEDVEAWIRSMCRGDLMDFEFRRQLIDVFINSVYLFDDRVVIVYNIKHGKQVSAIDVLNAVEELDGVELFPDSAEDSSAGGNGSFLVADAPPKQYNPNLVPIGHGFGFLVFIKDIEV

SEQ ID NO: 24336 - protein, 538 aa, synthetic construct
MQENYIVGIYARLSRDDERAGESVSIENQKEMLSRYVREQGWTLYDYYCDDGVSGTTFDRPGLNRLVQDATDHKINLVLCKDLSRLGRDYIEAGKYTDFVFPSLGCRFIALNDGVDTLRKNNEMLVILKNVMNDLYARDTSSKIKAVKLSTFKSGKYVGCYAPLGYRKSEADKHVLEIDPVTAPVVRHIFDLRLQGYGFRKIALQLNAEKVPAPRSFYYMAEGRENLRGETPFWNDVTVKTILRNEVYIGHMVQNKTGTVSYKNHKQVSKPESEWIKVENTHEPLISQETWDAVQRMDNHPARGRSGKSGTVALFGGLLRCMDCGSSMRYMRDYRKKVSEKEPEYKAYVCNRYASGGKNACSSHYINQKVLTQIVMTDIRCKAMWAQNSRETLRTQLLAREQNASVERTRTLQAELNAIGKRLPELDKLIQSAYEDKVLGRIPESVCVNLLNQYEAERREKQGRHKELTGQLAASRETESSVDAWLDMMQDYAQLEELDRPTLVRLIQKIEISERYTVDDHEERDIHIYYNFVGYIEA

SEQ ID NO: 24337 - protein, 538 aa, synthetic construct
MRKSALNNKTNLNKEDNMKTAVIYARYSCERQTEQSIEGQLRVCNDYAQRNDIAILDTYIDRAMSGTNDNRPAFKQMLKDSARKQWNYVIVYKLDRFSRNKYESAIHRKSLKDNGVKLLSAMENIPDTPEGIILESLLEGMNQYYSAELAQKIKRGMKESRLKGQFTGGKLPYGYKVENKKIVVDEDSAEIVRKIFDMTAQGFTAPDIIAYLSENGLYHYGKPFKKNAIYKLLHNTKYIGTCTINNETFDNLYPQIVSVELFKQVQSKLERNLLGQNCIHADFLLRSKVYCGYCGHKINGESGTSQNGDKYYFYKCSWRKKGKDNCKKQMIRKEDLENIVLDMTMDIFTNSVDLNIIADEIVRVRKESVAEHCELNILIEQQKEKQKSLDNIMKAIEAGIITSSTRNRLEELEFELDNLSVLITKEQNKLLQTVSRDDIMQYLTKGVRETSPNVLIELLVHKVTLWDDHIEIEFNYSDKTNPDGLITARRDFSISKPWYTLSATNCVLIAQKSIVTAEPFYNQETTFEFESLKYNYQL

SEQ ID NO: 24338 - protein, 548 aa, synthetic construct
MKFKYPAMGTTKNAVIYARYSSHSQREESIEGQLRICHEYAKVEGLAIVGEYIDRAISGTTDARPDFQRMIDDAKKKQFSYVIVYRLDRFARNRYDSVLYKHELKQCGVKVVSATEGIGTGDESILLEALIEASAEYYSMELSRKIKRGRQDSAMKGNFLGGAVPLGYKVVDSKFIIDDETAPIVRYIFERYAAGIGKKQIIDELTAKGYMRRTGKPFTYRAFDSVLRNRKYTGEFTQTGITVEGGCPAIVDTEMFEKVQARLEINRRAPAKAKAKTEYLLSGKMFCGYCGEPMIGISGTGRHEKTFYYYSCVGRRGKSGCKKQHEKKDFIEWYVCEQTVQYMQDPERLSHVAKRIIEINDAEFDGGKVKELERAVENCDNDIRKLVDALTTIPDAGRAALYDKIERIGAAKADMEIDLAKLRVLSEVRYKQEDVEAWIRSMCRGDLMDFEFRRQLIDVFINSVYLFDDRVVIVYNIKHGKQVSAIDVLNAVEELDGVELFPDSAEDSSAGGNGSFLVADAPPYMKNPNLFPIGNGFGFLIFIKDIID

SEQ ID NO: 24339 - protein, 464 aa, synthetic construct
MARSVTVIPARNRQRETGRRAVQEKKIRVAAYCRVSTDQEDQLHSFEAQVDYYTKYINDHENYEMAGIYADEGISGTNTKKREQFKRMIADCEGGKIDLVITKSISRFARNTQDCLAYSRKLKNLGIGIIFEKENINTLDSTGELLFTILSSLAQDESRNISENCKWGIRTKFKNGEMHLNTFKFLGYDKDENGKLVINKEQAKTVRRIYRDFLIGINPAQIAKELTEEKIPGCNGQTKWYPSTVTGILKQEKHMGDALLQKTYTADFLTKRQVKNNGEIAQVYVKDSHKGIIDKQTWNAVQEEFDRREKFMESHGTDRYSYGADCMPFCEKVFCGECKSLFTRHSWRSRGIVQWQCKNHRKDGKVACTNAYVDNADLEKGFVKAFNRLVTDRDKHMERWQQMKSDGSPLEKIRAGQMMEAVENEPLTRFVPEIAQLVLCEVTVLGAKKYEFFFLEGSRVKVSV

SEQ ID NO: 24340 - protein, 495 aa, synthetic construct
MKNCVIYARYSSERQTEQSIEGQLRICNDFAKQNGLQVLDTYIDRAMTGTNDNRPAFQQMLKDAEKPVMWDIVLVYAIDRFGRNSIEIAVNKQKLKKNKKMLISATQRMSENIDGTKNLDGIILENMYIGLAEYYSAELSQKIRRGLHESRQKGFCSGGRPPYGYYYKDKRVFINEEQANVVRYIFKEYFSGKIVREIINDLTEQGILYRGKAFAENTIYNFLRLEKYVGIARYDDGVYDNIYPQIVDKEVFDGVQAILAANKIGSRSPESLFLLRNKITCGCCGTHYQGDSGTSKNGTKFYYYKCMGRKKKHICHASVLKKDEFENLILEIIIKVFGTESRINYLADCVMAVYNDKLKEHSAVDLLKRDRDEVQKALDNIMRAIEQGIINETTQCRMKELEERKQTLNDKIVIAQYGESQRLTKQEVVEYLTHSLRQEPRFLLHILVKSIIVYDDKIEIYFNFTERKNPDDSDDTDSRDNNYVNCSDILPMCPP

SEQ ID NO: 24341 - protein, 526 aa, synthetic construct
MPRVTTIPATKNLFTALPTASVARRKVAGYARVSTDSDEQFTSYEAQIDYYTRYIMEREDWQFVKVYTDSGISATNTKHRDGFNEMVRDALAGKIDLIVTKSVSRFARNTVDSLTTVRKLKDAGVEVYFQKENIYTFDGKGELLITIMSSLAQEESRSISENVTWGQRKRFADGKVSMPYKQFLGYEKGADGSPVVNAEEAVVVRLIYRLFLQGKTPAGICRYLESQSTPTPSGKQKWSQTTVRSILTNEKYKGDALLQKKFTVDFLQKKMKTNEGEVPQYYVENSHEAIIAPIEWEMVQAEITRRKALGRAYSGSSVFASRLVCGDCGGFFGQKVWHSTDAYRKVIWRCNSKFKGGQRCATPHLDAETIQQKFLIAYDRLMTNRQSIIRDCEQMRSVLSDCSAIDTELDDLNEEIRVVAGLVKACVEENASTAQSQEKYAKKYNGLLARYEKAAARVGELTTEKERKHDRERELRLFIASLKKQPLALESWDEKLWVTLVDRATVCRDGRIVFRFKGGSEIEVEP

SEQ ID NO: 24342 - protein, 435 aa, synthetic construct
MSKIVNRVPFAPKLERKKRVAAYARVSTAKDAMLHSLSSQVGYYSELIQKHSGWEYAGVYADEAATGTRDSRDAFQRLLADCRAGRVDMILTKSISRFARNTVTLLETVRALKALEVDIFFEEQNIHTMSAEGELMLTILASYAQEESLSASENQKWRIRKGFENGELVNLRFLFGYRISKDGIEIDDETAPIVREVFARVISGESFSAISRDLNARGSCCTLGGKWCAQRIRQTVANEKYTGNAMLQKRYRNNHLEKKLVRNTGELPMFYAERTHPAIIDQDTFDAAQEVLRKISEATRGRPHPQRSEFTGKIHCPFCGKAYKRNTSNGSVGWNCSTYLSQGKTVCHGKKIPEATLKAVCAEVFGMSDYNAEAFTTMVARIEVPEDNRLRFVFKDGRVAERTWPDRSRRESWTPEMRQAAAERTRRRRNTPCQE

SEQ ID NO: 24343 - protein, 551 aa, synthetic construct
MDTSKYMPACYCRVSTVHQIDKESIPAQVHMLTNYCVGMLQCKKSDIEFYIDAGYSGKNTKRPQFEKMMDDVESGKRNIVLAFKIDRISRNLLDFARFLEVLKSHSTDFVSLSESFDTSSVMGQGMLKLVCLFGEMERGITRERVMAVSKDIISRGGHLGAPTPLGYNYDKGTKKYSINESEAKTIKLMFKMVQDGYSTNYIANHLNDNHITSKRGGLWTSTTVNHILHNPAFKGLYIWNRKTSGRQKVKDKKEWMYQKDVYPVIIPEKDWQAVQDLLRNRKTGRAFMQSTAPHFFSNLIICGECGRLLRYRSDRPRRSGFTPTIYTCPGHTFHWGCPNSAYLSDIVLAPFVLRYISNMYKLSWITDSVQSSQQLNSILLDGMPSNCRLANLPTIYGLFTRANTEPVPGDVAIIKAAANNAKVEREKELAKYYKALDRLKDLYLYGDSDLSKENYVAERKKIELKIASIMGKTQKEEKQVSPKLSIDASKYETILSMLHDTADYMQILEKCGHKLLADFFHDCIKSIVTSNRQVMRITFRNGVSHNFIYEN

SEQ ID NO: 24344 - protein, 556 aa, synthetic construct
MKGAVIYARYSCERQTEQSIEGQLHECYKYAEKNGLSILDEYIDRATTGTNDNRPAFQKMLADSERTTAWDIVLVYAIDRFGRNSIEIAINKQKLIKNGKNLISATQRTSTNIDGSKNLDGILLENVYIGLAEYYSAELSQKIRRGLTESRNKGLFCGGKVVYGYCVKDKTIYINEAETETVRYIFQEYNNGKTIPDIIEVLDARGIKYKGETFKKNFLYRMLRNEKYIGITKYDGVEYKNIYPPIIKEDLFDAVQSRMVTYSVGAHSKDADLLLKGKVICGLCGHMMNGDCSTSRSGKLMHYYKCSGRKRGTGCESRILRQDKLDEFIVDVTKQVFCSKENIQLLVDKVIAVHKQRQKDESILNSLKNRHSDLVKSINNMLFALQEGIITPSTKERLNMLESDKAEIEEQIAKEELALSKQISRDEVEYYLRRAIKSSPKILLNNLVDKVIVYDDKIEIYYKYCHKIPDDPDDQRGYFFEELRIPINCGKRNRQFLPIMIDHQKMIASVKYILNRRRKMLAPINYKKRPILASQNVTGADGYLLVETRGFEPLAF

SEQ ID NO: 24345 - protein, 533 aa, synthetic construct
MKLQPLTIQNSKNENIAHIPRVCCLYRVSTKRQSEEADIPMQRIECHKFCNEQNWQIVAEFSENGVSGFKVSANKRDDILEIKKLAQEKAFDKLLVFKFDRLGRIESETPFVVEWFINHGIEVWSQVEGQQRIETHADKLINYIRFWQAAGESINTSLRVKTRCKQLAASRQFTGGVQPIGYKLVDTGLINSRGLPIHEKVIDEKDANLVRTAYELCITGKGTYQIAYILRQMDPGRKWSQNTVLRMLKNIAYTGRFKYDGVVYPKKEEWVIISDEMFELAQKNIDARRTTPKNISTAPRGKHLLTGLLFCGHCGSRMCGSTNKDLHGNSYRYRPVYRCYAKIQKRPCDGYSVYNAQRIEQRINDIVHTVCMQLDKNPKETVVQTLCYDLERKAKQQLKDAKANLSSWLKKEQIIKDNIMRSLMGEQISFHIDTLDSLLNDCQGQIRKAYISVDEAQTELNQSLQNSEKLSAQYDQFNNWCQEYDMADVSIKKMILASIFDKIYVDNQYRVNAIMSMTAQQFGFDYSKAVIAN

SEQ ID NO: 24346 - protein, 501 aa, synthetic construct
MKIEIREGRQTQERKLRVCAYCRVSTDADEQENSLENQMQHYEKVIKANPAYEYVGVYSDFAISGFKDKRPGFQSMLADARAGKIDLIMTKSVSRFARNTAIVLEATRELKERNVGVFFELQNINTLSGEGELMLTILAAFAQAESESGSEGAKMVYRRKYEQGIPVQYLERSFGYTKDDDGNYVPDEKEMVWVKKMFQMAADGYTPAAIKRFLNDKGVLTVGGAKWIDSAVIRILENEIYKGDYIMHKHYVNEERKLVRNRGEVDAWYIENDHKAIVSESLWQKAQEAIGKKREYLATASVIKDFTEENYPYMNKIFCAKCGHPLQKRIYSKGNRLNWGCTGTRRFGKEFCEGVNIPDGVLREAWRFEENMYIGEKPTNKGIKEFTYLKESSWKRRHKKKILGKLVPDNTEENYPYKNQLFCRLCGSRLVRHYNPKNKKVFWICNRNKRQGKESCTGVRVPDSVIRAWGSIKGDIYIEGKVDRNGKKRYSYSGTKPTKSE

SEQ ID NO: 24347 - protein, 560 aa, synthetic construct
MKITKFPIDLSMLTEEEIDQFRQDPSTLFEGDTDVCLYLRFSSERQREQSIEGQLRDCRTFCKLNSYRITAIYVDRATTARKDVEKRVHFQEMIRDSEKKPWEYVVVWKLDRFARNRTDSALFKFRLRKNGVKVISATENISEKPEGIILEAVLEGMAEFYSADLSQKITRGMRESALKCHSIGGHVPLGYKIEDHKLVINPATAHIVQEAFELYANGETVADICRIFNTKGYRTAKGVEFNRNSFKSMFRNKRYIGVYTYKDIEVEGGVPAIIDKELFETVGHRLSKNAEAPARGKAKVDYLLAGKLFCGHCGGSMNGESGTSKTGAIHNYYTCYTRKRKHACDKKPLKKDWIEYIVAQDAMELLTDDTIQELADMAISQTEQDLRENTRIPELTDRMKETESGITNITKAIEKGIASDALMNRLVELEKEKKNLLRLLAEEEKYVCKIERSQIVYWLTEFKGGRIEDERYRRIIIDLMINSVTVWDEPDGFRITTAYNLTSCKSKTFRIAPSGEKGFGFEGSECTIGVSFGILRFFIMKLFCNSFTKTCNFWPIFPYL

SEQ ID NO: 24348 - protein, 563 aa, synthetic construct
MAKKKKPAGGNAIIYARYSSHNQRDVSIEQQIEACRKHAAELGLTIIATYEDRAISGRTDNRPAFQRMMHDAENGKFSYVLAWKSNRMGRNMMQAMVNESRLMDCGIKVYYAEEDFDDSAAGRFALRSMMNVNQFYSDNLAEDVRRGLMDNASKCMANGKQPLGYKRGEDGKVAVDEPAAAIVREVYTRVASGELFTDIARDLNRRGIKTADKGEWNKNSFHRLCSNEKYRGIYIYGDVRIEGGIPTIIDDTLWYKVQEALRVKKLKRNGRHRPGDEDYLLTGKLRCGKCGGYMIGMSGRSKTGEIHYYYTCQNRRVGRTCDKKNIRRDVIEPAVAQAIKDYCLTDDAIEWIADKTVEYWEKADRNLQLDSIEGDLAAVQSSISNVMKAIEMGVVTETTRDRLIELEKQRTDLKSKLALAKEEVVHVDRKKLISSLLLFRNGNIHDRQYQEDLFKTFLISVYVYDDDDNGHLKIVFNAFGDNNTVDLPIDFGETDNQSGFSDGVEKFDYALHRSTKKEPAEHVRLVLFSLCFPYEQKCSAFKIYSICTDAANRDSGALYFMVL

SEQ ID NO: 24349 - protein, 499 aa, synthetic construct
MNVVLYMRYSSDRQTEQSIEGQKRVCMDFCERQGYNVVGEYIDRATSAYKETAKRTNFCRMIRDSSNGLWQGVVVYKLDRFARNRYDSATYKVRLKKNGVKVISATENISDSPEGVILESVLEGMAEFYSKELSQKVSRGLNESAYKCNSTGGAIPLGYKTVDKKLTVDEPSAQIVKEAFDLYAGGATISEICEKFNSQGYRTKKGTEFNKNSFKSMFRNEKYIGTYTYKDIRIEGGIPAIIDKETFETVQKRLSANAQAPARGKARVNYLLSQKLFCGHCGANMIGESGRSKTGETYYYYSCSTRKRFHSCKKRTIRKDLIERIVAENAMRLITPEMINTIADMAIKCNREDIESDAIIPALTADLKEINTSIKNLLKMVERGVESETLDSRLKELEKRKKDTELRLDAAKSEYLTLDKTVIVGWLSQFLSGDIEDEDFRRHLIDTLINSVTVWDEPDGGYKITTVYNLKGNTQTYRVNADGSSDMKRNSPPKKRQFS

SEQ ID NO: 24350 - protein, 485 aa, synthetic construct
MPTSDLKIAAAYIRVSTDDQEEYSPDSQVRLIREYARKNGYLLPEEYVFQDDGISAATARKRPAFNRMIALAKEKERPFDAILVLMFSRFARNREESVLYKGLLRKQGISVISVKEPAVDGPFGTLIESIIEWFDEYYLINLSAEVKRGMSEKFLRGEAMGTAPFGYRIDSANKTFTVDPERAEIVCDVFRSYADGAGLRDIAVQLGDAGITTRRGNRPDSRFVEYMLRNPVYIGKIRWTPGHKTRYSRVHIADGVEVVDGKHPPIVSMDLWEAVQRRMDQRKAAYGRYQRQAPAAWMMRGLVRCSACGATLIMAGRSSSCPFLQCHSYAKGSCHTSHSLSLRRANAAVLAGLRRSVGTLTFHMVPHLTSTPSRAADYGRLLEQERRRLARCKDAYQAGVDTLEEYRDNKARLEERIRRIEEQAASAAAAPESFDKAAYGKKAADILRFLETSADEGAKNEVLRSVVDHITYEKASRHLAIYFYT

SEQ ID NO: 24351 - protein, 578 aa, synthetic construct
MKMMQNDNRTAITYYRYSSHRQGEQSIEGQRAEAERWAKANGYTIVKEYADRAMTGTNDDREQFQLMLRELERLRPAVLILWKVDRMGRNKEEIAFNKYRCKKNGTRVIYTAESIPDTPEGVILESVLEGMAEYYSLQLSQNVRRGHRVSASKCQSTGGACPLGYRVGPDKHLEIDPEKAAIVRQVFERYANGETQPEIIQSLNEQGLRTLRGKPFSRNSLRTLLKNEKYIGVYTYNHGEVRVEGGVPAIIDVEMFQKAQKMLKFNKRSSSHKWTKANYLLTGKLFCGCCGEQMCGVSGYSSTKVKYHYYACSGHHNYKKARSTCRKKNVKKEWIEGLVLREAKLLLLNEDLLDFIAENTYQYYVEANTDTAYTDALQANLREIERSLENIMRAVEAGIFNDTTKARMEELEAQKQQIRHALDLTKLDRGLQLTKDHILYFLKRFRDLDFENAACQRQIIDTFINSVFVYDDHITLTFNYSGDDRTITLAETDAAAGGESFVFAPSCGTNRSTVSVLRFFYTLKSCGMYFVLFYVLRNVGAADPCGPFVWGNTMCCNVVPLGRLRAAGVCGPYEVMKK

SEQ ID NO: 24352 - protein, 520 aa, synthetic construct
MKAVIYARYSSEKQQEISIEGQLRVCQEFAAREGYEVVDTYTDRALSASRDVERREDFQRMIRDSSRRGFEVVIVYKFSRFARNRYDSAVYKARLRQNGVKVVSACEPISANPEGALIEGIFESLDEFYSKSLAQDVTRGMHENATKALSTGGTIPLGYVSVDKRLQIDPATAPAVRLAFERYAEGMSLARIADELNAQGYRTRAGKAFNRSSFNALLSNRKYIGTYHYNGEVELVGQVPPIVDPGTFRRVQERLRKNTTAPGRTKATINYLLSTKLYCGACGKPMAGESGHNHSGTRYYYYACSGRKRRLGCKMPTLRKDDLERLVVEHARTLLSPDNIKALAHAAAAEYQRQAEDDSAAVSLRRQLDEVTRSLDNLLRMVEQGAVSATLVGRINELEGRKASIAAELSEEQRGAPELTEVDILRWLSCFADGCLEDEDYMRNVIDMLVNKIVVQQNPNQKVSVLVAYNLAGRGDEISGSGLVDVVHQARHNPNLCTRATESCMTFLLYHGCAIFQLAA

SEQ ID NO: 24353 - protein, 503 aa, synthetic construct
MSTNAVIYARFSSDKQREESIDGQIRECKAFAQANQLNVIAIYIDRAMSARTDHRPDFLRMIKDSRSGAFDYVLVYQLDRFSRSRYDSAIYKHELKKNGVKVLSAKENITDSPTGIMLEAMLEGYAEYYSAELSQKVRRGMTENLLEHKWNGSPVPLGYALDANHRLVIDPDMAPHVKALFEMFLAGKSYAELARYLDEKHIRTVTGRKYTGPTVHNLMSRQLYTGTYTWGGQVIEDFCPAIISKSDFSRAALRMANRKRTAKNGIPMSVRRSPEYALTGIIYCGECGRTMTGYSGRGQNGDRYYYYRCNSNNNRCRQTEKIKCKNHPVRRNRLEDLVLQTTVNILSDKEAVAAIAKQVSRIKLENPYASELSNIKSRLADLKKRHDNSVKAIEAGVMSQAIMDNVCKYEAEMDNLKARQEKIKLATPSLQIDPVAVEYFLKSLLLNKKQHDKYRLDLFEAFIHRVVVYHDKVEIQYNYLPGHKLENPITTPLPGCSNLNKVV

SEQ ID NO: 24354 - protein, 511 aa, synthetic construct
MSTNAVIYARFSSDKQREESIDGQIRECTKFAEDQGLEVIGTYIDRAMSARSDNRPDFLRMIADSARGQFQYVIVYQLDRFSRSRYDSAVYKNKLKKNGVRVLSAKERIGDDPTSIILESMLEGYAEYYSAELSQKVKRGMTENILEGKWTGGRVPLGYALTPDKKLKVVTTAAKAVNIIYEMYNAGNRVIDIINHLNAHSYTTASGRPFCRSSINSILTNKIYIGTYEWDGHVIKNFTTPIVPYDLWRAVQNRINYHKSNPRAKSHSTAYALTGYIYCGKCGLPMTGQSGRSNNGNLYYYYRCSSKNNYHERGKKMKYRCQSRNISRDKIESLVLKTTVDILRSPEAIKMIAQQVANLQEIDPTADEQARIKKERNSIQSKLDNSIKAIENGLCSTTITANIEKYEARIAELTQKIDELKFKYAPIHIDAVAVEFFLRSLLLNKKEHDAYRLDMFRTFIRRVIVHQDSIEIQYNYTACPPTLKSPVSIPLTGETECSDKNQNGAPKKDLC

SEQ ID NO: 24355 - protein, 528 aa, synthetic construct
MSTATVRSVTIIPPTINPLTHISMAATRKRRVAGYARVSTDSDEQFTSYEAQIDYYTQYIQRNSEWAFVKVYTDEGISGTSTKNRTGFNEMIDDAVSGKIDLIVTKSVSRFARNTVDSLVTIRKLKEKGVEVYFEKENIYTFDSKGELLLTIMSSLAQEESRSISENVTWGQRKRFADGKVNLPYKQFLGYRKGADGLPEIVPEEAAIVRRIYARFMEGLTPHTIAKELTADGIPTPSGKQCWQTSTVESILQNEKYKGAALLQKCFTVDFLTKKQKVNEGEVPQYYVEHSHEPIIVPEEFDKVQAEFVRRKQFGLQYSGKSIFASRIVCGDCGSFYGAKVWNSNNKYRRVVWQCNNKFKGGHRCETPHLDEKNIKARFVDAFNAVLGGKDGILADCRLMQTTLTDCTGIDAEIERLLTEVDVVTELTHRCISENAQSAQNQQEYTARYNSLVERYEKAKTQLEQLRATKTAREAQAKAIGAFMFEVQELDAFTEFDEKLWLAVIDKVTVHTNGRMTFHFRSGTEIDA

SEQ ID NO: 24356 - protein, 496 aa, synthetic construct
MTAVIYARYSSDNQREESIEGQIRECTAYAEKNGITIVKHYIDRAISAKTDNRPEFQQMIKDSDKKLFDIVLVWKLDRFARNRYDSARYKTQLKKNGVKLMSATEIISEGPEGIILESVLEGYAEYYSADLAEKVVRGQTENILKGRCNGGRGTFGYTLDSERKFHIDPLTSPFVMESFKKYNEGSTMKEIRDWLNENGIKNPVGGAFTYNSVEHMLKNRRYIGELKFRDVVVPDAVPPIIPLELFEDVQEKIAKNKKAPARRKAEDDYLLTTKLFCGYCGALMFGESGTSRTGEVHRYYKCATAKKHKSCKKKTVRKQWLEDLVVNQTMQLVKDDAAMESIIAKVMELQNKENTNIPLYEKQLRDAESGIQNMLNAIQAGILTSSTKERLEQLEETKRELEARIAEEKLAKPKVTEEFIRFWLLRFRKLDMSLKDQRQELVDTFINAIYLYDDKVLITFNYKEGTQTVTFGEATEVASEGNGSDLDCFTALTKER

SEQ ID NO: 24357 - protein, 444 aa, synthetic construct
MRKKLRVAGYARVSTDEQKKYGYSIQAQTEEITQWCNDNDHELIHIYIDEGFSASTMKRPQLQVMLSNLKNLDAIAFTRLDRLSRNVLEANKMLELLQQNNVAMISICEDDINTSTANGLFMFNLKVNLAEHELKKGSERIKAVFEYKVAQGQPITGNVPFGYRIVTENGNKRIVIDESKAPIVKDIFESFLLHQSVHHTVEYVNKKYGLSRPYMSYMHILKNEFYSGSYRGNSNYAEPYITKETYNAVQTALQANIRTGIQRHVYLFTGLLRCPECRSKLIGVSHPKGGKRYYYYRCNNAHSVHTCTHKKHYAELATEKYLLSNLDDLLKNHIATISSITSETKDTTEKELKELRKELDNLNYIFIKKRMPVSTYERLYAETEDKIKRLESFKPQSTDHLNQFLNSGWRSIYDNLTRENKRTLWRNVLDSVHVSPDGIEVFFK

SEQ ID NO: 24358 - protein, 514 aa, synthetic construct
MAKRKFNKGGEVRLVAYYRYSGGSGQTEQSIEGQRRDCEAYARLHNMTIQKEYVDRHISGKTDDRAAFQQMIADSDKGAFDMVICWKTDRFARNRYDSAVYKKRLRDNGVEIVYAAESNISGAEGIIIEGVMEALAEYYSAELAEKMRRGMRESALKGQAISRCRALGLKTDEHKRFVIDEKTAPTVRFIFEHYAAGESAMSIVEQLNAKGLRTSQGNPFNKSSIPRIIQNEAYRGVYISKSYDVRIEGAIPAIIDDELWERAQTMLKLNRQLKAKNEPKADYILSGKLYCSCGSLMRGMSGHSATGEVYRYYTCPNKDCHLRNIPKDDLEGKVMQSIVDHLLQPESMEALAEAMVEVQKADVEKPNAERVAIEQSLSDVRRRSKNILDAIENGTANAQLCARLDDLTEQERTLNFQLSALEKEKPVVFTKEQYLFLLEQFLVEPSERTPEYGRRLVNTFVTSMVVSDRELVINFNVSEETVNKNKKTSQTNLQKESSSGMRLVRVARIELTAS

SEQ ID NO: 24359 - protein, 494 aa, synthetic construct
MNAVIYARYSSEGQREESIDGQLRECMVYCKKNGMTVVKEYIDRALSAKTDNRPDFQRMIKDSAKGLFDVVVVWKLDRFARNRYDSAHYKAALKKNGVRVVSAKENIADGPEGIILESMLEGMAEYYSAELSVKVIRGHTENALKCKYNGGTPTFGFTIDSNKQYQPDPITAPIVLDIFKMYDTGSTMKQIVDHLNDLGVTTVRGRPADLNFISGILHNRKYIGEYKYRDIVIPNGIPALVPVDLFERIQEQVKKNKKAPARHKAEDDYLLTTKLFCGTCKAMMVGESGTSSSQGRKYHYYRCVNSKKKKICTSKHKSVRKEPLERAVVESVMRNIMDDAFVEYFADQALELQRQESNELPALRRQLADTEKSIENMLNAIQAGIFNSSTKGRLDELEAAKDQLELSIIKEEMKKPQFTREQIQFYILQFRKVNTNTLEGRRRLIDGFVNSVVVYNDYILVTFNYKEGAEQITFEQIERSDLSSLGGPDENLDT

SEQ ID NO: 24360 - protein, 529 aa, synthetic construct
MTKRKWGELMKTITKIEEIESVGPAKKIRVAAYCRVSSSSDDQLISLETQKAHYETYIRANPEWEFAGLYYDEGISGTKTSKREGLLSMLKDCGRGKIDYIVTKSISRFARNTADCLTMVRKLLELDIPVFFEKENINTASMESELMLSILSSMAESESVSISQNAKWSIQRRFKNGTFIIACPPYGYDNVDGELVVVPEQAVVVKRIFADALAGKGTHMIARELNSEGLPPIQGKKWHPGTIKFILKNEKYTGDVIFQKTYTDSSFNRHRNNGEYDQYFCENHHEPIISHEDFDKVNELLRQRGKEKGNGEDTAKYNNRYGFSGRIKCGECGSTFKRRMHYKPSGAYVAWCCGRHIDSVDACSMKYITDDALKAAFLTMMNKLVFSHKVVLKPLLNDLITTSDIERLQQISELENQIEKNVEQKQVLTDLMTSVKLSPALFHKVSNELNTEAEMLSKKKEGLLYSMSGEYSKVEELKLLMQFTAKNNMVTEFTEELFLAYVDRVTVVSRAEVMFELKCGLNLKERLVK

SEQ ID NO: 24361 - protein, 523 aa, synthetic construct
MTTAKNVMVIPARRRLGNTVQAEERPKLRVAAYCRVSTDSDEQATSYEAQVEHYTAFIKQNSEWEFAGIFADDGISGTNTKKREEFNRMIGECMAGNIDLIVTKSISRFARNTLDCLKYIRELKEKNIPVFFEKENINTMDSKGEVLLTIMASLAQQESQSLSQNVKLGLQYRYQNGEVQVNHNRFLGYTKDEDGHLIIEPVEAEVVKRIYREYLEGASLLQICRSLKADSILTAANKPHWRPETVKKILQNEKYIGDALLQKTYTVDFLTKKRVKNNGIVPQYYVENSHEAIIPRDLYMQVQEEMVRRANLRGGKDGKKRVYSSKYALSSIVYCGQCGDIYRRVHWNNRGYKSIVWRCVSRLEEKGSECTATTINEETLQTAVVKAINELLANKEPFLQALQKNIATILNEENDNATNDIDSKLEELQQQLLIQAKSKNDYEDVADEIYHLRELKQNALVENAEREGKRQRIAEMTDFFNEQSCELEEYDEQLVRRLIEKVTVFHDKFAVEFKSGVEIDVEG

SEQ ID NO: 24362 - protein, 499 aa, synthetic construct
MSKAVIYARYSSTNQREESIEGQIRECTDFAKRQDITIVGSYIDRALTGKTDARPQFQKMISDSGKQLFDIVIVYTLDRFARNRYDSATYKAKLKKNGVKVISAKENITDDPSGIILESVLEGMAEYYSVELAQKVLRGMTENALECKWLSGIIPLGYKLDDDKHLIIDDHAAPIVRKIFEMYAADDRIVAIAKYANSTHLKTAKGNNFSRCSFTHMLKNETYIGTYKWRDIVKTKVIPQFIPDGLFHSVQKRIKSRKETNVRGKSENFLLSSKLKCGKCGQFMTGVSGTSKQKRRYYYYQCYASKSKKCDMPLFPREKLEDIILAETIKLLSEPHTIEFIANTVANLPIDENTQISILETEITEIKNKLKNCIKAIESGLISDTISKNISEYEKKLSVLEKDLSIEKVLNEPFKITPDHVKFFLYNILQIKNADERQDMIISTFVRDIVLTKDDIGYTVKITYNYNENPSTSLDNSVQKGSQKSSLVAPTRIELVISP

SEQ ID NO: 24363 - protein, 543 aa, synthetic construct
MQKKDLIAYCQLILGTDNYEIFEDAGYSGKNTDRPAFQNMMGRIRKGEFTHVLVWKIDRVSRNLLDFAEMYEELRSLRVTFVSKNEQFDTSTAIGEAMLKIILVFAELERNMTSERVTATMISRANGGQWNGGRIPFGYSYDPKEKVFSIREDEASICRELKDLYLLNRSLAYVSRALNEKGYKTRAGVSWSPHSVWIIASSPFYAGIYRYNRYKGVESRTINPEEEWVMIQNHHPAIFTLEEHQAMRSIMKSNKRNMDNLPGRVHLSTKTHIFQGIMYCDKCGSKMVSTPGRLHVDGYRTSNYGCPLRRNTKKCNNPTVNDIVIGEFVINYILNMLNAKKTFSTINTPDELNAALLSGSVFSEVSSVEENGLNSFFNLLSRYGSDRSYIFSVKSPRKKKAAVDPELSKLRKEKEKQERALQRLQDLYLYSETSMSEKDFIIRKSEISSHLDNINRQLGLMTQDQASFLSDEEFIKQASHLLIQKELKNKKYIYFKKLVSTVDPDILKAYMETILDSIYTADGKITAITFKNGLTHRFIYKDK

SEQ ID NO: 24364 - protein, 437 aa, synthetic construct
MQIKEISATKLPDIGIKRVAAYARVSSEKGEALHSLSAQISYYNEYISNHIGWEFAGVYADEGISGTKDSRPEFQRLLADCRKKRIDLVITKSITRFARNTVTLLDTIRELKLLNIDVLFEKENLHSLGANGELMLTLLAMYAEEEARSASENQKWRIQKMFEEGRPNTGRMLGYCLKDGQLTIIPEEAEIVRMIFDDYLSGMGRLAIAKKLNAIHVPTVRGCDDWREGSIYRILHNEKYTGDMILQKTYVEDFRTKKGVINRGEKRKYFVENSHEAIISKEIFERAQAEAERRKAKIKLPEKRMKTIFTGMLICACCGKHFNRRVANASTKYAKPAWICATFMRKGKKYCNNRQIPEKILIAKTKEVLGLPSLEDIDLKDYISEIVCGKDYDLTYIMNSGAEVKTIWHPYSRKDSWNEEMRQQARNRTLERSTLYE

SEQ ID NO: 24365 - protein, 528 aa, synthetic construct
MNNAKRVTVWEPIDIQAMCEEESEIPKLKVAAYARVSTEQDEQQSSYEAQVDYYGKYIRSNPAWEFVGIYADEGITGTNTKKRDGFNRMIADAKAGKIDLILTKSISRFARNTVDTLQTVRELSTLKIEVIFEKEGIRTLDKQCEVMLTIMSSLAQEESRSISENVRWGMQKSMQDGNISLPYKRFLGYKKGEDGRPEIVPEEAEIIRDIYRMFLDGKTIRTIADILTERGIKTPGGKDRWSVSTVKSILSNEKYKGDALRQKTYTVDYLSKTVRKNNGEVKQYYVSNSHDAIIDEDTFNLVQAELERRSNFRSALRDNSIFSTKIICGECGYFYGRKVLHSNSKKHRKVVWYCNHRYDGDEKCASPSISESDIKKYYLEALEKLLSNKDSYITECQERLENEDVLVQLKETRQQAEISLEDLMAEIQGLVHENARKSQDQQKYRAKFNKFVQQIDEQKKRMAVLKAEELKLVGMREKLHRFIETLKNCKDATVFKEQEWNNLVERAVVKTESLDFEFKNGERIKITI

SEQ ID NO: 24366 - protein, 611 aa, synthetic construct
MISQFGFRSGVIKEDEECRVAALARVSTLHEAQMNALANQEQWLCDLIAQHPNWLFDPAKDLFTDEGKTGTTQKGRDGLKELLEKAMNKEYDLIIIREVSRLMRCTKDILTIVDDLHLRDVEVYFAAENISSFESSKRFELELRASLAQQESEKLGRRVKAGLQVTKTNGIITSGMNVYGYDYVPKGKNVSGLLVPNEEEAKVVQKIFDMCAKGYGLKQIGMTLKAEGIKDRTGSTTWLPSRLSRILHKRVYYGVLEYNQTETIDAILKSRKRKDKSEHTFIHSPYITPLITEETYNKAIKYLVSRTNKNLIGCKDMGGFKLTNDVYVQLIRCECGRRYRRNPGRNNTAVYACNDVWDNGSVNERLKVGGTSEGVCTLPGIIDWKLDLYTKKIFESLSIDLEGIKQSLRECIEECYTDENAYTKAKKRIMEIDRKLEKLERDIGVLVEKLVDSPELADVYEKSMLAKKEEIKKLKLEKEELDKVEDNLNAKEQCLKEVDEFLTENLCLEDTKVPDVIIRTYVNSIKIYNNNTFEYNIRVSETADTINMTEHNLNWSAQKKDAILKIDNSNAVVLTEIQVSTEEARQYARSRGRKLNTLRWSIPTLKAVANI

SEQ ID NO: 24367 - protein, 463 aa, synthetic construct
MTNKFTRCALYIRVSTAEQCMHGKSLEAQESYLQQYASDHNMIVVGVYADEGKTARKELKKRKAIHSLLEDVKAGKIDVILFWRLDRWFRNMSDFYKVQDILDEYGVRWMSASEPGINMETRDGRLQLNVVLSIGQNEVDTTSERIKFVNEASIRQGKLIFGDANMGYGYKSGIADGRKCMIKDPEREETVNAFYKYFFKHQNKCATLRYIQDNYDPNFSWAIMRTLLSSEFYKGTYRGFPYCPPYLTEEQWNELQKVAHKNIKRAKSGRIYLFTSLIRCPVCGQLLCGNGCKSIINRKTREKRDYCYYRCSRAHNDRICTYRHRLSQNLIEQYLLDNLDMEYRKYQIRVKKIEEEKKKIAQTKTPEKLNAELERLNLLFQKGRVEWDYYSSEYDRIEQELKDLSKIKPEVKRDLSFLEDLLQSDFKALYASLSPENRRAFWRSTIKQIHLNEDSTIKFVDFL

SEQ ID NO: 24368 - protein, 520 aa, synthetic construct
MKTNLSEEYAVYLRKSRGDSTLESLGVDVLERHEHMLLDLAKKMNITIGHIYREVVSGDSISARPEMQALLHDVEDFRWKGVLVVEVERLARGDTIDQGIVQRTFQYSDTLIVTPLKIYNPADESDQEYFEFGLFMSRREYKTIKRRLQNGKYAAASEGRWPFNASPYGFNRVRLAKGFTLDIDPAEAPAVKLAFSLFTGPDRIGVTMIRKYFSDHGILTRSGKQWTDGMIRDMLSNPVYDQKVAIGRRRTVTKLVDGRPVKTRPRSNDYKVYDGLHPRMIDHKIFLEAQSYLGLGVPKPPESYGVKNPLAGLIVCAECGHKLVRRPATRATTKNGAKYDTMLCRTPQCPTVGCSLEILEKELLNSLSDWVKDYELKTILPESHVKEKEDLVTAATSELSTLESQRERLYDLLEQGVYTKDIFLERSHSLQERINDARVRLSALELELANERQIDAHILNFIPSCKELLSTYWSLSAADRNQALRMLIESVEYRKYEKNKKGKKDDASFELIIKPRIPRG

SEQ ID NO: 24369 - protein, 604 aa, synthetic construct
MKKVFVYHRVSSDQQLDGSGIARQAELLEGYLERTGICAEMDDPAPVVLSDQGVSAFKGLNISEGELGAWMEQVRNGMWDSSILVVESIDRFSRQNPFDVMGYINALMAHNVAIHDVMANIVISRSNSKDLPFVMMNAQRAYDESKYKSDRIRKGWAKKREHAFNKGTIVTNKRPQWIEVENDKYVLNHKAAVVKEIFALYQTGMGCPTIAKQLQTKEGEQYKFNRPWTGELVHKILTNRRVTGKIFISEIIRNHDDIENPVTQKKYDMDVYPVVINEEEFELVQELLKSRRPNAGRVTVKKDGQEEVLIKSNLFSGIARCTECGGPMYHNVVRAKRTPKKGDPKIEEYRYIRCLNERDGLCENKAMTYETVERFVVEHLLGMDLSTVMKEQEFNPEIEVLRIQIDQVKDQITNYENGIERRKSTGKPISFEMREELDDAKSELERLLARQASLATVQVDVPVLQDVNVTELYDVNNVDIRTRYENELNKIVSNIRLKRNGKSYTIDINYKQNELKRHVLFVENKKKEQTLISEVIIEDVDGAKFYYTPSFMIMLKDGEIRFQQTKEDLSIVDYSLLLNYVDAIDRNDAVGVWMRNQFNFLTSN

SEQ ID NO: 24370 - protein, 515 aa, synthetic construct
MQYLIYLRKSRADREAELRGEGETLARHEKALLELARRQHLPIADIYREVVSGETIASRPMMQQLLSEVEQGVWDGVLVMEVERLARGDTIDQGIVAQAFKLSDTKIITPIKTYDPNNEFDEEYFEFGLFMSRREYKTIKRRLNNGRQASVKEGKYVGNRPPYGYERIKIENDKGFTLKPLEKEAQVVRMMFRWYAYGAHGISTIADQLNEMAIPSKTGKQWVYPTVRDILQNPVYIGKIRWGWRGQRKRVKNGSVSVSRPRSDDYLLADGIHPPIVDQQLFDQVQKKFSTHKPLPTSAREMKNPLAGLVICAKCGAKMQRRPYQRQNIRTGLICPNNKCRNVSAPFDDVEQMLIEVLAEYIKEEKLRISNGHTQIDDSVLQILQNQLTDLQEETVDLNKQNDNIHDFLEKGIYDVDTFLQRSQKISSRITEIEEKQKTLQQEIIEENKRIESATSIIPMTEQLLLQYENMSALEKNSMLKEVLRCVKYERECSIRDGGTADNFTLYLYPKISHK

SEQ ID NO: 24371 - protein, 578 aa, synthetic construct
MKGAIYSRVSTEQQDYSKQTNELKDYAKRNGIEVVYVFEEKESGFNNNRPEFEKLRKLTKQDIDIILVWEISRISRRAIYLQQQVQEFTDKGICIYAKKDGFSTLNDDGSVNASTKMLIGFASIIAEQEAATLKERTISSKRNKILREGKSYTYYAPYGYDYNKETKMLSINEKQAQVVKRIFQLSIDGYSTERIAILLNAEKIPTKGKKENWTAGTVCNMLTNPVYKGEANYTLKKEKKAGSTYCKPMEVVTISTPAIIEKEQFELSLQKLAERTKRSNSFGTKYNPLLRGLIHCPHCDVKYVYNFGTNQYLCVNKYKKASNKNVHCTAKCISNKLDSIVWNVVKTFFYKELAAGKAQEQIEPLQAEIESYKRQILLLDGKQSELTARANIIVDAAIEIKIQFPNMPDLYANKMKEVEEINKEASKYQKEKERLEKLIHSNDARIKNINRASKESALVESITDETEKYDLVHKAIDKIMIFGEGKTSIIIVTFSTGQTIYLGYSSKSNSKYYTIFYPSSDIYFDIQTSKGYINHLKEKATINSDGSIYLGDLTGEVKEYSIIDFVNYLDIEENRRYY

SEQ ID NO: 24372 - protein, 700 aa, synthetic construct
MDSNAFLNDLMSKMKLPEAKGKKKAEQSESVAQILAAMQKVKTEKKKPPVTSYAPTKEMPVNELESMEEFSQLASDVMQECRPAIPAVKTSISEKTVRVAAYIRVSSTNPAQEDSYEMQERYFMSLLAGNAGWTSAGIYSDHGISATSREGRTGFNRLLRHCKQGKIDRVICKSISRFARNTQDFLVALRTLKENNVTILFEREAMDTADAYSEFILTTLAAIAQEESRSISANIAWSNQKRFPAGNVCNKDIYGYEFRKGEYTVNENGYRYRAVFIIPEEAEIVRMVFRFFTKEELSFTQIAQKLDALHIPPPNSGCRQRQKRKPTVLPAGALKEEDKRGWTATDVRYMIANVRYCGSVLCQKTYTDHRNGHKQKVNKGEKPKYLIRNHHPAIISEELWQEAQEVWKAYTAKYRGIEKGRNERNYSKLLLCGECGRYFQGHSTTRTTIWRCATKLAQQGQKRCRMEPIYEEQIQALLRKAFAEKFKLGEKMDAEVHEVMQMISKAPIDNARNQALKNLTEKLREIHDFDHMEQEGDFLKRQLSAVNYSIRDVHQHIRDIQAEKEALKVRCEVLGEPRDKEAVTELENRLLNEEEQLEKLEHEAQQQAEQVRYMEDYWKKLEQTHEIREKTLQWLDSLAGGTQMFLDEAVGTYVKAFVLSVTIFSPKHFRIHWFDDTCTEVECDSVFEGYQQPGMIRRKY

SEQ ID NO: 24373 - protein, 523 aa, synthetic construct
MRFFSYGRKSVFSDKSDSIDNQFRMNREYCESKFSGQVDSWQQFSDEDFTGANTSRPDLQRMLSFIKGGFCDVLVVYQLDRLSRDVRDFANIYALLEEHSVMFISIKENIDTTTPIGRAMMYVTVVFAQMERETIAARVTDNMLGLAKKGYWTGGNPPVGYVRKHIVVNGKKHCSIEVDPDGARYVTQIFDTFLAYNCSLQGMETRFKNQGIRTQSGKFFSTTQLHKMLTMPYCVEATPEVYDFYAAKGCIMDPGSPREMWDGSVGVIIYGRSTEKNKKHQAQPPEKWTVCLGKHKPFMPAEKWLAVQSRFTQNKCIKDAKWPVPLLKGVLRCKCGNLMQVSRKKKVDGTCSSWYYCRKRMRQGVDACDMGQIKCDLLDEKVLELFRGITADPALIQKFVKAEAPTDVPDLKAAQARVSACERKIGRLAASLALAEDSAASKYIIAEMERLDVELGALKREASLAEMESHRAAASAKDAKATAAEIAKLIHGLDGFDDKEKNAIARAVIQECTWDGERLFITL

SEQ ID NO: 24374 - protein, 540 aa, synthetic construct
MKKRINTNSAARAVIYARYSSANQRDCSIEQQVEKCRELAARLGLTVIDVYEDRAISGKTDRRPNFQRMMKDADLRQFDVVLAWKSNRMGRNMLQAMTNEERLRDNGIRTVYAEEDFDDTAAGRFALRNMMNVNQFYSENMAEDITRGLMDNASKCLSNGSLPLGYKPGDDRHVVLDETEASIVQEIFTRVSCYEPFIDIARDLNRRGIKTKKGAEWGRSSFHTICRNERYRGIYIYRDVRVEGGMPRIISDELFYKVQEVLKVKKNPQGRRKRSGYEEYLLTGKLYCGHCGSPMTGIAGTSKTGAMHYYYTCQKRRTDHSCDKKAVRRDQIERAVGVAIQQQLLTDENIQMMADKLMEYNARTETKYRLQGLQDQLNANKTATANILKAIEMGIITDATKARLLELEKEQGQLLVKIDEAKAEMVPISRNDFVKLLYIYKEGEPTDKKYLAALFDNFLVRVDLYDDHLKITFDPTGGRQPIDMPIGAEESPESPGDSSESSDFEASSLDAEKFVLALHNCTKILERLFGDFFVLVICLG

SEQ ID NO: 24375 - protein, 492 aa, synthetic construct
MNVAMYLRKSRADENNPLETLERHKEILLSYAKDNNLTVIDIFEEVISGGMLYNRTEMLKLLDAIPSHIYDAVLCIDLDRLGRGSAADSEKIFDVLKENDVKIITLKKIYDLNNEYDEDYSEFEMFMARKELKFITRRMNRGRIKSINDGCFVSGAPFGYRNAVINKKHTLEVYEPEAKYVRMIFDMYVNQSMGITSISRQLANLGVLSKKNTPLHPTTIARMLRNHTYIGKIVWNKSKSVKGKNTQEKTSKDDWLYVPGLHEPIIDEDTFNKAQDIINLKYKPPMRTGTLQNPFAGLLKCANCGRAIVINTSNETVEKYRLCCRTLGCNKASALSIVEDKVFEVLTKEFKDIELSLKNIRQSHNKDKLSCLDTIATLETELKKLDKQQLRLYDLLEQEVYTKELFIERNNAISDRRKKINATIAQEREKFKLVDTSSIEERLPLLRELLTNYNSLSAAEKNSILKNFVKKIEYKREKSAPEGDIFLKIYYK

SEQ ID NO: 24376 - protein, 567 aa, synthetic construct
MRQSKNKKREVTAALYVRLSRDDNLEGDSYSIGNQKKLLTKIAKEKGYTNLLIFCDDGISGVTMERPDYIRMIEAIEDNKVSAVFVKDLSRLGRNYIEVGKLTEEFLPEYDIRLVAVSDNIDTAEGENELAPIKNLFNEWYARDISKKRRISNKIKGNAGEPMGLPPYGYMKNPDGSKSWVVDEEAATVVRRIFSMTMDGIGPHQIADILASENILIPTSYWQSKGIGRPGAKNTLSCQWKSSTIVSILTKQEYCGDVLNFKTYSKSYKNKKRIVNDRENWVVFKDVHEPIVDRSVWETIQERRSRKTRKKQKSDGEKNMFAGLLVCADCGSNLWYHFNQANPGIEYFNCSGYNKGKRKICNSTHYIRVDFLEKVVLGEIRRLTKLATQYESEFAKIVMGHSIKAAEQERQFKQKELHTLNARNDELDNLFEHIYEDNVSGKISDDRFAKLSVKYESEQKEVTARIKELETELNTEKSKSVTADMFTASVRKYTRARKLTPRMLNELIEKIEVHQSEKIDGKTVQQLTIHYNCIGNIEIPDLEKLPENNVSVHTRQGVDVHFAACAC

SEQ ID NO: 24377 - protein, 512 aa, synthetic construct
MLADYLEKIRTKTNVLVLKAVIYARYSSDMQRGESIDAQVRLIREFARKNNIIIVGEYIDEAQSAKRDDREAFQKMMKDSKSANWQIVIVHKLDRFARNRFDSATYRVHLRKNRKYLISAVEQFDDSPESAMMEAVIEAMSEYYSKNLARETMKGLTENALKGKSCGGIPPLGYDLDEYKFYKVNEFEAQGVKLIFKLFLEGKTYGEIISKLNVAGYRTKCNRLFSRNSLYEILRNEKYKGIFVYNKTQSRDELTGKRSGHRYKSEEEIIRINGAIPQIISSEDWETVQLILNSRRKAYGNNAKEVYLLSGKIKCGKCGGSYAGRRVFNSCGVKYIYYACNGKRNPNYKCDNGSVKRDWIEDIVVQATKEFVKRFNATYFEDIQSEYIKEVENCNHKEIKTLQDKLNSVESEIQRLVDAISKASLESLISRLELLEQQKKEIQAEIRKIEIRNDNFSTEPIKKLLSKAEKMLEEESAPLKELINLVVKEIVVNESDIQIYMNCFDKTITHKR

SEQ ID NO: 24378 - protein, 510 aa, synthetic construct
MIENYLDKIKQRLNVVVLHAVVYTRYSSDMQRGESIDAQIRLIRKWSDEHSIVIDKIYADEAQSAKSDERKQFQQMIADSKKQKDWQLVLVHKLDRFARNRMDSAAYRVELRKNKKYLISTTEQFDDTPESCMLEGIIESMAEFYSKNLAREVMKGLTENALKGKTCGGTPPLGYDLDERKYYKINEFEAQAVKLIFQLFLEGKTYGEIISKLNTSGYRTKCNRLFSRNSLYEILRNEKYKGILVYNKTQSRDEITGKRSGHRYKSDEEVIRVDGVIPQIVSPEDWDDVQLILNSRKKAFRNNAKETYLLSGKIQCGKCGGSYDGRRSFNSCGTKYIYYACNGKRNPNYKCNNNSIQRDWIESYMINIIDNYIHHLSKAQKQNIYQLCFDSAQSSKKADISILNQRLNSLNKELSRIVDVITITNSTTLIEKLTDLEQQKAEIQLRIKVLSQEKGKILSKQKINLLLTKIKKMLKEKSVPQLKELMDLIVNEIIVNDKDVIVYLNIPIVN

SEQ ID NO: 24379 - protein, 537 aa, synthetic construct
MAKKKKPAGGNAIIYARYSSHNQRDVSIEQQIEACRKHAAELGLTITDTYEDRAISGRTDNRPAFQRMMRDAEDGKFQYVLAWKSNRMGRNMMQAMVNESRLMDCGVKVFYAEEDFDDSAAGRFALRSMMNVNQFYSDNLAEDVRRGLMDNASKCMANGRQPLGYKRGEGGKVVVDEPAAAIVREIYTRIASGEMFMDIARDLNRRGIKTQSGSEWNKSSFKVLCRNERYRGIYIYGDTRIEGGIPPIVDDVLWYKVQEVLKVKKSKNRHHCPSDEDYLLTGKLRCGKCGGYMIGMSGRSKTGDVHHYYACQNRRVGHTCDKKNIRRDVVEPAVAQAIKQYCLTDDAIEWITDQTIAYWEDEDRKLQIDSIENDLSAVQSSISNVMKAIEMGVITETTRDRLIELERQQTDLKSKLALAKEEIVHVDRKDLISSLLAFRHGNVHDRAYQEKLFNAFLIAVYVYDDDHLKLVFNSFGKDDTVNIALDLGENDDNSGLSDVSKSSPILSNGQPESHLIRSDGFFVLSLGAFLGRCDTKL

SEQ ID NO: 24380 - protein, 516 aa, synthetic construct
MSYCIYLRKSRKDLEAEQHGEGETLARHERALLSLAKKNNLIISNIYREVVSGETIAARPVMQQLLHEVEQNLWDGVLVMEVERLARGDTIDQGVVQRAFQYSNTLIITPSKTYDPANEFDEEYFEFGLFMSRREYKTIKRRMQNGRYAAISEGKWPYNSAPYGFRRVKLEKEKGWTLAFDENEAPVVRLIFSMFTGPERVGIRSITRTLNSYGTKPRNSKLWSESTVRGILSNVVYDQCVKIGERKVVRTVENGVLTTTRPRTSDYTIVSGRHPRLIDHDVFAEAQSYLGCGFPKPAGSNIIKNPLAGIIVCSECKKKMIRRPPSGTASRVPYDLMLCSTYDCPTIGSPLDLVEREVYNALSDWVEGYRLSGQMPSKSLIPEKEVLLESAQQTLDQLLRQKGTMYDLLEQGVYSTEVFLERSDSLQNRISEAESNVAQLKLELDKERQREANIEQFLPACEDLLSCYWDLSIPERNRLLKLLIESIEYKKLTKNKRGHLNEPNFELTIKPRIPRK

SEQ ID NO: 24381 - protein, 492 aa, synthetic construct
MNVAMYLRKSRSDENNPLETLERHKEILLSYAKDNNLTVIDIFEEVISGGMLYNRTEMLKLLDAIPSHIYDAVLCIDLDRLGRGSAADSEKIFDVLKENDVKIITLKKIYDLNNEYDEDYSEFEMFMARKELKFITRRMNRGRIKSINDGCFVSGAPFGYRNAVINKKHTLEVYEPEAKYVRMIFDMYVNQSMGITSISRQLANLGVLSKKNTPLHPTTIARMLRNHTYIGKIVWNKSKSVKGKNTQEKTSKDDWLYVPGLHEPIIDEDTFNKAQDIINLKYKPPMRTGTLQNPFAGLLKCANCGRAIVINTSNETVEKYRLCCRTLGCNKASALSIVEDKVFEVLTKEFKDIELSLKNIRQSHNKDKLSCLDTIATLETELKKLDKQQLRLYDLLEQEVYTKELFLERNNAISDRRKKINATIAQEREKFKLVDTSSVEERLPLLRELLTNYHSLSAAEKNSILKNFVKKIEYKREKSAPEGDIFLKIYYK

SEQ ID NO: 24382 - protein, 628 aa, synthetic construct
MIDWKAVTKDTVIRVAIYGRVSTEHEMQQQAFENQLQWYEDLLRKNPNWKVVGSVNTYTDRGITGTQAQKRPNFLRMIEDAKAGKIDMIVTREVSRFARNTMETLKYARELKEKGVEVYFVNDNIRFIQDHDGGEVKLTIMAGLAQEESRKISERVKAGQHIARKNGVLYGTGNILGYTRVRGVHDKDKIGKIGDKSVPTFIINEEEAETVRRIFELYKEGYGLTQIRIKLTQEGRKNSSGQVKWHDSTLSKMLANPMYIGKQLQHKTEVVDYLTGKIKTIPKEEHELINGDFEPIIDEETFNIVQRIKADRSKLSPKNHGGKAPTDKWTQKLMCSCGSRFKKEGRASADNKSQNIFYACRHRSIDGSTERRKQLNLDTKGACDVRSIPAWQFELMGMLVFKGIWKTHFDAVINAFDEMDEREQEKKSSTISIADRCEAQIRKITRQRDRLIDLYTDEKIDHDVFTSKYAAYTAAIEKQKEIISECAEEQKIDKDEAGAFLKKMQRMINVSGTQLDNETVEKFIDRVIVQSDHCFEWLVNVTGDAQTATPELFPMRGYGSDKTSTRIVNYADAAKNAIEVRDKYYAHAFAFTIPFEEAQKLRDKCGTHVRPGRWTDLLVDVYVRTTKV

SEQ ID NO: 24383 - protein, 526 aa, synthetic construct
MPKVTMIPATINPLTHLPKVTAQKRRVTGYARVSTDSDEQFTSYEAQVDYYTKFIQSKPEWDFVKVYTDEGISGCNTKKRDGFNSMISDALAGKIDLIVTKSVSRFARNTVDSLVTIRKLKENGVECYFEKEGIFTFDGKGELLITIMSSLAQEESRSISENITWGQRKSFADGKVHLAYKRFLGYEKGEDGRPTIVESEAKVVQLIYRLFLDGKSQAAICRCLEDLGIPSPGGKDKWSKTTVTSILQNEKYKGDALLQKSFTVDFLEKRMKPNEGEVPQYYVEGSHPAIVDPDEWDHVQTEFARRKALGRAYSGKSVLSAKLVCEDCGGFFGSKVWHSTDRYRRTIWQCNSKFKAEERCHTPTVNMETVQRLFAQAYNRMMENREQIIKDCETMRRALTDFAELDAEIERQLEETQVVAELVKAAVKENASTAQSQEAYLRKYEALTERYEKAAAELERLQNLRTTQSQQDKAMALYIRTLKKQPVVLREWSDTIWTVMVEKAIVHRNGAITFVFENGTEVKVGE

SEQ ID NO: 24384 - protein, 543 aa, synthetic construct
MSVAVYCRVSSEEQAERGTIEIQKEFAAKYVDLYQLEVFDYYCDDGISGTIPVEARPEGSRLFRDAREKKFDTILFYKIDRLGRKVRVILNAVHDLEELGVSIRSMTEPLETETPTGRFMLTSLAGISELERDTILSRMWAGSQRAARLGNWLGGIVPFGYHVVDKQLRISDDIMPGCNLSEADVIQLIFDLSGNQKMSAIKISDYLNALNIPTRYDLNGINGKRKKNASSIWYPSRILSIIKSTTYKGTHKYGKRATNKNSKIILRPVPAIVSNELWEKANEALKINQITAMRNAVREYLLRGIIKCGNCGRTYMGTAYSGSGRKKIPYYVCNAKNSYLAHNTEKCISKNVRADWLEHLVLEDCIKILKSPNKILNMDSEKEQETPTNEVKKEHDQIKASLKKLSEERASIIELYRKKIISETDLSCQLEKLSTEEATLQERLKMKIDSKKSAATKQNKEKTISLLKEFADRCQNLDPEKLSFETRRAIIELIVEKITVTTESAPEKYYPEISVDIEYRFATTPNHIAYVEDCTVTGSALCT

SEQ ID NO: 24385 - protein, 581 aa, synthetic construct
MARKRTNLIGNTPSVRETKVAIYIRVSTIHQVDKDSIPMQKKDLIAYCQLILGTDNYEIFEDAGYSGKNTDRPAFQNMMGRIRKGEFTHVLVWKIDRVSRNLLDFAEMYEELRSLRVTFVSKNEQFDTSTAIGEAMLKIILVFAELERNMTSERVTATMISRANSGQWNGGRIPFGYSYDPKEKVFFIREDEASICRELKDLYLLNRSLAYVSRALNEKGYKTRAGVSWSPHSVWIIASSPFYAGIYRYNRYKGVESRTINPEEEWVMIQNHHPAIFTLEEHQAMRSIMKSNKRNMDNLPGRVHLSTKTHIFQGIMYCDKCGSKMVSTPGRLHVDGYRTSNYGCPLRRNTKKCNNPTVNDIVIGEFVINYILNMLNAKKTFSTINTPDELNAALLSGSVFSEVSSVEENGLNSFFNLLSRYGSDRSYIFSVKSPRKKKAAVDPELSKLRKEKEKQERALQRLQDLYLYSETSMSEKDFIIRKSEISSHLDNINRQLGLMTQDQASFLSDEEFIKQASHLLIQKELKNKKYIYFKKLVSTVDPDILKAYMETILDSIYTADGKITAITFKNGLTHRFIYKDK

SEQ ID NO: 24386 - protein, 528 aa, synthetic construct
MQETNISINEIIMYLRKSRSDDPYMTVEEVLARHERQLQEYALSSFGSIIPEERIFREVVSGETIADRPVMQSVMKYLESGQIKGVLVIEPQRLSRGDLEDCGRIINAFRYTNTLVLTPPKTYDLSDEYDRKFFEMELTRGNDYLEYTKKILNRGRLASVKQGNYIGSIAPYGYRKIKTGSGKDTAHTLEIVPEQADAVRMMAQLYLAGNGFTRIAAHLDSLGIKPLKSDHWSPAAISDILSNPVYIGMIRWNHFKTIKTMQNGQIVKSRPTNHDTDYILVPGKHPAILDQGTFDAIAQRRGKSPKIKRGHELRNPFAGLVFCGTTGCGRSMTFKQFTNYRSKVPRRSESMICPNQRICHTKSVQYSAFVERVKEILSKTVDDFEIKLQNDDGNIVRIHENIIRNLEQDLVKLKDKDLRQKDAYEDGIYTKEEYASRNAKLQEQICEVQLSIQRAKDTMLPEVDYQERVSRFSDCLSKFEDTDISASEMNLLLKSCIEKIIYHNSSESKPGIGRFVANPFELDIYLRL

SEQ ID NO: 24387 - protein, 602 aa, synthetic construct
MYSSGKERDFMPNLRKIEAAVPAIREKKKVAAYARVSMQSERMLHSLSAQVSYYSGLIQKNPDWEYAGVYADDFISGTNTVKRDEFKRMLADCEAGKIDIILTKSISRFARNTVDLLETVRHLKDLGVEVQFEKERIRSMDGDGELMLTILASFAQEESRSISDNVKWGIRKRMQNGIPNGHFRIYGYRWEGDELVIVPEEAEVVKRIFRNFLDGKSRLETERELAAEGITTRDGCRWVDSNIKVVLTNVTYTGNLLLQKEFISDPISKQRKKNRGELPQYYVEDTHPAIIDKATFDFVQEEMARRRELGALANKSLNTSCFTGKIKCPYCGQSYMHNKRTDRGDMEFWNCGSKKKKKKGTGCPVGGTINHKNMVKVCTEVLGLDEFDEAIFLEKVDHIDVPERYTLEFHMADGNVVTKDCLNTGHRDCWTPERRAEVSMKRRKNGTNPIGASCFTGKIKCVSCGCNFRKATRNCKDGSKVSHWRCAEHNGCDSPSLREDLLEQMAAEVLGLDAFDAAAFREKIDRVEVLSSSELRFCFKDGRTVSRNWQPPERVGRPWTEEQRAKFKESIKGAYTPERRRQMSEHMKQLRKERGDKWRREK

SEQ ID NO: 24388 - protein, 532 aa, synthetic construct
MTTERKKKTTEEKVKRNTTKKASNTTRNTQPKKNSKKKTNNLPLALPDFQTFLESDKPLDEFLKITACYVRVSTDAQAEQGYSIPDQTAKLQAFCTVKGWENVKFYTDPGFSGSNLNRPAMQELIADAMAGRLKAVIVFKLDRLSRSQKDTLYLIEDVFLPNEVDFVSISESLDTSTPFGRAMIGILSVFAQLERENIYLRTRIGMKGRISSGFWRGGGNIPFGYDYDKDKKTLVPNADAPKVQQIFNLYIKGYSCQKIADMLGLCNDMMVRNILKRRTYCGYVNYKEEEYPGVHEPLISEETFDIAAAEYDRRSRAGLNACGTNTYYLLAGLVYCGDCEARMRYMKWGKYFKIICYSHTSKASMVKNPDCPNMGFLASDIEELVINKLFGIGSGVPLEEFEVKWHSPNTREIIEKRISDATTKLKRLYGLYSESGDSVIHERIFAVRNQIRTLQQELDNEDKHSIRDSHVSYVRDRIKNVGDIWPHLTPMERQTLIRDCVDKIIIHHDGSVEIFFSFSTFDEDKQCIEEEN

SEQ ID NO: 24389 - protein, 590 aa, synthetic construct
MKTVEKIERKLPVLKTRMRVAAYARVSMESERMQHSLSAQVSYYSALIQKNPEWEYAGVFADYGISGTGTKKREEFNRMLAECEAGNIDIILTKSIQRFARNTVDLLNTVRHLKDLGIEVRFEKENINSLSGDGELMLSILASFAQEESRSISENVKWGTIKRFKQGIPNGKFSIFGYEWQNDKLVIVPEEAEIIRWMYAEYMKGASRIEIGRALMDRGIYTRQGKPWVDSNVKVILTNITYTGNMLFQKEYCEDPITKHRRKNYGELPQYFVEDTHEAIIPMDEWQAVQAEFKRRRDLGPFGNKSLKLSAFSTKITCGCCGKHYRHSGKRNTAGEVYYIWTCQTKSQKGASACPSKNIPEKMLQNTTAEVLGLVEYDEDAFSQQIEEVIVIGDDTLTFRFYDGHEVTTKWQSTAKTDWWTDERRKLWGERHKRKDTNPNRHLFYEFTGFIKCGCCGANYRCQSGKRKDGTPTRSWYCTGPKDQCHNPGIRDETMKRLVSDVLGLDEFDEAAMDAQIESATILDHTVTFHFRDGHTESREFLDKRHGTPWTEERREKARESMKAAWTDERREAMSERIKKIRSEKKWPNP

SEQ ID NO: 24390 - protein, 523 aa, synthetic construct
MAKSVTTIPATLSRFTAAPINSTKKRRVAAYARVSTDNEEQLTSYEAQVDYYTNYIQGRDDWEFAGVYTDEGITGTNTKKREGFKSMVADALAGKIDLIITKSVSRFARNTVDSLTTIRSLKEHNVECYFEKENIWTFDGKGELLLTIMSSLAQEESRSISENCTWGQRKRFADGKVTVPFKRFLGYDMGPDHNLVVNPEQAKLVKRIYGMFLQGQSPFQIARTLTEEGIPSPGGKDHWNPSNIKSILTNEKYKGDALLQKSFTVDFLTKKKKANEGEIPQYYVKDNHEAIIDPETFEMVQTLMATRKKGRNRKSSVSIFSSKVKCGDCGSWYGPKVWHSNDAYRKVIWQCNHKFDGQKCATPTLTEDEIKELFLRAANQVIDQKEQFIAIYEQVLSRSLDTTALEGELSDLEAEINIAAELIEECIKENAHVALDQAEYQKRYDGLVARFDKAKARHTEVTDLIAERTARKHQIETYLKELQSRVPLTEFRETDWLAMVDYITVHRKNDIRVTFKDGTEIKA

SEQ ID NO: 24391 - protein, 545 aa, synthetic construct
MMQATSVQPQKTVRIIPATIDTKAAITQSYRQLRVAAYCRVSTKQDEQLNSYEVQRTHYEERIRTEPKWSLVGIFADKGITGTSMKKRDEFNKMLRLCYKGKIDMIIVKSISRFARNTLDVIKITRKLREINVDVYFEEQGIHSIDPASEFYITIYGSIAQSESENISANVKWGKAQSAKQGNVPFQCKHFLGYTKNADGEIEIVPEEAEIIREIYEQCLSGESLYGIKCYLEAKEIPTPAGCSVWRQETIRSILSNEKYKGDAIINKTYVSDCISKRVKANNGERNKYYIENNHPAIIDAGTFARVQEEIARRSGKPKVKQKGTKTELSRYSSRYALSELLICGECRTPYRRCTWTAKGKRKIVWRCINRLDYGKKYCHHSPSIEESLLQDAVMRAIMQTAKQNVEVLKTLKIHIGMGLTDEVTEDKTLDIQIRIAEIDAEFQKMLKAVSADNADGIDEERITELMNEKQRLTVQLEQYAAMRQKRESAKSRLDEIFTILDGLQNHPMEYDDKLVRQIIECVVVESKDKIKVVFIGGTEIEMAL

SEQ ID NO: 24392 - protein, 451 aa, synthetic construct
MEKRDDFRRMLRDCKKGLIDRIIVKSMSRFARNTEEMLTALRALEQMEVSVYFEEQGLDTKSMNSEMFATFPGMVAQQESVSISQNMRWSYKKRMESGEFNCCAPAYGFDLINGKLVINETEAAVIRRIFDLYLQGIGMQTIANILNDEGVRRQYGRKKWHHTTVNYVLNNERYKGDALLQKQITTQTLPFKKQLNHGEQPMYYVENSNPAIVSRETYEAVQALIKSRQPSCKRKAKNYPLTRTLLCPDCGHTFRRQVVNGTAYWLCAAKATNKTDCAWRRVKEDEVYAAFNLMIRKVQANREYLLGTLIRQLEELQYRTTGSQQRVKEIDREIADLTAQNLVLSRLHGKGVLNAADYTAQSDVLENKITELRIERRTKITDSDENEMLEELKMLNDILKEVKIGIGFDAELFEQTVDSITVESSELLTFHLAGGISLPEKIREKGRCYQA

SEQ ID NO: 24393 - protein, 464 aa, synthetic construct
MARSVTVIPARSQKVQTGHKAVQEKKIRVAAYCRVSTDQEDQLHSFEAQVEYYTKYINEHENYEMAGIYADEGISGTNTKKREQFKKMIADCEGGKIDLVITKSISRFARNTQDCLAYSRKLKNLGIGIIFEKENINTLDSTGELLFTILSSLAQDESRNISENCKWGIRTKFKNGEMHLNTFKFLGYDKDENGKLVINKEQAKTVRRIYRDFLIGINPAQIAKELTEEKVPGCLGQTKWYPSTVTGILKQEKHMGDALLQKTYTADFLTKRQVRNNGEIAQVYVKDSHKGIIDKQTWNAVQEEFDRRERFMESHGTDRYSYGADCMPFCEKVFCGECKSLFTRHSWRSRGIVQWQCKNHRKDGKVACTNAYVDNADLEKGFVKAFNILVTDRDKHMERWQQMKSDGTPLEKIRAGQMMEAVENEPLTRFVPEIAQLVLCEVTVLGAKKYEFFFLEGSRVKVSV

SEQ ID NO: 24394 - protein, 502 aa, synthetic construct
MEIQIREGNSRQKQKLKVCAYCRVSTDADEQENSLENQIRHYKEVITSNPDYEYAGVYSDFAISGFKEKRPGLQKMLADARKGKIDLILTKSVSRFARNTSIVLEATRKLKELNVGVFFELQNINTLSGEGELMLTILAAFAQAESESGSVGAKMVYQRKYEAGIPVQYLERSFGFKKDERGVYIADEEEAVWVRKIYDMAAQGYTLAAIKRYLNENNVKTVGGAKWLDSTVLRILENEIYKGDYIMHKYFVNEERKLVRNRGEVDAWYIEDDHEAIVSPKLWQRAQDALEAKRDYLAEGSVIEEFTEENYPYMNKIFCARCGHPLYKRIYSNGNRLNWGCSGTKRYGKSFCEGINIPDGVLRGAWNFDENMYIGEKPTDKGKKEFTYLKEASWKRRHKKKEPEPIPENTETEYPYREKIFCGLCGSRLVRHVNTKSHKVIWVCNGRKRKGKDFCDGTRVPDTIIKGWGEIKKDIYIQRKDDKNGKKRYSYTSKKPKGADRA

SEQ ID NO: 24395 - protein, 570 aa, synthetic construct
MEVFNLEKNLKCALYIRVSTFHQIDKDSLPLQREDLINYAKYILGIDDYVIFEDAGYSGKDTDRPSYQNMMTRIRMGEFSHLLVWKIDRISRNLRDFSDMYDELKKYNVTFISKNEQFDTSTAMGEAMLKIILVFAELERKLTAERVFAVMMSRAEKGLWNGATVPLGFIWDEEIKFPKIYEPEAKIVQYIFDLYEKKRSTTKVAEQLNQENVKTKRDGTWTPRTVGAILTNPFYIGTYRYNTKTQKTRRWKDKSEWIVIEDHHPAIISKEQFERVSKILKDNYRGDYNRQRASKNVHILSSIIKCFKCGSNMNAGNDRARKNGFTPSRYTCYQIHKTYTCNNYASDLTVLPFIINYIGNYMTLQDRITKNHSYRDMESILLRGKYFTDIVHINKDDIKCTYKLLVNNLSVINYKLQENQEDKKTTFKDRYDIYKNEKEKQENALKRLDDLFLYAEDSMPKKDFILKRQEITNKIEEINSKIQELRAEENNFVDNKEFSLNAKASFYLITQLIGNSKNIDVRYLLENVDKSIIKDFLSTILNEVSVDHQKVQYITFKNGLTHHFEYKENQ

SEQ ID NO: 24396 - protein, 513 aa, synthetic construct
MSEVRLITPITRQSTKKMQVAAYCRVSSNSADQLNSYAAQIRAYKKYIGERDDWELVDIFADEGLTGMKSETRDEFQRMIRMCELKQIDLIITKSISRFARNTKDALVYVRKLKLLGVGVQFEKEGISTLSMGDEMLLNTFSALAQEESQSISMNQRLSIVKRMELGEYVDSNAPYGYRLVDKMLAVYEPEAGIVRNIFALYLQGFSTSEIARELNKLNIPTKAGKETWRPSRVAYILRNERYIGDSFYQKTYRETTVPFNQHTNRGQEDRFYAKGTHPGIVEKNVFDAAQTLIEKRKDVFAKATTQNIYPLTSRIQCSECGSFYRRRIVSGTVKWVCSRHKDDSTACSSNYYSEERIYDGFISMVNKLRFSEDNILGQVISRLEMTLAAMKRNNMAARDLSKGIAELNAKLLMLEQLRSKGYLAPEVYQAQANEINAELAKLKDVRQEKFNSKAATMLEEVRKLKMLIFELEEPLGVFDEKLFLEIVKSIQINKEDEMSVELLGGLRFRERI

SEQ ID NO: 24397 - protein, 543 aa, synthetic construct
MEVTKVPKKIVTVIEPKRSMTVDKEKYRQKRVAAYCRVSTDSEEQLVSYANQKKVYTEMIASRKDWCFAGLFADEGKSGTRADKRPEFNKMINDCLAGKIDYIITKSVSRFARNTVDCLDYVRMLKSKGIGIYFEEQQIDTLKTDSELYLVIYAGFAQSESESISKNITWSVRKKFEEGTPVFMYKRFLGYKKGADGEPEIVPSEAAIVERIFNLYLAGETVDKISKMMQAENYDIPDKTISFSKGMIMNMLSNERYCGDAILQKSVTIDCIEKKRKKNTGEAPMYYVQNNHPAIIDRVTFNKVQEELARRKTKTPGSAKSSITSTGKYSRYALTDVLICGNCGTRYRRVTWSRNGVKRIVWRCISRLDYGKKYCSDSPTIMEDKLQEAIVRAVNKFNEQDNATYKALMRATISEALGLNGDPEEVDMLERKVEALNNKMLALVNESVSSGDGIEAHESEFMTLSQETEFLKLRIAAIQESTAKDNGEQSRLEQIQAIISERESKCMEYDDSIVRQMVECIKVYPGGKLEIIFGGGYLVEESV

SEQ ID NO: 24398 - protein, 604 aa, synthetic construct
MQKSSNHLGSQVGVIYARYSSSGQRDESIEGQLRDCHAFAERYNIRIIEEYCDRAMTGTSDRRPEFQRMIRDSSKGQFNVVITWKNDRFARSRYDSAVYKAKLKQNGVRLLYAKESIPDGPEGIVLESVMEGFAEYYSANLSQNVKRGNYDSALKRQTLGQTVFGLRKGADKRFEVDPATGPVVQRIFREYAAGQSAVSIYTALNEEGFRTLRGNPFNKNSLRKILQNEKYVGVYEYADIRDEHGIPALVSRETFDRVQIMLEKHHRSPAAKKDAGGFLLTTKLFCGACGEPMTGDCGTGKSGTVYSYYICNGRRARKCKKERVSKEWIEDVVVAALAEVVNNDEMITSFADHFVAWQATQQTGSAVADLEQRIKQIDMAIKNTMSVIDSGLITESLKTHLLELEAEKTALADALAKKRLDTVELDRDTVIWFLERFRTADLSDPGWRIYIVETFLQAVYLYDDGRLLLRLNYGGKNNEVSLKAVEETVAEGEQLSSMFEFRVPRRTKNNLCRKAKVIFYVCGINSAVLLRTARHCRYEQAADQNEQTACILCLQRRSVTALYRDIQPCEGAGVPPHHLTCHCEEAAGRRGNLGKAVTVLPELS

SEQ ID NO: 24399 - protein, 537 aa, synthetic construct
MKQQIYNTALYLRLSRDDELQGESSSITTQRSMLRLYAKEHHLNVIDEYIDDGWSGTNFERPSFQRMIEDIEAGKINCVVTKDLSRLGRNYIMTGQYTELYFPSHNVRYIAIDDGVDNEKGESEIAPFKNIINEWVARDTSRKVKSAFKTKFAEGAHYGAYAPLGYKKHPDIKGKLLIDDETKWIVEKIFSLAYQGYGSAKITKILREEKVPTASWLNFTRYGTFAHIFEGKPESKRYEWTIAHVKAILKNEVYIGNSVHNMQSTVSFKSKKKVRKPESEWFRVENTHESIIDKEVFYRVQEQIKSRRRQTKEKATPIFAGLVKCADCGWSMRFATNKANKTPYSYYACSFYGQFGKGNCSMHYIRYDVLYQAVLERLQYWAKAVQQDEEKVLNKIQKVGNAERIREKKKKASALKKAENRQNEIDRLFVKMYEDRACEKITERNFVMLSSKYQKEQIELEQQITNLREELSKMEQDMIGAEKWIELIKEYSVPKELTAPLLNAMIEKILIHEATTNEDNERIQEIEIYYRFIGKVD

SEQ ID NO: 24400 - protein, 505 aa, synthetic construct
MNKSILSAMYLRKSRADDPGEDVMDTLHRHESILRAVAKRGKYLVHEDCIYREVVSGENIFSRPQMIRLLEDVTKGKYQSVLVVDIDRLGRGDMRDQGLILETFKAADTLIVTPEKVYDLNNEMDEELTEFKGFMARREYKMITKRLKRGREQTVRAGGFVADPPYGWKRAKINNLPSLEPHETEGPIMQMIVEMYGNQEPISTIQERLAAMGVYNRKGQPFCRSSIRHIATNPVNAGLIRWNRYKNIRKGQNGSPTGYEIENPPEDVILVKGVHQPQVSVEAYQKCVNVCKSRAAPSVKKGLHGVVRNPLSGIVICSNCGSRMQMQHSSTKDTRTLLCTHPGCMPGVDIVRAEAAMLDILRDKLEEIRTGQGKKQQDKALAALQKSVHAAEKNIQTLKKQQDKLYTLLEQEVYSLEVFKERNQVISQKLTDAQEQLKIMQDQVDDLSSRKEERLAQNIEDVLANYEYSSIKEKNRLLKTVVEKAIYFRKTRTSPFALDVTFINM

SEQ ID NO: 24401 - protein, 510 aa, synthetic construct
MSYFIYARKSRKDADLEALGIDVLERHITTLLELAKTLSLPIGAIYREVVSGDSIDSRPVMSQVMAEVESCMWDGCLVMDVDRLARGDTIDQGRVQRAFFYSNTKIVTPNKTYDPANEYDNEYFEFSLFMSRREYATIKRRMQRGRERSSSDGYYVGNIPPYGWRRVIAPDGKHFSLAPDPTESPVLDLMYDLCGNKQYGYQKACTHMAEMGILSRSGRPFTPSTLKGIISNPANIGKVRWGHRKTVRTVKDGKISRSRPHSSDYILADAVWPPRISADLFQRANKPKGSCSAPVRDDRPIQNIFAGLVRCSQCGRLMVRKKAHTKTPYDILICQYTECPTVGIRIDELELALLEWLQNYIDKYELTDALPEDAENVTTKEAIVKNFEKEHEMLLKQRESLFDFLEQGIYTKEIFIERSNALEQRVKECMKHIISAQNDLHATLALQANRKNFVPRCKNLLGEWNGLTIPEKNSALKVLIEKIMFTKTKRNKKGQDRSDFEIDVFPKVPK

SEQ ID NO: 24402 - protein, 513 aa, synthetic construct
MTTVTIIQPTISEEQNHKLRCAAYCRVSSNSEDQLNSFMAQTRYYEKAFEKSDREQLVDIYADEGITGTREDKRDEFQRMISDCRKGRIDRIYTKSISRFARNTKDCLKNIRELKSLGITVLFEKENIDTADMTDEMMITIMGGLAQEESTSISQNLRWSIKKRMENGTIKMCKAAFGYKLVNGELVLKEDEAEIVRKIFEWYLSGAGTTQIANKLNSMAVEKYGKECHWTSGTVCTMLKNEKYIGDQLFQKRYTTSVLPYKRVYNRGEHAKYYYSQRHKPIITREVFYKVQKILNEQKKAHKGFQHKHIFSKKIYCGECGTIYKLKKSKTEACWVCRNHDYDSASCSMKRVSERNIKSAFVKLHNKLLYNYRQILTPLAVNLERVNLKSLSNNTDLLEIHKQIAKLKEQTHVLARLKTKGFLDEAKYLEQTTELNSKTAKLQTEIKKLNVSDEEDETLEQLDMLIGYFEKRQKLMVEFEESAFESIVDKIVVKNQNELEFHLIGGLELAEEI

SEQ ID NO: 24403 - protein, 538 aa, synthetic construct
MSTAPNVMIIPAKVQTAESRRKYHQLRVAAYCRVSTAQEEQQNSYQVQIAYYTDLINRKKEWTLAGIFADEGISGTQTKKRTEFNHMIRMCRNKKIDLVITKSISRFARNTVDCLEYVRQLKDLGIGVIFEKENINTLTMTSEFMIALYGSFAQAESESISKNVSWGKEKAYREGKVQFQYKYLLGYKKGEDGKPEIVPEEAETVRLIYTLFLDGYSMSRIKKLLENKGILTSQGNKVWNESLIRSILKNEKYAGDALLQKTFTSDCITHKIVKNHGERPMYLVTDHHEPIIDRDTYNRVQQELARRSSKRKVSDKTITEQGKYSSKYALTELLICGKCGTPYRRTTWVSRGKKLIVWRCISRLEHGRRYCPDSPTIKEENLHRGIIRAINNYYSCRDDIKRILKANISSVLECQGQKEILATEKRLKEIDQARTDLVGLIASGGCDEDTLDGDFAKLYAEEQDLNERLKMLKLQNQTSDETQQKLDKVTKMIEHEKFELETFDNVLVRKLIECIKILSKNEILVIFKGGYEVRSEIE

SEQ ID NO: 24404 - protein, 545 aa, synthetic construct
MMQATSVQPQKTVRIIPATIDTKAAITQSYRQLRVAAYCRVSTKQDEQLNSYEVQRTHYEERIRTEPKWSLVGIFADKGITGTSMKKRDEFNKMLRLCYKGKIDMIIVKSISRFARNTLDVIKITRKLREINVDVYFEEQGIHSIDPASEFYITIYGSIAQSESENISANVKWGKAQSAKQGNVPFQCKHFLGYTKNADGEIEIVPEEAEIIREIYERYLSGESLYGIKCYLEAKEIPTPAGCSVWRQETIRSILSNEKYKGDAIINKTYVSDCISKRIKANNGERNKYYIENNHPAIIDAGTFARVQEEIARRSGKPKVKQKGTKTELSRYSSKYALSELLICGECRTPYRRCTWTAKGKRKIVWRCINRLDYGKKYCHHSPSIEESLLQDAVMRAIMQTAKQNIEVLKTLKIHIGMGLTDEVTEDKTLDIQIRIAEIDAEFQKMLKAVSADNADGIDEERITELMNEKQRLTVQLEQYATMRQKRESAKSRLDEIFTILDGLQNHPMEYDDTLVRQIIECVVVESKEKIKVVFIGGTEIEMTL

SEQ ID NO: 24405 - protein, 519 aa, synthetic construct
MKTITEITRQKPAPPQIRLAAYCRVSSDSSDQLHSFAAQIKYYSEYCKRHPEYKFVDIYADEGITGTSMEKRDDFRRMLRDCKKGLIDRIIVKSMSRFARNTEEMLTALRALEQMEVSVYFEEQGLDTESMNSEMFATFPGMVAQQESVSISQNMRWSYKKRMESGEFNCCAPAYGFDLINGKLVINETEAAVIRRIFNLYLEGIGMQGIANILNDEGICRRYGREKWYHTTISYVLNNERYKGDALLQKQITTQTLPFKKQFNHGERPMYYVENSNPAIVSRETYDAVQALIKSRQPSCKRKAKNYPLTRTLLCPDCGRTFRRQVVNGTAYWLCAAKATNKTDCAWRRVKEDEVYAAFNLMIRKVQANREYLLGTLIRQLEELQYRTTGSQQRIKEIDREIADLTAQNLVLSRLHGKGVLNAADYTAQSDVLENKITELRIERRTKITDSDENEMLDELKMLNDILKEVEIGIDFDAELFEQTVDNITVESNELLTFHLAGGISLPEKIREKGRCYQA

SEQ ID NO: 24406 - protein, 516 aa, synthetic construct
MQKNTTVETTTKAVIYARYSSDRQREESIEGQLRVCEDFAKRNGMTILHVYADRALSGRSDQRPEFQMMIQAAATQTFDTVLVYKLNRFARNRYDSAKYKHKLKKYGVKVVSAMENIADDPSGILLESVIEGMAEYYSAELAENVMRGMTENALEGKWPGGIVPLGYKLDTEHRLIIDEPAAKTVRWIYQQYLDGKQPTRIIRELNAAGCLTALGKPFRKNSLRTILKNERYIGTFIWNGIKKPNVIPAIIDSADWHKVQEIMKVKKKCVSKAKDNDYYLTGRLFCGHCGENMVGTSGTSKLQRIYRYYICSGHQKKKGCTAKAVRMDKLEDIVCNATTRLLSNRDAIRAIAKQAISAQETQGPSLVLQSLQNQKADISRKLQNCVKAVEEGLISQTVTNHIHDYEKQLQTLTDAIQKEELMNQIPHLTEKHIEFFFWSISQQIKKADKYKSILLSSIVRSVIVYEDFIEIQYNYKKELPILQNPVRIGGSDMPVMVEHRGIEPLTSRLRTLRSPS

SEQ ID NO: 24407 - protein, 434 aa, synthetic construct
MKKTIVNIAPAVAETPCTKRVAAYARVSCGKDTMLHSLAAQIDYYRNYIMMNPEWRFAGVYADESKTGTKDNREQFQLLLTECRSGNIDMVITKSISRFARNTVTLLETVRELKSLGVDVFFEEQNIYTLSAEGEVMLTLLASFAQAESLSCSDNCKWRIRKGFEEGRASTCTMLGYRLVNGEITLIEEEAEIAKRIFDLYLAGCGLQKIANTLNEEGMYSIFGNEWHPTTVRKVLTNEKYCGDLLLQKVYRENHLTKRKCHNTGELPQYFVEDDHPAVVTRQIFMAVQDELKRRAEEKAPTVGTTSVFTGKIRCSCCGKNYHRKTTPYNIVWCCSTYNSKGKKYCPDSKVIPEETLKRAVTDILKTDGFSDEAFQMQVCTIEAHPGNLLRFIFANGSTADYVWKDRSRSESWTDEMKAAAAKKAKERYASHDK

SEQ ID NO: 24408 - protein, 548 aa, synthetic construct
MTNKKVKKIEATKPTLSAQYSTFTRKRKVAAYARVSTAKEEQENSFDAQVSYYTQKIQANPEWVFVEVYSDEGITGTNTKKREGFNRMIEDALAGKIDLILTKSVSRFARNTVDSLVTIRQLKEKGVEVFFEKENIYTLDAKGELLLTIMSSLAQEEARSISENTSWGRRKSFADGKVSLGYSNFLGYDKGPDGELVINKEQAKIVRRIYAEFLAGKTPGSIAKGLTADGIETPGHKKVWQASTVLNILKNEKYYGAAILQKEITVSYLTKEKRPNTGELPMYYIEKDHEPIVSPETFQMVQEEMRRRKEAGSNMQCVSIFSSRVICGDCGGYYGRKIWHSNTKHASWHWHCNAKFQKRKYCETPTLKEESLEETFVEVFNGLIANRKEIEENYRLCIDTITDDSEYCRQLEDLNNGCGEVQTLIRSLLMTYSRQDTADDIHEKLKEYEDRLDTMARLKQELDLKIAACAAKRVQITGFLNELMKHDAPLAKFDPLVWQAVINYATVNRDCTITFTFRDGTEKTVPIKNGVRPYTKRNKPQEVDGNDG

SEQ ID NO: 24409 - protein, 490 aa, synthetic construct
MTDKNLLVITPHRKEPGKQRIAAYCRVSSRSDEQLNSLTNQINFYRSLFESDDTVVFVGIYAEEGLSGTQAESRPQFMKMIEDCRSGLIDCIRTKSVSRFGRNTVDTLIYTRELRSLGIDVFFEKENIHSTESSGELMLTLMAAFAESESETMSENIKWGKRRRYEQGITGSITLNGMYGFRQNKGIVTIVENEAELVRRIYKDFIDGYSYGEIADRLIAEGVPTRMPGASWAKTTVQHIIRNEKYCGDCLLQKAFIANPITHQQVRNNGELPKYLVEDCLPAIVDKETWKLAQAVAARHTSHRQAPNERYPFTGKLFCGVCGKPYYYYHYTTTNKKPLAAYRCMSHKTQSAVEVAGQTYTPPHKATFNRNASAKLIAYRERYCKPPKERPMLCTDVRIPIDLPQKTFCRAWNLIVAKKLRYQATLRSTVDNAEDILVRYRAEEMCLLIDEIGKITEFSYPLMLKTLDRVVVNTNGKLSFIFQSGIKITV

SEQ ID NO: 24410 - protein, 510 aa, synthetic construct
MSYFIYARKSRKDAELEALGIDVLERHITTLLELAKTLSLPIGAIYREVVSGDSIDARPVMTQVLSEVEACMWDGALVMDVDRLARGDTIDQGRVQRAFFYSNTRIVTPNKTYDPANEYDNEYFEFSLFMSRREYATIKRRMQRGRERSSSDGYYVGNVAPYGWERVIAPDGKHYSLAPHQTEAPVLDLMYDLCGNKQYGYQKACTYMSNMGILARSGKPFTPSTLKGIISNPANIGKVRWGHRKTVRAVKDGRVVKSRPKATDYILSDAAWAPRISPDLFKRANQPKGCFSAPVRNDRPIQNLFAGLVRCSQCDRLMVRKKAQTKTPYDMLICQYAECSTVGIRIDELEEALLGWLKDYIAKYEFTDTHEEDTAAIAAKELIVTNFETEHQTLLKQRESLFDFLEQGIYTKEIFIERSNALEQRIRDCMNNITAAREDLHTTIARQANRKNFVPKCKNLLSEWDSLTVSEKNSALRQLIDRIVLTKTKRNKKNQKNSEFTIDVYPKVPK

SEQ ID NO: 24411 - protein, 504 aa, synthetic construct
MEIQVLEARSSKGYRKKVCAYCRVSTDALEQENSLENQIAYYENLIQSNPEYEYAGVYYDFAISGYKEKRPGLQKMLTDARNGKIDLIYTKSVSRFARNTAIVLKASRELKELNVGIFFELQNINTLSSQGELMLTILAAFAQAESESGSIGAKMVYQRKYEQGISVQYLERCFGYTKNEKGEFVPDTEQAKWIVKIYEMVAEGYSLSAIADEMNAAGVKTDKGAGWVESTVKRILENEIYKGDYIMHKNYVNEERKLVRNRGEVDAWYIEDDHPPIVSRQLWDKAQEARKKKRDYLDMDCQIREVTEENYPYKGRLFCAKCGSPLTHRIYSNGNRMSWDCSGRRRHGKDFCTGIHVPDTAVRQWKFDGNIYISIKDSRKSIKEFSYTKESSWSRRHKKKEFVREVPELTEENYPYYRSIFCAECGSRLVRHIKKHGDIVWECNGRKRKGATYCEGVRIPDRVVQAFMPIRKAIYIKERKGRNGTKHYSYSCKKPERATRKEQG

SEQ ID NO: 24412 - protein, 435 aa, synthetic construct
MAAYCRVSTDQEDQLHSFEAQVEYYTRYISDHPNYEMAGIYADEGISGTNIKKREQFRRMISDCETGKIDMVITKSISRFARNTQDCLQYSRMLKNLGIGILFEKEHINTLDSSGELLFTILSSLAQDESRNISENCKWGIRSKFKKGEMHVNTHKFLGYDKVDGKLVINEREAKIVRRIYREFLWGHSPQEIAKGLEDEGIEGCMGSKKWYPSTVINILKNEKHMGDALLQKSYTADFLTKKQVKNHGEVTQVYVKGSHIGIIDKETWNAVQLEFARREEFVKEHGLKGYGYGRECNPFTSRIFCGECGSPYTRHTWRSRGIMQWQCKNHMTDGKVTCVNGFVSQSDLELGFVKAYNMLLKHKEILIPRWKDTIETGNALERLRAKQFLDLSEQPELECYVPELAQMVIQMVIIKGIKKYEFTFMDGSRETVCV

SEQ ID NO: 24413 - protein, 529 aa, synthetic construct
MANANVQVIPAKKPRLSAQKAMEPIVKRKVAAYARVSTDSEEQLNSYEAQVSYYTEYIQSRCDWEFAGMYTDEGISAVNTKHRTGFNQMVQDALDGKIQLIITKSVSRFARNTVDSLTTIRKLKDKGVEVYFEKEQIWSFDGKGELLLTIMSSLAQEESRSISENVTWGKRKAMADGHISLPWSSVLGYERGEDGLPKIVPEQAEIVRFIYHLFMQGKSYTKIAKELTERGIPSPMGKEVWRMATVRNILQNETYRGSKEMQKTFCVNYLTKSKKVNEGELPKYWIEESHEAIIPPDEFDAVQAEIERRKQNGGTYKALSPFSQKIICGDCGAFFGSKVWNSNNKYRKVIWRCNDRYNKRGKRDCKTSHVVESEVKYRFITAYNKMMQNRDALIADCEIAIAALDNVAALDEQIKELEEELEVVEGLTLQAIDENKRRVINQDEWTERNGKYLKRHSEVTEQLKALDAERRERVNKVKTMRLFIKRLKQGGKVLTKWNEEIWSAVIDCVVVGVDGSMTFRFKNGTEVVE

SEQ ID NO: 24414 - protein, 423 aa, synthetic construct
MERTVTVIENTVPVLPKKKRVVAYARVSLGTDFMLHSIAAQVSYYSEMIQNNPEWEYAGVFADFDETGTKENRPEFQKMLSECRAGKVDVVITKSISRLARNTVTLLETVRELKDLGIDVFFEEQNIHTLSGEGELMLTILASYAQEESRSVSENIKWRKRNDMQAGRTKPMRIYGFDSVDGKLVINEEQAKVVRRIFDLYLAGNGHHAIATILTKEKIPSPAGLDYWNSSAVDRILHNEKMRGNLLHQCTYIENHITKKQVKNRGDLPMYLVEGTHEGIVSSEVFEKVQEETARRAEAGDLNSYDTLAFRKLIKCGCCGRSFLHTTNGQKQWKHHVWRCGGHDKRSNPAGCSSRDIPEDILIKLTCSVLGIKEFDGDMVKEQIEEIRVPEHHMLIFVMKNGSQIVRLWEPKKKGPKKKERRC

SEQ ID NO: 24415 - protein, 490 aa, synthetic construct
MSSEKQVIPIIQSPPEKRRKERVAAYCRVSTQAEEQLHSLAAQREFYEKSLSGNSEVEFIGIYADEGISGTRTRNRTQFLALIQDCRDGKVDRILTKSVSRFGRNTVDTLIFTRELRSLGVDVYFEKEKLHSISPEGELLLTLMAALAESESVSTSDNIKWGKRYRYKQGLVTALAISNIYGYCKKDGEIAVNEAEAVIVRRIYKEFLDGKNYDEIIAGLTADGVPTRKNAAWHSRTVIGILSNEKYCGDCLFQKTFIPDPISHKTVVNCGEIPQFLVEDCVPAIIEKKQWLAAQEMRKRHQGVSKPPVGTLPFRSLVFCGTCGKPCPQYSSHSEGRRLTAYHRCISWRDHTAAEVPGMTYVSPHKAGYNYNPTPELAAYRATYKKPKSRPFLCTDVKIRTERFPKAFVQAWNLIVSKKQRYLPSLQNTASTSDNPLTAYRAEKMIGLLETTGRLDEFDFSLMIRTLDRVEIMPTEKLSFIFQSGIRITV

SEQ ID NO: 24416 - protein, 559 aa, synthetic construct
MTTMAKNVRKIEPTTPVMSVLDLRPLLKKKRVAAYARVSTEKDEQQNSYDAQIDYYTALIRNNPEWEFVDIYSDEGITGTSIKNRDGFNRMIDDALAGKIDLILTKSVSRFARNTVDSLTTVRKLKEKGIEVYFEKENIYTLDAKGELLITIMSSLAQEESRSISQNTTWGQRKRFADGKMSLAYSNFLGYRRGAELGDMEIVEEEAVIVRRIYSEFLAGKTPYDIAKRLTEEGVPTPMGKTKWHTTVIESILKNEKYKGDALLQKTVTTDFLTHTHKRNEGEAPQFYVEKNHPAIVRPEVFEMVQEEFRRRKAAGGRMQSVSIFSGRIVCEDCGGFYGRKVWHSTSEKYRAYHWHCNNKFQKRCSCQTPTLKEESIEQAFLSAINSLIKKKKAIRENYALCLDAITDDSAYVARLEEINAECCRLQEETKSLLTAAGRENGGGLSEVNRQYEDYLAKFEGLQKEKSELSTQISKCAAKRVQVSSFLEELQKCDGPLKEFDPLIWQATLNHAVVHKNCTITFVFRDGTEVTRKIKNGVRKYVKRKASDPDNPESTGEKA

SEQ ID NO: 24417 - protein, 428 aa, synthetic construct
MNKTVTDITPKLQKDLRKLRVAAYARVSCDKDAMLHSLDAQIHYYRNLICGNPDWEFAGIYADEAKTGTKESREQFQQLLSDCRAGNIDMVITKSVSRFARNTVTLLRTVRELKELGINVFFEEQSIKTLDADGEVMLTLLASFAQAESLSVSDNCKWRIRKGFEEGRASTCTMLGYRLVNGEITIVPDEAIIVKKIFDLYSDGCGQQKICNLLNEEGIRTRRGYTWHSSAVRLILENEKYAGDLKLQKVFVRDHLTKEKVVNHGELPIYWVENDHEPIVSKEQFQAVQLRLKKQSEGCTASKGAESVFTGKIRCAGCGKNYRRKTTPYRVVWCCTTFNSRGKKYCPTSKMIPEETLKTVCATVLGLPEFDAEAFEEQVIYIDACPGNLLRFHFHDGSEKELTWRDRSRSESWTQEMREAARQKALSR

SEQ ID NO: 24418 - protein, 501 aa, synthetic construct
MYEEVKNACIYARYSSSNQTEQSIEGQLRVCREFCNRHNIRVVEVYTDRATSASKDIEKRVSFLKMIKDSERGNFDAVIVYKLDRFARSRYDSATYKYRLRKNGVQLISATENISNDPEGIILESVLEGMAEFYSAELSQKIHRGLRESAYKHNSIGGQIPLGYKTEGKKLVIDEETAPIVREAFEMYAEGHSVADICRTFNAKGYKTSKGTRFGKSSFSKIFRNEKYIGIYQFHDYRAEDAIPALIDRKTFNLVQARLKTVGKAPGQFKAKHIYLLSGKLYCGHCGSKMNGNCNTNEYSYYECYGKKNLHKDCHKRNLRKDFIEDIVVRDALSLLTPERIEEIATVAIQTNTYEVETTTDIPAIRGRLHETKLSLENITKAIEGGLAPETLVKRMVELEKEKKVLEGELKKEEKGVAYLDREQVIYWLNQFKNGDIEDEDFRRQLIDLFVNSVTVWDEPDDFFKITIAYNLTSLQEKTYRLPKGGTLSDLALNPPGSSCG

SEQ ID NO: 24419 - protein, 527 aa, synthetic construct
MAKRKVTTIPATINKFTAKPVDSKKKRKVAGYARVSTDHEDQLTSYEAQVDYYTNYIKGRDDWEFAGLYSDEGISATNTKHRDGFNQMIADALAGKIDLIITKSVSRFARNTVDSLSTIRKLKEHNIECYFEKENIWTFDSKGELLLTIMSSLAQEESRSISENVTWGQRKRFADGKVSFAYKRFLGYDKDLNGNIVINEGQAKTVKLIYKLFLDGLTMHSIANELTKRGLKTPAGKDKWSQSTVRSILTNEKYKGDALLQKSYTVDFLTKKTKINEGEVPQYYVENNHPAIIEPELFDLVQTEIQRRGKGNARYSGVTMFSSKVQCAECGGWYGSKVWHSNDKYRRTVYQCNNKFRHKTRCSTPHLTESEIKDYFVKAMNQLITEKEEILENLQLIRTTLCDKKDLIKQKESLGEEIAVTVEMTQNIVAENARVAQNQVEYNKRYNSLVERYEKLKKEYDSACATISEKDAKYEQMGRFIKVLKAQTGIITEFDDALWSSLVEKIVVKNKNDVTVVFKDGTEIKAE

SEQ ID NO: 24420 - protein, 597 aa, synthetic construct
MRTITKIESTMPTIKKRKKVAAYARISMESERMNHSLSAQISYYNDLIQRNPDWEFAGVYADNGISGTSTAKRDEFRRMITDAEQGKIDIILTKSIQRFARNTVDLLETVRHLKNMGIEVRFEKENINSLSGDGELMLSILASFAQEESRSISENVKWGIRKRMKEGMLTANGHFNIYGYKWEGDELVIVPEEANVVKRIFQNFLDGKSRLETERELEAEGIRTRQGCVMRDSNIKKILSNITYTGNMLFQKEFISDPINKKRMKNRGELPQYWVEDTHEAIIDLETFQYIQDEMERRKQLGPLANKSLNISCFTGKIKCPYCNQSYMHNTRKPRTPNARRLGFWVCGSRKKKGGRCEVGASINQENMKKVLAEVLGIDEFDDEVFLEKIDFINVPKQYTLEIHFKDGDVITKPCRNTGHKDCWTKEYRDKVSVQRRKKNTNPKGASVFTSKLKCRHCGCNYRRCTQPSATSEDGKFYYWRCAEKNDCNAKGLREDFLKPQLAEVLGMKEWNDESFAEKVEYIDIDGYMLDIVGKDGSVTSMNFKPPERGGIHCSEKQKEHMRKLMKERWTPELKQQMSDYMKNLRKERGSEWQKEK

SEQ ID NO: 24421 - protein, 596 aa, synthetic construct
MGKKQKATGGDAVIYARYSSHNQRDVSIEQQVEACRKHAAELGLTVTATYEDRAISGKTDKRPSFQRMMRDAEQHKFAYVLAWKSNRIGRNMMQALVNESRLVDCGVKVFYAEEDFDDNAAGRFALRSMMNVNQFYIENMAEDVKRGLYDNAKKGLVNGSLPLGYKRGADGKPEIDEPKAAIVREIYTRVAAGELFASIAADLNARGIRTARGREWNKGSFHVLCHNDRYRGIYMYGDIRIPGGMPRIISDELFYDAQEAYGMKKDNRYGRARHGAENYLLTGKLYCGHCGSYMVGISGTSKTGEMHYYYACQKHRLEHACEKKAIRRDVIENAVARAIMMYCLDDETIDFIVDSTIAYFKQKDHELHIEAMENELAAVQQAISNLMKAIEAGIITPTTRTRLLDLEEQQAKLSAKINTAKAERVEIDRDDLIAGLQLFRTGDIKNKKFLAKLFNTFLLAVYLYDDNRLKIVFSFTGNHNNIEIPLELDNDCPDSESGPYETEVRMSHLECRKNSGTPPSSGGAEKGDGCSSGRFVRTVPLPPHKKWPQAQAWGHFFILRRRGVEQHGCPTVRTMIWTNNPLDESGRCLCFTETAA

SEQ ID NO: 24422 - protein, 628 aa, synthetic construct
MKAAFLIRCSTKNQDLNRQTRDLTRLAKSMGYEYDLENLVYGEKITGKDDVTKKNRDSIDRLLRAAKEQRFDVVLVSEVSRMSRDPASGRIYVRLLINMNIPVYFKDIDLWTINPETGKKVRDAELVIGAAFDAAWKYLKSMKTQIASARRNELDNNRISIGQPYFGYKRYEGTDKSKKNQIVVNEEEAEVVQAVYNEYLKEGATLKSTALAITDKYGEKLNRKFSLGTIEHILTYESYATGIKKVNLKDPDTDEVEVFDVSTPIIIDKELYEAATNKRKKNRVKDEPYPNQQVYLLSKLIKCPDCGYTLTPRRKAGEFGQTYRLVNGKPAISWLCMSGINNITDCTNRTSIANEKLEPIIWELVKKELIGYANMNDEKREEQIRECEEKIEYQNYSIQNFTKEIDKLKKRLSTAYQFSINAAEMAGDDEDMRTMAMEEFNRTAKGIRQDMKNFEKSIEQAKGELEKLVDLKTFYSQPTLPKDYLEQIEGNFTEKRNLVKQLITKIVPYRITTFKKKERESGVKTCNKMITVKNGIILLEVYTIGGVYNVFYNANSKFQVKTAYYVHGEYATFQNGIRKFPAYDEGEYFVISNANMVMETDDIDEVVTVNEFVDIAIANNWVIEYQYI

SEQ ID NO: 24423 - protein, 538 aa, synthetic construct
MSTAPNVTVIPAKVQTAESRDKYHQLRVAAYCRVSTELEEQQNSYQVQIAYYTDLINKKKEWTLAGIFADEGISGTQTKKRTEFNRMIRMCRNKKIDLVITKSISRFARNTVDCLEYVRQLKDLGIGVIFEKENINTLTMTSEFMIALYGSFAQAESESISKNVSWGKEKAYREGKVQFQYKHLLGYKKGADGKPEIIPEEAETVKLIYTMFPDGHSMKNIALILHVKGIHTKTGSTEWRTNTITRILQNEKYVGDALLQKTFTSDCITHKVVKNHGERPMYLVTNHHDPIIDRDTYNRVQQELARRNSKRKISDKTVTEQGKYSSKYALSELLICGHCGTPYRRTTWAARGKKQIVWRCLSRLEHGKKYCPDSPTIKEEQLHRGILRAINNYYSCRNDIVRILKANIGSVLECQGQEEILSVEKRLKEIDQARTDLVNLIASGGCDEDKLDSEFAKLYAEEQGLSERLTMLKSQNKTSEETQAKLDKIMDMIEHEKFELETFDNVLIRKLIECVKILSKTEILVIFKGGYEVRTEIE

SEQ ID NO: 24424 - protein, 512 aa, synthetic construct
MPTVTVIQPTISEEQNTKIRCAAYCRVSSDSEDQLNSFMAQMRYYSQVFDNSETEELIDIYADEGITGTREDKRDEFQRLMKDCRKGKIDRIYTKSISRFARNTRDCLKNVRELKSLGITIYFEKENIDTANMTDEMMITIMGGLAQEESTSISQNMRWSIQKRMQNGTYRNSCPPFGYTVQNDTLVVNEEQAKIVKQIFNWYNEGYGLQAIADTLNSMAVPSSQTAERWHASSVKYVLSNERYIGDALFQKKYRTETLPTMQKRNRGEKPKYYVQSVNTPIIDKDIFYSVQELLNKRHREYINNNHFLSKRILCSKCGATYKCVSSKNSVFWTCRTHNNKASDCSNGRIADIKIYAAFVRLCNKLLYNYKTVLIPLQTALQDLKLRKFSGKTQVMDIHKEIAKLREQTHVLARLKTKGFLDEAKYIEQTTELTAKINKLQTDLKKLTRSDDEDETLNQIEMLIDFFEMRDKPITKFEESAFESIVERIVVINQHELEFHLIGGLKFKEKIK

SEQ ID NO: 24425 - protein, 463 aa, synthetic construct
MTNKVTRCALYIRVSTAEQCMHGKSLEAQESYLQQYASDHNMIVVGVYADEGKTARKELKKRKAIHSLLEDVKAGKIDVILFWRLDRWFRNLSDFYKVQDILDEYGVRWMSASEPGINMETRDGRLQLNVVLSIGQNEVDTTSERIKFVNEASIRQGKLIFGDANMGYGYKSGIVDDRKCMVKDPEREETVNAFYKYFFKHQNKCATLRYIQDNYDPNFSWAIMRTLLSSEFYKGTYRGFPYCPPYLTEEQWNELQKIAHKNIKRAKSGRIYLFTSLIRCPVCGQLLCGTGCKSIINRKTREKRDYCYYRCSRAHNDRICTYRHRLSQNLIEQYLLDNLDTEYRKYQIRVKKIEEEKKKIAQTKTPEKLNAELERLNLLFQKGRVEWDYYSSEYDRIEQELKGLSKIKPEVKRDLSFLEDLLQSDFKTLYASLSPENRRAFWRSTIKQIHLNEDSTIKFVDFL

SEQ ID NO: 24426 - protein, 514 aa, synthetic construct
MTDFDFKKKKRSGTTNEKKKTGVYLRVSTEEQAKEGFSIAAQREKLTHYAFANDWDIVDFYIDDGISGKNIKDRPDMVRLLQDVENGKVNNVLVYKIDRLTRSTKNLIELVEFFNDLGCDFNSIMESIDTSSATGRMFIKIVGIFAEFERENLAERVTFGYEQKTREGNYTNTHGVYGYDYVVGDGDLLINEQEAELVRRIYNLYLQGNSMNTITKMLIQEQVPTKRGGQWNSSTLRSILTNPLYIGSIRYGVDGRPTSFQVDNTRYPTILDEDTFLRAQAIMKRRRKYTPRSYPTENSYFLTFLVCDNCGSRLGAIQHMQKTKNGEVLRVNYYCNNHKTGQCNCMNMVQTKVEKAFVNYISQYDNFEVDFNLVEKLKSPSNTDDKNKQTELEISKLHKHLETLRTLFANAEITFDEYRSMTDTLNNKIALLQSQITYIDEEEENISMEEAVEVIGNLKENWIYLTNKEKIEFLTRFIDSIKIFNDKGNVKVSEIKFLTKQSEKKPPQYTKLLK

SEQ ID NO: 24427 - protein, 505 aa, synthetic construct
MSSVDKIAVIYARYSSHGQTEQSIEGQIAAAQKYAEQHGYTIIHIYADRAMTGRNDDREQFQKMLSDTAMHQFGVILLWKIDRFGRNREEIAFNRYRCKKNGVRVERVAEDVPDGPEGVILDSVLEGMAEYYSLQLAQNVRRGQRESAKKSMSIGGNKMLGYVVNPETKRYESDPKTASYVTEIFKRYANGETISEIVAWLNAQGIRTTRGSEFTVNSLHRLLKNEKYTGVYIFHDIRNEGGMPALTDRATFDKVQEMLKVNRRAPVRVWSKTEYLLTDKLFCGHCGAIMVGESGHGRNGTKHSYYTCLNRKKKKSCDKKPVRQDVIEPLVLRAIGKLLENPATLENIADQVWAAYERSDTSGDTIKALDKQIADVDRALSNVMKAIEMGIINEMTKTRMDELTNQKQALSQSRAEAGLTGGFKLTRDMILFFLQEMAALDMADRDSQKRLIKTFVNAIYLYDDHFDIAFNYTDNGKVAVRMQEINDAASGEVFGCCAQSPTIRL

SEQ ID NO: 24428 - protein, 502 aa, synthetic construct
MEIQIREGSREQKRKLKVCAYCRVSTDADEQENSLENQVRHYETVIKANPDYEYAGVYSDFAISGFKEKRPGLQKMLADAEKGKIDLILTKSVSRFARNTSIVLEATRKLKELNVGVFFELQNINTLSGEGELMLTILAAFAQAESESGSAGAKMVYQRKYEAGIPVQYLERSFGYTKDERGVFVADEAEAVWVRKIYKMAAEGYTPASIKRYLNENGIKTVGGVQWVDSTVFRLLENEIYKGDYIMHKHFVNEERKLVRNRGEVDAWYIEDDHEAIVSPELWQKAQDALAAKRDYLAKGSVIEEFTEENYPYMNKIYCAKCGYPLYKRVYSKGNRLNWGCSGTKRYGKTFCDGINIPDGVLRSAWHFKENTYIAEKASDKGVKEFTYLKEQSWKRRHKKKQPPAIPENTEAEYPYREKIFCALCGSRLVRYVNPQSHKVTWVCSRRKRKGKDACDGTRVPDTIIKGWGEIKKDIYIQRKDDKNGKKRYSYTSKKPEGADRA

SEQ ID NO: 24429 - protein, 490 aa, synthetic construct
MNKKTIIHPTLENVTDLYVRVSTTEQAEEGYSVEAQESKLRAYCQAMNWVVNRVLIDPGYSGASMDRPGLQELVADVRTGRCKRILVWKLDRLSRSQKDTLILLEDVFLANGCDFVSIMENFDTSTPFGRCIIGILAAFAQMERENIRIRTTMGRVARIRKGYFSGSHAPIGYKFKTGCNELIVDPYTSLMVKETFELFLNGTGLTAIGRHMLEKYGPGQYDWGKNTAVRRILSNPVYMGKVRLHEELYDGVHEALVSETDWYMAAAILEHNKVIDKRAYCYALKTSGCGDNLLTGLLFCGDCGARMYARKVSKSKKKYVCHSVARTSPAMIKSDHCSNRIHPYTVEELDNLVINEIKKLSVDRASFDSMVERCSDKPSIDCSALQDRISEIEKQITRLLNLYQAGLVNLDDIGPRLSDLREEKEKLQQNLLSLDPATASNVIDTAWENLQSFPSVVESGDLQSLHRLVHSLIDKIVVLNADVTIYWSFC

SEQ ID NO: 24430 - protein, 499 aa, synthetic construct
MIAIYARQSLDKKDSISIETQIELCKKEIGDEPYKEYVDRGYSGKNTNRPQFKAMMQDVENGVISKIIVYKLDRLSRSTLDFGELMDALSKHSVEFSSTREKFDTSTPIGKAMLNIIMVFAQLERETIQVRVQDNFRMRSSRGAYDAKAPYGYAKTKVIVQGKAVSTLKPDKAYSLMVKKIFEQYAYTSTSLGYLARTLNQQGIKSANGAAWDSCKLSKLLCNPIYVKADAEVYKYYRAKGMEITNDIDDFRGQYGCVTYGQWDRAKNKFAQLSGLTLSIGLHEGIIDAKTFLACQYKLADNTQINNTGRGKHSWLTGLLKCGCCGKAMKVMTYKETATFRCSGAMNTGLCSDSPSLGMHEIEEAVEREIFAHVARHQELVVQKRKEEDNKAHNYKIAIAKLDDQIANLITALADGTELTMKYINGRISELQKQRDILTAELQQHKNATKQQDDIKQFHDIINLWPGMTIPQKHEIAMMLIKRVEIQEDTTRIYWKYDL

SEQ ID NO: 24431 - protein, 524 aa, synthetic construct
MSLENVCIYLRKSRADREAEARGEGETLARHERILLDLARSRNYNVGAIYREIVSGETISARPVMQQLLREVEAGSWDGVLVVEVERLARGDTIDQGVVSRAFQFSDTKIITPTKTYDPDNEFDEEYFEFGLFMSRREYKTIKRRLNAGRISSVKEGKYCGSRPPYGYERVKLRGEKGFTLQPVPEQAEVIKMIYSLYSGASGDRIGVSKIVRKLNDMGIKSPSGKDWVPISVQDVLANPVYAGMIRWNGRKTVRAIQDGMVTQSRPRSKEDDILLFPGRHPAIVSKEMYDSVQQIRKKNPPRPISIKNTIKNPLAGIVYCSKCGRAMVRRPYQKRGQDDTLMCSYTSCPTVSSKLSLVERAVLNGIQDLVDEYRLNDAVPGPDINNAVKSKEKLIAEKEHELEKLNVQKMKQYDLLEQGIYTTEVFLERSNSIASSINSCQDSIECLKEEIRHDKELIDQQSSFIPRCENLLEIYWSLDTAAKNKMLKELIERVNYTKDTKNAFRKGNEATFVLDIFPRIQSN

SEQ ID NO: 24432 - protein, 526 aa, synthetic construct
MAQRKVTAIPATISRYTATPINSTKKRRVAGYARVSTDHEDQTTSYEAQVDYYTNYIKSRDDWEFVAIYTDEGISATNTKKREGFKTMIADALAGKIDLIVTKSVSRFARNTVDSLTTVRKLKDEGIEIYFEKENIWTLDSKGELLITIMSSLAQEESRSISENVTWGQRKRMADGKVSFAYSRFLGLDKDKETGKIVVNPEQAETVRLIFHLFLEGMTPHSIAAELTSRGIKTPAGKDVWNQQTVRRMLSNEKYKGDALLQKEFTVDFLQKKMKKNEGEVPQYYVEGNHEAIISPAVFDMVQAELAKRTKGGTRYSGVSIFSNKIKCADCGGWYGSKVWHSTDRYRKVIYRCNKKYNGEKCQTPHVTEDEVKAAFVSAYNQLVTERMEIIANAEIIRKTLCVTDALQEEKGKLEEEMAVLVEMTQNIVEENARVAQDQDEYQKRYDSMVERYDTAKARYDEVVTAISAKEAQSERLANFIKVLKTQDGTISEFDGSLWGSMVEFVTVGRDKEITVTFRDGTEIQA

SEQ ID NO: 24433 - protein, 591 aa, synthetic construct
MAKITRVEQAVPTIKAKKKVAAYARISMESERMNHSLSAQISYYSSLIQKNPDWQYAGVFADDGISGTGIAKRDEFKRMIEAADNGEIDIILTKSIQRFARNTVDLLETVRHLKDIGVEVRFEKEHINSMSGDGELMLTILASFAQEESRSLSDNCKWGIRKRFEKGIPNGHFRVYGYRWEGDKLVIVPEEAEVVRRIFQNFLDGKSRLETERELAAEGITTRDGCRWVDSNIKVVLTNITYTGNLLLQKEFISDPISKQRKKNKGQLPQYYVENTHPAIIDKATFDYVQEEIARRKELGPRANKSLNLTCFSGMLKCPYCGQSYMHSKRTDRGFMEFWVCGSRKKKGGRCPVGGSINHENLKKACAAVLGLDEFDEDVFFDKVDHINVPEREILEFHLKSGEVITKDCPNTGHKDCWTAEYRAKTSEKRRKKPNCKGSSVMTGKIKCVKCGCNFRRATQPSSTAESGKAYYWRCAERDGCGTVGLREDVLKPFIEETLGITEFDDAEFEKQIDHIDVLSATEMVFHFKDGRTVNRTWEPPKRVGRPWTNEQRAKFKESIKGRYTPEVRQQMSEHMKQLRKERGKAWRKEK

SEQ ID NO: 24434 - protein, 544 aa, synthetic construct
MKITKFPIDLSMLTEEEMDQFRQDPSTLFEGDTDVSLYLRFSSERQREQSIEGQLRDCRTFCKLNSYRITAIYVDRATTARKDVEKRVHFQEMIRDSEKKPWEYVVVWKLDRFARNRTDSALFKFRLRKNGVKVISATENISEKPEGIILEAVLEGMAEFYSADLSQKITRGMRESALKCHSIGGHVPLGYKIEDHKLVINPATAHIVREAFELYANGETVADICRMFNTKGYRTAKGVEFNRNSFKSMFRNKRYIGVYTYKDIEMEGGVPAIIDKELFETVSRRLSKNAEAPARGKAKVDYLLAGKLFCGHCGGSMNGESGTSKTGAVHNYYTCYTRKRKHACEKKPLKKEWIEYIVAQDAMELLTDDTIQELADMAISQTEQDLRENTRIPELTERMKETESGIANITNAIEKGIASDALMNRLVELEKEKKNLLRLLAEEEKYVCKIERSQIVYWLTEFKGGRIEDERYRRIIIDLMVNSVTVWDEPDGFRITTAYNLTSCQSKTFRIDPSSEKGFGFEGSKSTKSQKIRTLSSMVIRSDF

SEQ ID NO: 24435 - protein, 428 aa, synthetic construct
MNKTVTDITPKLQKDLRKLRVAAYARVSSDKDAMLHSLDAQIHYYRNLICGNPDWEFAGIYEDEAKTGTKESREQFQQLLSDCRAGTIDMVITKSVSRFARNTVTLLRTVRELKELGINVFFEEQNIKTLDADGEVMLTLLDSFAQAESLSVSDNCKWRIRKGFEEGRASTCTMLGYRLVNGEITMVADEAVIVKKIFDLYSDGCGLQKICNILNEDGIRTRRGYIWHPSAIRLILGNEKYAGDLKLQKVFVRDHLTKEKVVNHGELPIYWVENDHEPIISREQFQSVQLRLKKQSEGCIADKGTESVFTGKIRCAGCGKNYRRKTTPYRVVWCCATFNSRGKKYCPTSKMIPEETLKTACATALGLPEFDEEIFDEQVLYIDACPGNLLRFHFHDGSEKELTWRDRSRSESWTQEMREAARQKALSR

SEQ ID NO: 24436 - protein, 490 aa, synthetic construct
MSSEKQVIQIIQSPPEKRRKERVAAYCRVSTQAEEQLHSLAAQREFYEKSLSGNSEVEFVGIYADEGISGTRTRNRTQFLALIQDCRDGKVDRILTKSVSRFGRNTVDTLIFTRELRSLGVDVYFEKENLHSISPEGELLLTLMAALAESESVSMSDNIKWGKRYRYKQGLVNALAISNIYGYCKKDGEIAVNEAEAVIVRRIYKEFLDGKNYDEIIAGLTADGVPTRKNATWHSRTVIGILSNEKYCGDCLFQKTFIPDPISHKTVVNCGEIPQFLVEDCVPAIIEKKQWLAAQEMRKRHQGVSKPPVKALPFRSLIFCGTCGKPCPQYSSHSEGRRLTAYHRCISWRDHTAAEVPGMTYVPPHKAGYNYNPTPELAAYRATYKKPKSRPFLCTDVKIRTEWFPKAFVQAWNLIVSKKQRYLPSLQNTAATSDNPLTAYRAEEMIGLLETTGRLDEFDFSLMIRTLDRVEIMPTEKLSFIFQSGIRITV

SEQ ID NO: 24437 - protein, 539 aa, synthetic construct
MKRVVVYCRVSTDHEDQKNSLENQRLYFEEYVKQHKDWKLVEIYADEGISGTSLKKRADFNRMYRDRLKNKYDIVLTKEVCRFARNTVDTLEKTRELKKLGIEVRFIIDNISTFDTDGELRLTIMAGLAQDESRRISERVQFGVIQSMKKGVAFGNIVYGYDFVRDPITGKKTKLVINEKEAKIIKEIFNMYLYEGKGAYTIAKELKERGIEIKRTRSGKKSTDWREGTILDILQNVKYIGDLKQRKTYTVDFLEHSKKENKGEVEFIYTSNHHEPIIDRDLFEATQRELKRRSEIYKHEKSKYTNKHTFSGKLVCACCGSSYVGGENRKRKDGTIRKTWRCYTATKYGKKHEENGQDIGCNNDRVNNETLKICFMKALKEVLINKKEIKKETEQYIKLVLNKCGQETQLNDILVKDKEQLMKERSRLLDLCIKGIVDEETFSLKNNEIIEKINKIEIELDSQKQKVRMKENAEEILEKIQKTIDNILNIKKFSKNVCKEFVDKIVIYNDKKFDFYLKGYDTSFNFNEESNISYLPHLR

SEQ ID NO: 24438 - protein, 433 aa, synthetic construct
MPRAITIVPKPPKLEQKKRVAAYARVSSGKDAMLHSLSAQVSYYSDLIQNHDDWLYVGVYADEAKTGTKESRADFQRLIADCRAGKIDMVITKSISRFARNTVTLLQTVRDFKAWGVDIFFEEQNIHTMSGDGELMMTILASYAQEESRSASENQKWRIKRNFEEGMPWNGAMLGYRLKNGRYEIIPEEADLVRRIYNEYLSGDGYLTIAKRLNEDGIPSRFGKQWGQSVISKILSNYTYTGNLILQKTFRENHITKKTIINNGELPKYHAENAHDAIIDMETFQAVQAEKTRRAARFLKKPAPKKAYPFTSLLVCDGCGKNYRRKVTKTGPVWVCGTFNSMGKAACASKQIPEETLQAVTAEVLGQVDFSEELLRRLIKSILVCNGNVLIFRFFDGSEITRIWKDRSRRQSWTVEMKATARQKALERRNQNA

SEQ ID NO: 24439 - protein, 526 aa, synthetic construct
MPKVTMIPATINPLTHLPSVAARKRRVAGYARVSTDSDEQFTSYEAQVDYYTKFIQSKPEWEFVKVYTDEGISGTNTKRREGFKEMITDALDGKIDLIVTKSVSRFARNTVDSLVTIRKLKENGVECYFEKEGIYTFDGKGELLITIMSSLAQEESRSISENITWGQRKSFSDGKVHLPYKRFLGYEKGEDGRPAVVESEARVVKLIYGLFLEGKTQAGICKYLEELGIPSPGGKAKWSKTTVTSILQNEKYKGDALLQKKFTVDFLEKKMKPNEGEVPQYYVTGSHPAIIEPDEWDQVQAEFARRKTLGKAYSGKSVLSAKLVCEDCGAFFGPKVWHSNNQYRRTIWQCNGKFANEEHCHTPALDTETIQRLFIKAYNLMMQDRVQIIKEIEAWRQKLMDFGTLDADIERQLEETQVVAELVKAAVKENASTAQSQEAYLKKYEALTERYEKAAAELERLQSLRTARSQQDKKMALYIRTLKKQPEVMHDWNDTIWTVMIEKAIVHRNGEVTFAFANGTEIKVGA

SEQ ID NO: 24440 - protein, 523 aa, synthetic construct
MARVTTIPATISRFTATPINEKKKRRTAAYARVSTDSEEQLTSYTAQVDYYTNYIKGRDDWEFVSVYTDEGITGTNTKHREGFKRMVQDALDGKIDLIVTKSVSRFARNTVDSLTTVRQLKEKGVEIYFEKENIWTLDSKGELLITIMSSLAQEESRSISENCTWGQRKRFADGKVTVPFKRFLGYDRGPDGNLVVNPEEAVTIRRIYSMFLQGMSPYGIATRLTADGIKSPGGKDKWNAGSVRSILTNEKYKGDALLQKSYTVDFLTKKKKINEGEIPQYYVEGNHEAIVSPDVFEQVQRELERRKASKGRHSGVHLFSGKIRCGQCGEWYGSKTWHSNSKYRRVVWQCNHKYDGDEKCTTAHLTEDEIKELFVSAANKLITQKDAIVAALTASLDTAFDLTTLKAEQVELESEIAAVSDLIEKCIYENAHVALDQVEYQKRYDGLTERFDTAKARHEALDETIRSKQSRRATIETFLATLAEANLVDTFDTALWCGLVDFMTIHSKDDVRFTFKNGQEIRA

SEQ ID NO: 24441 - protein, 591 aa, synthetic construct
MRIINKIEPKIPQMPSRKKVAAYARVSMESERLQHSLSAQVSYYSGLIQKNPAWEYAGVYADDGITGTKTNDRTEFNRMLADCEAGKIDIILTKSISRFARNTVDLLNTVRHLKELGISVQFEKERIDSLSEDGELMLTLLASFAQEEIRSLSDNVKWGTIQRFKQGIPNGKFNIYGYKWVGDKLAVIPEEAKIVRFMYREYMKGASRIEIGRMLMEQGIYTRQGYQWVDSNVKVILTNITYTGNMLFQKEYCLDPITKQRKKNHGELPQYFVEDTHEAIIPMDEWQAVQEEFKRRRDLGVFGNKSLNLNCFTGKIKCGHCGQSFMRNTRRRRLKGVPVEQCDKYTTYGCGTQKKKGGSCPARDIPEETLKAKCTEVLGLDEFDEKIFSAQVEKIIVPEHLVLEFYMKDGRVIRTEWVSTAKKDAWTAERRAAKGKLVQERQITANSSCFTSRIRCEMCGENYRRQRSRHVDGTYVSVWRCASSARCASQSLPEPTLHELAAKAMGLMEFSEDAFRQQIQYISIVDKGRLVFHFFDGRDIEAEWKNKRTMPRHTEERKAEMSRKMKENWRKRRGESDNHTGNDQSVHSNTD

SEQ ID NO: 24442 - protein, 523 aa, synthetic construct
MQQTKNITVIPARRRVGNTAKESEIPKLRVAAYCRVSTDSDEQATSYEAQVEHYTDYIRKNPEWELAGIFADDGISGTNTKKREEFNRMIDEAMAGKIDMIVTKSISRFARNTLDCLKYIRQLKEKNIPVYFEKENINTMDAKGEVLLTIMASLAQQESQSLSQNVKLGFQYRYQQGQMTVNHNRFLGFTKDENGQLIVEPKEAEVVKRIFREYLEGASLQQIARGLEADGILTGAGKTKWRAETLQKILKNEKYIGDALLQKTYTVDFLEKKRVPNNGLVPQYYVENSHEAIIPRDLYMQVQEEMIRRSNLHSGKDRKKRVYSSKYALSSIVYCSKCGEIYRRVVWNNRGNKSIVWRCCTRMENGPGTCDADAIHESELQSLVIRAINRVLARKDTMNETLQKNVEAVLTGADGIPLDEIDSRLEQLQKELLKVANAKGNYDSIADEIYHLREVKQNALVDNAEREGVKQRISEMQQFLAEQTQKITEYDEQLVRRLIEKITVYEEKVTVEFKSGTSVDVRR

SEQ ID NO: 24443 - protein, 520 aa, synthetic construct
MKRITKIGVNETPVQKKKLRVAAYCRVSTASDEQLISLEAQKAHYESYIRSNDEWEYVGLYYDEGITGTKKDVRAGLLSMIADCEDGKIEFIITKSISRFARNTTDCLEMVRKLTDLGISIYFEKENINTGSMESELMLSILSSLAESESVSISENSKWSVQKRFQNGTFIIAYPPYGYDNDNGTMVIVPEQAEVVKEIFASCLAGKGTHAIAKELNARGLKTKKNGKWSAGAVNAILTNEKYTGDVIFQKTYSDSSFNRHRNYGERDRFLCENHHEPIISREDFDKVRAVLDQRAMEKGNGTDTYRYQNRYCFSGKIKCGECGGTFKRRQHYKPSGDYVAWTCGTHLESKKDCSMLYISDEGIKFAFLTMMNKLVYGHNAILKPLLRTLRGMDDKDRLLRIQELEIQIEGNIDRKQILTNLMATGVLEPAVFNKENNALVAEEQQLRAEKEKLVSFVGGDKVRMKELQKLMSFTSKGEMQTAFSDEMFLEFVDSITVETRHQMVFHLKCGLNLAERLVM

SEQ ID NO: 24444 - protein, 468 aa, synthetic construct
MLYGKPQNYSWYRARVVLYIRVSTDEQARHGYSLGAQREALREFCDTFQCQIVAEYSDDGVSARKEIQRRPGLLRVLEAVKAGGVDYVLFIKLDRWFRSVREYYRVQDVLDAAGTNWKAILEDYDTSTTNGRLNLNIRLSVAQDESDRTADRIKFVFSERVKNGGAIFGSKSLPYGLEVRGHRVQIVEDQAVIVRAFFDHYEAVHSARSTQVWLRDQCGVDLPRNAIGRMLRNGLYCGQYRDNKNYCPAIISPDQFQRVQEILARQASGHTRQSKYSYVFTGLLRCPVCGCTLKAFPQFDHKLNRLYLRYRCTQHWIEKRCSWKTTPWEPRLEGWLLDHIQPQLDAYIAQFDVQEAQRRQAVVDVGAIQRKLSRLQDLYVDGVIDRAAYDEKYHALIQQQDAAEAVRAAQSAGRDLGPLRQLLAGDFRSIYATLSPQERHTLWASVIDRIVVKDGRYGHFDLDVIFLP

SEQ ID NO: 24445 - protein, 537 aa, synthetic construct
MQIKIIQPSAERELERKKVCAYVRVSTDSDEQEDSYDNQMRYYKDKIESNPDWNFVGIYSDLGISGYKEKRPGFLNMIQEARNGGIDLILVKSVSRFARNTETVLKYSRELKRLGVGIYFELQKINTLSGEGELLLTILAAFAQAESESNSGNVSMSIRRKFEKGELNFPISKIYGYTEDADGNPIIDEEKAKIVRLIFDLAEKGIWVTKISDYLNKKQIPGIAAEKWNYGQVAKMLRQEAYMGDRILQKTYRDSHRRTRKNKGQVDQWYVKDTHPAIVTREQWYRVQDILLERNKELYDATPISEGKNLSTHSTYPLSGMLYCPYCGRVLMHRWEGKKRYENWVCGLHRKVSKDACPGICIPNRIASSWGELKEPMTVLKYTDEYGMERFTAIPKVEYEASEDCPYEVIKPEPKPERPKKPSYKKAPKPETPRYTRNVYPLSGKLFCPNCGKVLTHRWNKGVEYWVCSTNRNKHRTENFVKCKGMYFPAEAAKDWGEINEPLTVIAYKNEYGHRLYTAMPKEEYERSADCPYRKED

SEQ ID NO: 24446 - protein, 466 aa, synthetic construct
MAREIVHIPAKPRVGGTKATAQKKIRVAAYCRVSSEQDEQLNSFENQVNYYEEYISNHPDYELAGIYADEGISGTSTKRREEFNRMIADCEAGLIDMVITKSISRFARNTQDCLMYSRRLKDLGIGIRFEKENINTMDSTGELLFTILSSLAQDESRSISENCQWGIRSLFKRGIHHLNTNRFYGYDSDENGKLIINPEQAKVVKWLYESFMNGVNPDVLVKTLNEKKVPTCMGGDYKWTCNQVKRILQNEKHMGDVILQKTYTPDFLTHKSVKNEGQLPQYYIKEDHEPIVSRKLWKAVQLEMERRQEYMRQHYLKMMGQYTDENPLSHRVICGICGHTFTRKTKTRIEGRIKVWQCGQYYAKKGEHLCDGRTIREDKIYAAFDIAWNHIVENRAQKEKNWRKQINHGNELEAFRAEQFMKLTEGDGRSKTGKELVSIVLSHCVYEENGYLTFYFLDGSHVKIKP

SEQ ID NO: 24447 - protein, 448 aa, synthetic construct
MKKMNVGYLRVSTENQTEKYGLDLQKNKIIERAEKDGDKIDKWYIDGGYSGSTLDRPDIQRLLEDSKNGYIEKVYIYKLDRVSRDTIDTLVILYRTLPEYNVKIVSATEELSLDTPMDKMKIGIDALMGQYEREIISMRTKAGMLERVKSGLWMGGGRVPFGYYYDRNDGILHPKKDEAEKVRTMYRLYNDGYSCQKISDMLGMKGERIVIQILKRKSNIGYIEYKGNIYKGKHEAIIDEETFYKTQRFMEKRSNNSYICNKFLLSGLCFCGKCGARMRYKKWANRHVLECYSRDGYKEYMVKNPNCDNKRPDAKDVEREVSDCFKRFAVNITGRREKQLSKKELIEKEMKSTVDKLKKLYELYATNESETLLEVIGKSEKRVKELRRELDKEMREKSLTTPERIEKIKKISDVWDKLDVKEQNKVLKECIDKIVITDGNIDIYFNLL

SEQ ID NO: 24448 - protein, 449 aa, synthetic construct
MSGDVIRAAGYIRVSTAEQALRGLSLEAQEAEIRRYAAQRNIRLEKIYVDKGITARKQLHRRVAFTQLMHAVDAGELDLIIVMRLDRWFRNVYDYHRMMNEHLIPHGVNWCAVKEEYDTTTTNGRLMINLRLSIAEQECDTDGDRIRDVQQNLIAKGCWPFGGAPLGYRIENKRLVKDPETEPQVSFFFQHMLAHGSLRGALFAMNERFGTGYEYRRAQDLSRKSVYYGTYGENTSFCPAYITFEEHERIRALAEKNVRVWSSPTAWPHLFSGLLICDDCHRRLNAQTIRRPSGIYTTYRCSHSTDNHGCVNNRCISEKVIEAYLLDYLNTHLKDYLVEIEVVQKKAAAQPDNTEKIRAKQERVKTLFINNLIDLAEYKSRMESLEQQIVRPTAPPAPQNTQKLKEILESDVLRLYPELSREEKRSFWRGFIKELHIYRGTIQGPPIFW

SEQ ID NO: 24449 - protein, 464 aa, synthetic construct
MQEKILRCAIYIRVSTFEQSVHGKSLQAQEECLKQYAADHNMAVVGIYADEGKTARKELKKRKAIHALVEDVKQDKIDVIVFWRLDRWFRNLSDFYKVQDVLDEHGVRWISVSEPGINMETRDGRLQLNVVLSIGQNEVDTTSERIKFVNEASIRQKKLIFGDANMPFGYKTGVVDGKKCMVKDSETEHMVEDFFEYFRNHNSKKGAIRYMQETYGIDFSYGMLRTMLSSEFYKGTYRGYPYCPAYLSEKEWDEMQTISKRNIKNTPSGRIYLFTGLMRCPVCGQKLVGTGCSSIVNRKTRKKRTYCYYRCNRALIDHICTYRHRVSQNLIEKYLLENLEREYEKYKVRTNQISEELKKQKKTKDPEKLRKEMERLNLLFQKGRISYDYYDKEYQRLEEEHSASAAFPEEEETRSLHYVEELLETDFRQMYDTLSLENRRSFWRSTIQEIYLNEDNTIKGVDFI

SEQ ID NO: 24450 - protein, 513 aa, synthetic construct
MKRITKIDALGANRKKLRVAAYARVSTDSDDQLVSLETQKNHYESYIKERPDWDFAGLYYDEGISGTKMAKRDGLLKMLEDCDKGKIDYIIVKSISRFSRNTVESIETVRKLCADGIYIYFEKENIDTGKMESELLLSILSSLAESESHSIAENNRWSIQKRFQNGTYKISYPPYGYDNVDGEMVINQEQAEVVRWIFEEVLAGGSVREIAKSLNERGVQSKRKGTWTGGTILGMIKNEKYCGDALFQKTYTDDRFNRYKNYGERTQYLMQDHHEAIVTREMQEAAIALIAVNASEKGIVAGATKYQNRYAFSGKIICGECGATWKRIVRAKYAGYACNTHIDNKDACGMMVIKEEPIKAAFATMMNKLTAARHQILVPYSDMLRTLKDADTYGRLNEIEELLEKNQTRKQQITQFFSKSLLDPAVFAAERDSLDEEAARLEVERKLHTQQLNGGHDQKKALEKLLKYTAKGRALMKFDDGLFTEHVDHIIVFSRTEIGFAMKCGPVFRERID

SEQ ID NO: 24451 - protein, 523 aa, synthetic construct
MALAQNITVIPARRKVGTQKSTEWVQKTRVAAYCRVSTEFDEQESSYEVQVEHYTSFIEGKPDWTLAGVYADDGISGTNTSKREAFNRMIDDCKAGKIDMIITKSISRFSRNTVDCLKYTRQLKELNIAVFFEKENINTLDAKGEVLMTIMAALAQQESESLSANVRLGIQFRNQQGKVQINHNWFLGYTKDEDGKLVIVPEEAAVVRRIYAEYLEGASFLQIKRSLEADGIQNGAKHDKWYESNIKQILTNEKYIGDALLQKTYTVSILDKKRATNKGNLPKYYVEGSHEAIIAKDIFLRVQAEIARRANITPDGKKRIYSSRYALSSIVFCGHCGDIYRRIKWNNRGCKSTVWRCVSRVLKKDSGIDCPARTLREEDLHAAVLTAVNDAWSRKADIIPALKENIKAVLDGGVADAIAEIDGKIKEKQQELLEAGHDDTLIDSIGSEIIDLREEHQELMTTAAKQQELQERLEDLDNFLDEQTEAITEYSEALVRRLIEKITVYDEKLVVEFKSGLQIEVEA

SEQ ID NO: 24452 - protein, 526 aa, synthetic construct
MPKVTMIPATINPMTHLPSVAARKRRVAGYARVSTDSDEQFTSYEAQVDYYTKFIQSKPEWEFVKVYTDEGISGTNTKRREGFKEMITDALDGKIDLIVTKSVSRFARNTVDSLVTIRKLKENGVECYFEKEGIYTFDGKGELLITIMSSLAQEESRSISENITWGQRKSFSDGKVHLPYKRFLGYEKGEDGRPAVVESEARVVKLIYGLFLEGKTQAGICKYLEELGIPSPGGKQTWSKTTITSILQNEKYKGDALLQKKFTVDFLEKRMKPNEGEVPQYYVTGSHPAIIEPDEWEQVQAEFARRKTLGKAYSGKSVLSAKLVCEDCGAFFGPKVWHSTDQYRRTIWQCNGKFANEERCHTPVMDTETIQRLFIKAYNLMMQDRVQIIKQCEAWRARLMDFGTLDADIERQLEETQVVAELVKAAVKENASTAQSQEAYLKKYETLTERYEKAAAELERLQSLRTARSQQDKKMALYIRTLKKQPEVMHDWNDTIWTVMIEKAIVHKDGQITFVFQNGTEIKVGA

SEQ ID NO: 24453 - protein, 587 aa, synthetic construct
MMNGIQFQSVQTPNALSSELRSVIRDNVLQFYVQGNGMDVQEEGITALYERLSQEDKLDGESNSIANQKKILERYCKDHGYTAIRHYDEDDGYSGTNFNRPGFQRMLADIKAGKIKRVIVKDMSRFGRDYLQVGMYTDVLFPEFGVHFIAVNDGVDSTRGENEFTAIRNVFNEMYARDTSKKIRATWQSKGKSGEHLTTIPPYGYIKDPEDKKKWIVDEEAAAVVQKIFSLCVDGLGPTQIAKWLKQHQILNPTAYAHSKGLPASNKPTADPYKWTNETVSRILERVDYLGHTVNFKTTKQSYKSKKKLWNDPADWVIFENTQPAIIEESVFIIVQNIRKSRRRPTKMGDMGIFSGLLYCAECGGKMYQCRATNFTEEQKYFICSTYRKGKDLCTTHSIKNVVLHEIVLKNLREAIQYVSQHEAEFMQEAADISMRDRDAEFARKRDTLAKADKRIAELDRIISRLYEDNVMGKLSDDRFIKMSHDYELEQSNLKSMAEVLRKELKQQEQQKTNAKAFVSAVKKYTDMQELDAAVLREFIDRIEVSHADKKSKTREITIVYNFIGAFDFTRAIEEARNTTQKQQKTA

SEQ ID NO: 24454 - protein, 510 aa, synthetic construct
MNAVIYARYSSDSQREESIEGQLRECGEYAQHNGITVVGSYIDRALSAKTADRPEFQRMIKDSAQGLFEIVLVWKLDRFSRDRYDSAHYKHILKKNGVKVVSAKEHISDGPEGIILESMLEGYAEFYSAELSEKIHRGQKENALKGKNNGGGIPLGYLLDKQTQKLVVDPETAPLVVEIFERYSEGATVRSIIEDFNSRGLTTKRGKPFNTNSFNALLKNRKYIGEYSYQDVVIPGGVPAIVPEDLFYRVQQRMEKNKRAPAHTKAKESEFLLTTKLFCGKCERMMVGESGKSHTGAMHYYYKCGNAKRKKGCNKKAVKKDWIERAIVRLTMERVLNEEKINQIIDALLVMQEREDVTIPALRRQLAETEKGIENMLNAIQQDIFTASTKQRLEELEKQKEELSLSMTTAELQKPKLTREYMEHWFSRFRYGDPNDREFQKRLIDTFVNAIFVYDDKLVLTYNYQHGTQTITLKEVEDFLGSDLVGLSPPNRYWTNTYFFSGGFAVKCSL

SEQ ID NO: 24455 - protein, 529 aa, synthetic construct
MSKAKNVTVIPATLNIHTKTPTKERVRRRVAAYARVSTDSEEQLTSYEAQVDYYTRFIQENPDWDFVEVYTDEGISAVNTKRRDGFNRMIRDALAGKIDLIVTKSVSRFARNTVDSLTTIRKLKEAGCECFFQKENIMTFDSKGELLITIMSSLAQEESRSISENVTWGQRKRFSDGKVSIPYGQFLGYRKGADGLPEIVPEEAEIVKRIYREFLQGKSTNAIATMLTEEGIPTPGKKTVWQRATVESILRNEKYKGSALLQKSFTVDFLTKKTKINEGEVPQYYVEDSHPAIIEPWEWEQIQVELERRKNSRNRHHQTSPFSGKIICADCGDIYGAKTWHSTDRYRRVIWQCNGKFKGEHKCETPHLTEERLKDLYLVALGEYLSDRDAAIDQLRYAQRMLTDTDFIDADIQALEEELTTITGMLRLCIAENAANTMTEETYRTTHAELCNRFEETESKLAALQKQRDKMKADAITIGGMMFELGELDTLPVVFDEKLWHGTIDHVTVHADERVVFHFKDGNEIVTRL

SEQ ID NO: 24456 - protein, 425 aa, synthetic construct
MSRTVEQIQFAPRMPKPLRVAAYARVSSGKDAMLHSLAAQVDHYSTYIRHHHGWEYVGVYADEAKTGTKDSRENFQRMLTDCRAGKIDHIITKSISRFSRNTVTLLETVRELKELGISVYFEEQSIDTATADGELMLSILASYAQEESLSASENQKWRVKRNFEEGIPWRFFMLGYRRENGKLAIVPEEAEIVRSIFDDYLAGKGVTAIAKRLNESGYSTQSGCVFHKSAVERILRNYAYTGNLLLQTKFRENHLTKVTRKNQGELPRYHATNTHEAIIPLETFNAVQAEIRRRKEKYAPTKPPQTSPFTRLITCAICGKHYRRKTTATGPVWICSTYNSYGKSYCPSKAIPEEKLMQTAALVGHTGEITGITAHNDNLLEFTLKDGTNAVKRWQDRSRAESWTAEMRRAAGEKTRERKQCHVES

SEQ ID NO: 24457 - protein, 507 aa, synthetic construct
MPEKRITRVEFPARTFSPEQPPPTKRVAAYARVSTMKDAQENSLQAQQEYFTEYIQRHPGWGFAGMYSDDGISGLSIRERDGFNSMVTDALDGKIDLILTKSLSRFARNTVDALTTIRSLKAAGVAVYFQKENINTMDSTGEFLITLMSSFAEEESRSISENVTWAVRHRYAQGIYHLPGLLLGYQRSPVGEIHVDEAGARVVRFIYLLALAGKSSTDICRILMDYGILSPGQSQRWEPHTVRSILKNEKYMGDAILQKEITVDFLTKTRKPNEGEAPQYYVENGHPCIVSKSVWQEVQATWTDAIRRNCTFSPIANKVICGGCGGRYGRKTWHSTTYRDAVWECNSKKAGRTKCKCRHIYAEELDTAIRRSMHHLLKIHKNIIPDCADLLSQTPGEISSDARSVLNDIARGKLDIRIDGLMIGILIRKMVVTPKQTLVIHFLDGTTYRHRLGATPRGTRLYSTKRDHSQILALYAEGCSAKEISQRLGISANTVRSFLRRHHRSDT

SEQ ID NO: 24458 - protein, 542 aa, synthetic construct
MARKKNIAAGQNAVIYARYSSHNQREVSIEQQVRECMKHAAELGLHVVGTYEDRAISGKTDKRPNFQRMMRDAEKGKFQAVVAWKSNRIGRNMLQAMVNEAKLEDCGVKVFYAEEDFDDTAAGRFALRNMMNVNQFYSENMAEDITRGLYDNASKCMANGRQPLGYKRGEDGRVVLDEANAAVVREIFTRVAAGDLFVDIARDLNAQGIKTSKGANWNKGSFQSICQNERYRGIYIYGDVRVADGIPRIVSDDLWYRVQEAMRMKKNPVGTRHRVGAEDYLLTGKLRCGHCGSYMTGVSGTSRNGELHYYYTCQKRRTEHACDKKNIRRDVIEPAVAQAIKMYCLTDDVIAWIADRTVEYWEKHDNDLQIEALEQQLEENKKATSNMLKAIEMGIITEATRTRMVELETEQSRLSVQLNAAKEDVVKIDREQIISYLELLQQGDIHDRDFQMELFKNFLVAVYVYDDNRMKLVFSCMGDQNSVEIPLETGEDPPDGGLSLDAKMFVLTPDSSTRSERHHTLCGAFFVLHCSRKTQKNFCPLP

SEQ ID NO: 24459 - protein, 545 aa, synthetic construct
MRTIRKIEQKISGLKQRKKVAAYARVSMESERMHYSLSAQVSYYSKLIQKNPNWEYAGVYADYGISGTGIKKRQEFRRMLEDAEAGKIDIILTKSIQRFARNTVDLLQTVRHLKELGIEVWFEKENIHTMSGDGELMLTILASFAQEESRSISDNIKWRFRKKFEQGIPHAKFFVYGYCWEKDNLVIQPEEAAIIREIFDAYLQGRTRKDILRELKRREIRTMYGNYFKDASIRQILTNRIYTGVLEIQKTFVTDPITKRQAVNHGERNRYVVEWHHEAIISSDMFERVQQELKNRKEMGMQRGGYARDFLNTSCFTGIIKCGICGKSYVHVVRKYKGRIREYWTCDSHKGKGTNCGAYGSIPQPALKKACAAVLGTDEFDEELFVQRVKKIVVPSYHTLVFHFKDGNVITQEWKSTALKDMWTDEQKKKQRQWMETYHQRDTSGRYTAFSERIVCPACQTKFIRCLEKRKNRQVAYWRCRGENRCIHVRSIKEEWLQRMAAETMGKLEFDDTAFRTQVQRIKVQDNETLLFLFSDGHTKEVKLP

SEQ ID NO: 24460 - protein, 519 aa, synthetic construct
MKKVQVIPATLQNYTEKSFHNQKKRKVAGYARVSTDRDEQLTSYEAQVEYYTHYIKGRSDWKFAGIYTDEGISGTNTKHREGFKRMIADALAGKIDLIITKSVSRFARNTVDSLTTVRKLKDKGIEIYFEKENIWTLDAKGELLITIMSSLAQEESRSISENVTWGHRKRFADGKVSLAFSHFLGYDKGPNGNLVVNKEQAKIVKLIYRLYLSGYTFHSIAKELTEQKIPTPAGCKIWRANTIRSILMNEKYKGDALLQKKFTVNFLTKESKKNEGEVLQYYVEHNHEAIISPQVFDWVQEEIKRRRGGRSRYSGVSIFSSKIKCGQCGGWYGAKVWHSTDKYRRTIYRCNGKFKSYCQTPHLTENDVKEVFVRAANRLIENKADILDSITLLKERLTDTEALEEERDKLSTDLNLLADRVKQLIAENARLAQNQDDYDRNYNELVSRYEAAKKRYDKTCDTIQYRKARSLQMDSFIKELRNQELIKEFDARLWSSLVDFITVYSKDDIRVTFKNGIEY

SEQ ID NO: 24461 - protein, 545 aa, synthetic construct
MKITKFPIDLSMLTEEEIDQFRQDPSTLFEGDTDVCLYLRFSSERQREQSIEGQLRDCRTFCKLNSYRITAIYVDRATTARKDVEKRLHFQEMIRDSEKRPWEYVVVWKLDRFARNRTDSALFKFRLRKNGVKVTSATESISEKPEGIILEAVLEGMAEFYSADLSQKITRGMRESALKCHSIGGHVPLGYKIEDHKLVINPATAHIVQEAFELYANGETVADICRMFNAKGYRTAKGVEFNRNSFKSMFRNKRYIGVYTYKDIEVEDGVPAIIDKELFETVGRRLSKNAEAPARGKAKVDYLLAGKLFCGHCGGSMNGESGTSKTGTIHNYYTCYTRKRKHACDKKPLKKDWIEYIVAQDAMELLTDDTIQEMADMAISQTEQDLRENTRIPELTERMKETESGIANITKAIEKGVASDALMNRLMELEKEKKNLLRLLAEEEKYVCKIERSQIVYWLTEFKGGRIEDERYRRIIIDLMINSVTVWDEPDGFRITTAYNLTSCKSKTFRIAPSGEKGFGFEGSESTIKITTPKGVVIFMDAFRN

SEQ ID NO: 24462 - protein, 545 aa, synthetic construct
MAEKKIKKIEATKPLYSNNFQNYSRKRHVAAYARVSTDKEEQESSFDAQVSYYTQKIQANPQWVFVEVYADEGITGTSMKKRDGFNRMIDDALAGKIDLILTKSVSRFARNTVDSLTTVRKLKDKGVEVYFEKENIYTLDSKGELLITIMSSLAQEEARSISENTAWGRRKQFADGKYSLAYSTFLGYDKGPNGELVINEDEAPIIRRIYDEYLAGLSPYMIAKKLTADGIETPAHKTVWQPSTVQSILTNEKYYGAATLQKTVVVDFLSKKVRPNRGELPSYYITEDHEAIIAPVKFRMVQEEMERRKKAGRKAQGVSVFSGRIVCGDCGGFYGRKIWHSNTENASWHWHCNNKFMKRKYCTTPTLKEESLQETFVEVFNGLIRRKKEIEENYRLCLAVITDTTEYERQMEELDKEATEVQALIRSLLIEYGRSADSNNIAAQYEEYERRLDAIARLREDLDMKIASCSLKRTQVTAFLMELKKHEHPLSEFDPLVWQATVNHARVDHDCNITFCFRDGSEVKTKIRNGVRQYRKRSKGEHTDG

SEQ ID NO: 24463 - protein, 432 aa, synthetic construct
MPKAIVQIDQKPPGICFSKRVAAYARVSSGKDTMLHSLATQIDYYKRMILDNPSWRFAGVFADEAQTGTKDDREQFQKLLALCRSGAVDMVITKSISRLARNTVTLLQTIRELKELNVDVFFEEQNIHTLSTEGELMLTLLASFAQEESRSVSENCKWRIRHGFEEGKPNTCRMLGYRLIDGEITIIPEEAKTIRRIFDLYLKGYGKQKIANILNEEGLVTVNGGTWHPEPIVKILTNEKYSGDLLLQKVYRPDHIQKIDFHNDGQLPSFLVEDDHEAIIDKEVFLRVQTLREGRSIRKGLRQEPSLFSGLVRCGCCEARCRRKKTHGIVKWWCSTFDRKGKQYCPNAKAVPEEALIKAACDVLEADVLDEAFLRERIDHIDVCTDNVLRFFLKDGSKPERQWRDHSRAESWTPEMKETARRKEVLRWQKRK

SEQ ID NO: 24464 - protein, 542 aa, synthetic construct
MKQPNNTKTKIYSTALYMRLSRDDENFGDSVSIETQRTILQKFAAENGLRVYGEYVDDGWSGTNFDRPSFQRMMSDVEAGKVNCIVTKDLSRFGREHVMMDYYLEFVFPEKQVRYIAIAENEDTEKGLSEFVPFKNLFNEWFAKDTSRKVKSALHAKFEKGERIFAYAPLGYKRHPEIKNTLTPDEETRWIVEKIFDLAVHGAGAAKITRILIAEKVPTAGWLNYKRYGTFANIYAGAPEEKAYAWTIAQVKSILKDETYIGNSIHNKQTNISYKNKKKVRKPKEEWVRVENTHEALVSKDVFDRVQELIETRRRKQKDGTTQIFSGLVKCADCGWSLAFGMNKQNKKPYGHYHCSNYGQGTGHCTMHYIRYDVLYTYVLARIQYWSYQAQMDEGRLLQKLLKAGDRERTASQKKQAAELNRAEKRKAELDRLFAKMYEDWAAGRITEYNFNMLSQRYQTEQQELAEKIERLNADLAAEQQSAVDAEKWVNLIKQYVNPTELTAELLNALIEKIVVHEAVKDESNTRTQEIEIYYRFIGKVE

SEQ ID NO: 24465 - protein, 545 aa, synthetic construct
MNIAIYPRKSKFSPTSESIANQVAMCREYCDRCFDDPHYLVYDEDEGFSGKSTNRPAYTQMIEDMRADKFQVLCCYRLDRISRNVRDFAELLDDLQRHNIAFVSVRNNFDTSTPFGRAMVYISSALAQMERETLAERVKDNLYEMARSGRWLGGVTPLGFVAKAQEVHRDDKKRKLLMLSPVEEELAQVRDLFDHFLRLGSVTKLLQYCLEHRIVSRNGNDYSRTTLRLLLTNPVYCTADAEAWAYFSSGDYQLCAQREDFDGVRGIQPFARTRKDDGGTVSRPTSDWIIAPGLHRGILPGAIWVRAQQILQDNRDLGSAYKAPRTENALLSGIIRCAGCGAYMRPKAYGKPLPDGKRRFSYVCLTKIDSCGARCTMPNAPGRDVDALVIKELTSLTSDGGAISTLRSEARLAQGEARRTHAEAVATHEKAIASMQKKVDKLVDALAAGAPEGARQRILCEIDRYEQEIEQHRDALSELNASVLLDADPSALLDAAFSALESFRTSFASLTHDEQRRAIRALVDRVTWDGKNVSIEVFGEKTLPK

SEQ ID NO: 24466 - protein, 496 aa, synthetic construct
MNFIYLRKSRAEEGMSTEEVLAKHKAALLELADRLGLYVSKENILEEVVSGEKLYARTEMLKLLERIRAGDVDAVLCMDIDRLGRGGMADQGTIFDAFRDAGTLIITPDKTYDLTNDMDIEMTEFKAFFARAEWRAIRKRMRRGLMQTIEAGGYVANAPYGYRQCRIGKLPSLEIVEEEAKFVRYIYDRYLSGVGAQTIAAEINAMGSHPRRGAIWHRDTVRHILRNPTFAGKVAWNRVKHFRPGAHGKDKHHVVYMPEEEWILVDGVHEAIIPWEKWLETQQRRKQRYIPPSNTGQRANPFAGIIRCSQCGNNMQRMGSNKGVPYLLCTTKGCSAGAKFEFVEERMVECLREELDVLKLKLARGEGPDTSAIEAALASVKRELEKVDSRIPRLYEFLEDGTYDRATFRSRLDAAEEEKAKLTGQLDELKAKLEDCLSHDPRKTAAELENLLELYPTLSPADKNSALKALGIQAIYTKYKKTKPHDFTLELQLQDF

SEQ ID NO: 24467 - protein, 578 aa, synthetic construct
MAKKKKPAGGIAVIYARYSSHNQRDVSIEQQIEACRKHAAELGLTIIATYEDRAISGRTDNRPAFQRLMHDAEKGKFSYVLAWKSNRMGRNMMQAMVNESRLMDCGIKVYYAEEDFDDSAAGRFALRSMMNVNQFYSDNLAEDVRRGLMDNANKCMVNGRQPLGYKRGKDGKVVVDEPAAAIVREVYTRVASGELFTDIARDLNRRGIKTADKGEWNKNSFHRLCSNEKYRGIYIYGDVRIEGGIPTIIDDPLWYKVQEALRVKKLKRNGRHRPGDEDYLLTGKLRCGKCGGYMIGMSGRSKTGDIHYYYACQNRRVGRTCDKKNIRRDVIEPAVAQAIKEYCLTDDAIEWIADKTVEYWEKADRNLQLDSIEGDLVAVQSSISNVMKAIEMGVVTETTRDRLIELEKQRTDLKSKLALAKEEVVHVDRKKLISSLLLFRNGDIHDRQYQEDLFKTFLISVYVYDDDNNGHLKIVFNAFGDNNTVDLPIDFGETDNQSAFSDGAEKFDYSLHRSTRSHPVYIGWLFSFYFVIQKQRTALPDGAPFYAVLQDIDAACAVRIFVIQQVARVICQRAVGCR

SEQ ID NO: 24468 - protein, 492 aa, synthetic construct
MAAIDFNNVVDLYIRVSTSEQAEEGYSVAEQEERLRSYCAAFNYIINAIHIDPGFSGASLDRPGIKKVMYDVEHGRCKKVIVWKLDRLSRSQKDTLILLEDVFLANDCNFISLMESFDTSTPFGRCIVGILAAFAQMERENIKIRTMMGRQARIRDGHFHGSRCPLGYKFQYAPDGTLLSNDLVVDPYTSKLVQEVFRLFLSGSSLSSISAHMASTYGCSIYDWSNSTAIRRILSNPIYMGKVRVGNELYPGIHEPLVSETDWYMVAAMLKHNKEQQKRTYAYQISGGAYADNLLTGLLFCGDCGARMYARRVSQNKKKYICHSVAKTSPAMIKSDHCTNRLHPFTVHQLDEMVINEILKLSLDRPGFDMLCDQPDESSKSEDKEIYEERLAEVNRQLDRLVKLYQTGLIDLDNISARLGDLNQEKTFLEGNIATINEITPADLRETAWKSIQSLQSVLDNGDMDEVHRIIHTLIDKVVVLNADVTIYWSFC

SEQ ID NO: 24469 - protein, 517 aa, synthetic construct
MLRAVIYARFSSDMQREESIDAQVRACKSYCQSKGYLVIGQYVDEAKSGRELTKRDAYNQMLADALEDKFDIIIFHKIDRNSRNELNYYTTKDKLEKLGIRYEYAVQHIDASPEGQMMEGVLVSMAAYYSRNLSKETKKGLNENAYKAQFNGGTAPLGFRIVDKHYEIEPIEAEAVRLIFKLYLAGYSYIRICRELELAGYKKRNGKPFDKTCLYDILGNEKYMGRYTFNKTPRAKNGQARNSHSKTRPDDFIAIDNALPAIISKEDFAAVQAKRETNQRRFSSYKAVEPYLLSGKVICGYCGSAMSGHRVAPRSGEPYGYYYCLKKERVAGERCPQKYIRAEKLERIAIRALEEEIFSEASMKKIAALMREGYAAMTNEADESRKALIQAKAAAEKKLDNLYTFIENGEIDEYSLARMKKIKDELAKIKARLCEASVKFSKTLTEEEIFATLAAFKKDLESNADNSAKRFVVNLLINKITVRDNCATVEILPNMLTVYLVPRTGIEPVRVSLPEGF

SEQ ID NO: 24470 - protein, 491 aa, synthetic construct
MRAVLYARYSSDNQRYESISGQFHCSEEYCRRRGYDIVHYYYDEAKSGTTVAGREQFNQMIEDASRGIFDVIVFYQIDRTARNEMDYYASVNKLLKLGVRYEYSAEGIDVSTPNGKLTEGVKVAVAAFYSRDLSIKIKRGKKENLLQKKHNGGISPLGYDIAPDGTYVINEYEAIAVKKIFSMKIEGAGYGKIVDWLKANGYKTKRGGDYSKGAIHDILRNRKYIGVLELGKSTKHNSRKKADNYMEFEDALPAIIEKKDFLTVEKIMARRRNGATNAKEIYALSGRIFCECGAAMSGTRIGARGNKYIYYACSNQKNKHGNCDVSMVRKDKIEYVVYLAIVDYIKAHKQSIIAEFLNQSENREEKVRADELRQKIGVQKNKAKNLLALYDGTDDMVLNAYKEAKKTLDMMEAELIDLNKNDYSAINKDILEAFIYSFITEVGVSDAFLKKFFDSLDVKVIVNNKNAEIQLNLSVLPFVVALKGIEPLISP

SEQ ID NO: 24471 - protein, 596 aa, synthetic construct
MEVELIKAHDSFDGSARRKIERLRVAAYCRVSTDDEDQIKSYNSMVTHYTELIKNNKEWIFSGIYADKAITGTKVDKREEFQRLIQDCMDGKIDMIIAKSLPRFARNTLDTLKYVRMLKERNIAVYFEVEKINTLKDGEFLMTILSSVAQQEVENTSAYVKKGLKMKMKRGELVGFQGCLGYDYDVETKSISINEEGAVVVRYIFDRYVAGAGSTMIARELNEQGHLTIRGNPWTSSSVMGIINNEKYKGDILLGKTFTVDPISKRRLENLGEEDRYYIHDHHEPIITEEQFERAQEMRRRRNGNRKCGVTPGKREKFSRQFAFSCMVECGFCGSNLSRRRWHSSSKYKKTIWQCVKSTKEGKRFCPDSKGIPEQVIEEAFIESYRMLCNDNKDVLEEFLKRTEKALGENSIEDQLHKLKKSIDKVSLKRKKLLDNYLKGIIEQDIYEETDVELKTELTNARAKLEYLQQQSDEKSSLQRRLSDFKKALSHNEVLEEFDRGIFESIVEKVIVGGLDEDGNKDPYKITFIYKTGFKNEIGNAKERFGKSSGIGDKVKKMCSDISDEVKGVCSDVSLNTCGDGSIDVKSRRKIAAKAQ

SEQ ID NO: 24472 - protein, 464 aa, synthetic construct
MARSVTVIPARSPKVRTGHKAVQEKKIRVAAYCRVSTDQEDQLHSFEAQVEYYTKYINEHENYEMAGIYADEGISGTNTKKREQFKKMIADCEDGKIDLVITKSISRFARNTQDCLAYSRKLKNFGIGIIFEKENINTLDSTGELLFTILSSLAQDESRNISENCKWGIRTKFKNGEMHLNTFKFLGYDKDENGKLVINKKQAKTVRRIYRDFLIGINPAQIAKELTEEKVPGCNGQTKWYPSTIVGILKQEKHMGDALLQKTYTADFLTKRQVKNNGEIAQVYVKDSHKGIIDKETWNAVQEEFERRERFMKDHGTDRYSYGADCMPFCEKVFCGECKSLFTRHSWKSRGIVQWQCKNHRTDGRVTCSNAYVDNSDIEKGFVKAFNKLVADREKFMERWNQMKTDGSSLEKIRAEQMMEATGNEPLGRFVPEIAQLVLAEVTVLGAKKYEFFFLEGSRIKVSV

SEQ ID NO: 24473 - protein, 502 aa, synthetic construct
MEIQIREGNSRQKQKLKVCAYCRVSTDANEQENSLENQIRHYKEVITSNPDYEYAGVYSDFAISGFKEKRPGLQKMLADARKGKIDLILTKSVSRFARNTSIVLEATRKLKELNVGVFFELQNINTLSGEGELMLTILAAFAQAESESGSVGAKMVYQRKYEAGIPVQYLERSFGFKKDERGVYIADEEEAVWVRKIYDMAAQGYTLAAIKRYLNENNVKTVGGAKWLDSTVLRILENEIYKGDYIMHKYFVNEERKLVRNRGEVDAWYIEDDHEAIVSPELWQKAQDALEAKRDYLAEGSVIEEFTEENYPYMNKIFCARCGHPLYKRIYSNGNRLNWGCSGTKRYGKSFCEGINIPDGVLRGAWHFDENMYIGEKQTDKGKKEFTYLKEASWKRRHKKKEPEPIPENTETEYPYREKIFCGLCGSRLVRHVNTKNHKVIWVCNGRKRKGKDFCDGTRVPDTIIKGWGEIKKDIYIQRKDDKNGKKRYSYTSKKPKGADRA

SEQ ID NO: 24474 - protein, 520 aa, synthetic construct
MPRKKAPAAEAPRLVAYYRYSGGSRQTEQSIEGQRRDCEAYARAHGMTILREYVDRHISGKTDDRPAFQQLVADSAAHTFDAVICWKTDRLARNRYDSAVYKKKLRDNGVEILYAAESNISGAEGIIIEGLMEALAEYYSAELAEKARRGMRESALKGKALGSSRPLGLTVDAGKHYIIEPTGAEAVRYIFEQYAAGLSSSSIVERLNAMGLRTSHGGPFNKSSINRIIQNEMYRGVYVSKKFDVRIEGAIPAIIDNDLWERAQKMFERNRQSRTPHASRADYILSGKLYCGECGCLMKGVCGRSSGNGQMYHYYACPGRSIGRACTRKNIPQDELEAMVVNSVADLLLEPELLEQIADAIVELQQAEAARPDPEKQALEKSLSDVRSKIQNILTAIENGTSSAALSARLADLEQQESTLSYQLSSLTAKKPLTFTRDQILFLLQQFRVSPSERTKAYCRRLVDTFVDHIELTNTELILYFNLSDETVDKNKKAPRSNPSEESSTEKRLVRVARIELTAS

SEQ ID NO: 24475 - protein, 541 aa, synthetic construct
MRIAIYSRKSKFTGKGESIGNQVEMCRDYIATNYNGEEHSIQVFEDEGFSGKNLDRPQFKKMIEIENVIPFDLIVVYRLDRISRNVGDFASLIEKLNKKNTSFVCVKEHFDTGNSMGRAMMNIAAVFAQLERETIAERIKDNMYLLAKEGHWLGGTTPLGYKSIEVTNGKRTHFELIIDESQIDLVNIIFSKYKQLGSINGVETYLFVNGYKTQKNNYWHKSNVKRILTNPIYCIADIDSLNYFTELGCNVCFTLDDCNGKKGIYPYNRFSGQKREMQSYDRWIITISEHQGILAGKEWVAIQQQLKANSKDGFGGKVNERRSTNNTSLLSGVLFCSCGAYMRPKKYPSGNTFYICENKMDKKITECNNSNINADELDKIILNELFSFDIKDGVVDSQIQNLKEQVANIDNDLQKQIGRLKKQIETNKNTVNKFMNIVALSIENDTPEQVVEVYNQKINELLNQNKITQKRIDELQDTNIVQAKMNDRLNSLTDAMAYLKENFDKLTIVEKRGFVKEIVDRIVWDGNNINIFIKGISELSE

SEQ ID NO: 24476 - protein, 464 aa, synthetic construct
MARSVTVIPARSQKVRTGYKAVQEKKIRVAAYCRVSTDQEDQLHSFEAQVEYYTKYINEHENYEMAGIYADEGISGTNTKKREQFKKMITDCEGGKIDLVITKSISRFARNTQDCLAYSRKLKNLGIGIIFEKENINTLDSTGELLFTILSSLAQDESRNISENCKWGIRTKFKNGEMHLNTFKFLGYDKDENGKLVINKEQAKTVSRIYRDFLIGINPAQIAKELTEEKVPGCLGQTKWYPSTVTGILKQEKHMGDALLQKTYTADFLTKRQVRNNGEIAQVYVKDSHKGIIDKQTWNAVQEEFDRREKFMELHGTDRYSYGADCMPFCEKVFCGECKSLFTRHSWRSRGIVQWQCKNHRKDGKVACTNAYVDNADLEKGFVKAFNRLVTDRDKHMERWQQMKSDGTPLEKIRAGQMMEAVGNEPLTRFVPEIAQLVLCEVTVLGAKKYEFFFLEGSRVKVSV

SEQ ID NO: 24477 - protein, 522 aa, synthetic construct
MGNVMVIPARRQVGNTVKQSAQKKLRVAAYCRVSTDSEEQETSYEAQVTHYTEYIQKNPEWELAGIFADDGISGTNTKKRDEFNRMIDECMAGNIDMVITKSISRFARNTLDCLQYIRQLKDKNIPVYFEKEAINTLDAKGEVLITIMASLAQQESQSMSQNIKLGLQYRYQQGKVQVNHNRFLGYTKDENGHLIIDPEQAEIVKRIYREYLEGSSMDKIADGLMADGILTGAGKTKWHTSTINKILRNEKYMGDALLQKTYTTDFLTKKRIKNNGTVPQYYVEGDHEAIIPKELFMQVQAELVRRRVVHVSPTGKKRSFSCNHCFAQMVFCGDCGELYRRVHWNNHGCKSIVWRCISRLEPTSAEKNCTNRTVNELLLQEVTVNAINQILTERGTFLKQLQANIAKAVVNADTLSPDGIQARLEELQKELIKKANNKQDYDAIADEIFRLRDQKEQSELDSHHREELMKRIRELQDFIAGQETDITEFDEALVKKLIEKITVFTEHFTVEFKSGITIEIEA

SEQ ID NO: 24478 - protein, 519 aa, synthetic construct
MSYCIYLRKSRADKELCSEEEVLKRHETTLLELAKNRSYNITKIFREVVSGETLAARPQMQQLLSEVENGLWEGVLVMEVERLARGNSVDQGIVAQAFKYSNTLIITPTKTYNPTNEFDEEYFEFGLFMSRREYKTINRRLNAGRIAACKEGKYAGGNPPYGFDKEKLKGERGWKLIPIPEEIEIVKLIYKLYLSDEDGTGFSGIARRLNDSKVPTRSGVFWTSTQVKKILTNDVYIGKIHWQKVPEKKIVENGVLVKRRYINSNPLIFEGLHDAVIDEDIFNRVQEIVKSRKKPPNTPERPMQNPFAGVLVCAVCGKPLKRRPPDKRRPGHSPSFDCITPYCPTISSPVNIVENRILDGMRMWLEDYKPKESSNNTTDMEYTYNTTRIANCRKELENIQKQLGKTYTLLEQGIYDNETFLERQVFLKNEMSNILSTITKLEEEDNATKARAEYNKTLIPELENLLEVYDTLPDAKSKNVLIKKIFHQIRYSKKTRGNRWAPDKVDDFELEFISKLPSK

SEQ ID NO: 24479 - protein, 490 aa, synthetic construct
MAYCMYLRKSRADKDYENLSTETILNRHEKTLMELAQKHNYDISKIFREVVSGETLSQRPQMQILLNEVENNMYDGVLVMEVERLARGNSVDQGIIAQAFKYSNTLIITPTKTYDPQNEFDEEYFEFGLFMSRREYKTINRRLNAGRLASCKEGKFVGSVTPYGYTKEKLKNQKGYKLVPDLEESKVLKLIFDLYTNSMGIRNICKHLDSLGIKPRNSENWSTSTIRDILKNPVYIGKILWQKTYSTKTTKDGFVKSKRYKNKEDFYTFNGIHSPLISEDTFQKAQNILLQNSHPPVNNTSLKNPFAGILYCNLCGKAIVRRFVNNKYQYLMCNNPNCQNTATELKNIENCILNIIENHFNYTTSPTVFEKEDNTNELFYINKEIKKLKLQFSNIFDLLEQKIYSKETFLERKQMLEKNIEILTLQKGKFENNASQINPINTPVTILELYNKLDDIKNKNQLLKNIFSKIYYSKIDNNIKITIYSKLPIK

SEQ ID NO: 24480 - protein, 463 aa, synthetic construct
MPSKIERCAIYIRVSTAEQMMHGKSLEAQKQYLTNYAKEHNMTVAGVYADEGKTARKELKKRKAIHSLLEDVKAGKIDVIIFWRIDRWFRNLSDFYKVQEVLDDNNVHWISTSEPGINMETRDGRLQLNVVLSIGQNEVDTTSERIKFVNEASIRQGKLIFGDVNMGYGYKSGIIGGVKRMVKDPDREDAVNAFYRFFFKHHAKGLSMRYIQENYDPDFTWANMRTLLSSEFYKGTYRGIPYCPAYLTESEWNNLQEIQNANVKRAPSGRIYLFSGMINCPICGRRLSARGGSSIINRKTGAKKVYCYYRCNKAFIDHKCSYRHMVSQNLIERYLIDHLEYEYNKFKIKCEKIEKEQEKKKKIQTPEKLQKELERLNLLFQKGRIEWDYYSKEYDRIENELNELLNTAPELEPDYAYLEELLNTDFRTMYYNLTQENRRAFWHSIIREIHLNTDHTVDSVDFL

SEQ ID NO: 24481 - protein, 498 aa, synthetic construct
MQIEVRKADMGKEKKRLKVCAYARVSTEASEQENSLENQVSHYTEMIQSNPAYEFAGVYADFGISGFKESRPQFQKMMQDAKNGKIDLIITKSVSRFARNTAIVLKASRELKERNVGIFFELQNINTLTEAGELLLTILAAFAQAESESASESSKMAYLHRIENGEVVAYLERSYGYEKDENGEYRAKEPEASVIREIYDLVIQGVNCTNIARVLNARNIQTVQGAEWTASTVFRIVENEIYKGDVLMQKTFIDGKRHQVQNRGEKAMYYAKDNHPPIVSEKTWEKAQRKLEDMRAERAEHSVIQEFTEENYPYMNHIFCAKCGWPLKPRVYSHGHRLSWDCSGQKRGTKKFCTGIHVLDNDLRKMKIEGNRYFSETVDKYGEVHLKHVGERTWKNKHKKKKFNHKDLYPELNEENYPYYKRLYCARCGSRLGRYISHGTVRWICSSYKRKGQAKCPGVRIPDEIIKGWNLPDGKIYIMGKEDKNGEKHYSYTSESAL

SEQ ID NO: 24482 - protein, 465 aa, synthetic construct
MARSITVIPASQPYRVGGRTQQKTRNLRVAAYCRVSTDQEEQLNSFENQVEYYTKYIHDNPLYQMAGIYADEGISGTNTKKREEFKRMIRDCEEGKIDLVITKSISRFARNTQDCLEYSRRLKNLGIGIFFEKEHINTLDASGELLFTILSSLAQDESRNISENCKWGIRSKFKKGIPQVDCTKFLGYDKGDDGKLIVNKEQAKIVKRIYREFLNGYNPAAIAKMLMEDHIKTGTGREEWRSASVRAILKNEKYMGDALLQKTYTSDFLTKKVKKNHGEVEQFYVKESHEAIIPKEQWEAAQLELERRDSYMQELGLTFYGYGSEVNPFSCRVVCGKCGAVCGKKSWKSRGVEFWQCNNRSKNHGVKGCASENLPHENLLKGFITAWNQIVAKREQYLPKWEKNKKDGNPLERLRAEQMIGLTLQPPLTKMLPELGQMVLERVIVQGKEIMVIRFLDGTEIKVRI

SEQ ID NO: 24483 - protein, 581 aa, synthetic construct
MARKRTNLIGNTPSVRETKVAIYIRVSTIHQVDKDSIPMQKKDLIAYCQLILGTDNYEIFEDAGYSGKNTDRPAFQNMMGRIRKGEFTHVLVWKIDRVSRNLLDFAEMYEELRSLRVTFVSKNEQFDTSTAIGEAMLKIILVFAELERNMTSERVTATMISRANSGQWNGGRIPFGYSYDPKEKVFSIREDEASICRELKDLYLLNRSLAYVSRALNEKGYKTRAGVSWSPHSVWIIASSPFYAGIYRYNRYKGVESRTINPEEEWVMIQNHHPAIFTLEEHQAMRSIMKSNKRNMDNLPGRVHLSIKTHIFQGIMYCDKCGSKMVSTPGRLHVDGYRTSNYGCPLRRNTKKCNNPTVNDIVIGEFVINYILNMLNAKKTFSTINTPDELNAALLSGSVFSEVSSVEENGLNSFFNLLSRYGSDRSYIFSVKNPRKKKAAVDPELSKLRKEKEKQERALQRLQDLYLYSETSMSEKDFIIRKSEISSHLDNINRQLGLMTQDQASFLSDEEFIKQASHLLIQKELKNKKYIYFKKLVSTVDPDILKAYMETILDSIYTADGKITAITFKNGLTHRFIYKDK

SEQ ID NO: 24484 - protein, 528 aa, synthetic construct
MPKTTKKITTIPATLTRFTAMPINQQNKRRVAGYARVSTDHDDQFSSYAAQVDYYTNYIKGRDDWEFVEVYTDEGITGTSTKHREGFKRMVADALDGKIDLIVTKSVSRFARNTVDSLTTIRQLKEKGIEVYFEKENIWTSDGKGELLLTIMSSLAQEESRSISENCTWGQRKRFADGKVSVPFNRFLGYDRAPDGNLVVNREQASIVQRIYAMFLQGMSYHGIAKQLTSDGIPTPGGKKKWSQSTIRSILSNEKYKGDALLQKSYTVDFLTKKTKVNEGELPQYYVEENHEAIISPDVFAMVQREIAKRGRGKNYHSSVHAFSSQIRCGQCGCWYGSKVWHSNSKYRKTVWQCNHKFDNDEHCTTPHLTDEDIQNAFLSAANKLLATKDEVIANGHKMVDLLFDTSELEAEQATLLEETQLISDMVQQSIYENAHIALDQAEYQKRYDSLTHRFDTAKERLETVMAQLQQMQLQRADIEAFLQSFKELPDTLTEFSAENWHALVDYATVYSADDIRITFKHGQEIQA

SEQ ID NO: 24485 - protein, 577 aa, synthetic construct
MRKINKIEPLMPALPTRKKVAAYARVSMESERLQHSLSAQVSYYSELIQSNPEWEYAGVYADDGITGTKTNREEFQRLLADCEAGKIDIILTKSISRFARNTVDLLETVRHLKELGIEVRFEKERINSLSGDGEVMLTLLASFAQEEIRNLSENVKWDTRKRFERGIPNGRFLIYGYRWDGDHLVIEPEEAKIVRLIYDNFLKGLSAEATEKQLKEMGVKSMKGKPFPNSSIRAILKNITYTGNLLFQKEYVLDPISKTTRKNRGELPQYFVENTHEAIIPMATYQAVQAEIARRRELGVFANWSINTNCFTSKIKCGLCGASFVRNTRRNRAKTSQLGGRYTFYSCGTNKRKGSRCSSGTIREDVLKEECAKVLGLLEFNEETFSERVKKITIPAPGTMIFNFTDGTSLEHHWSRNAKKDSWTAERRKEVSEYRRSRETGWKCYNTFTHFIKCGHCGANYRVQTHKRVDGTIVRSWYCSSPTAAGCFKVGIREDTLKRLIADVMGLPEFDEELFNQQLAYATVRAENEIVFHFRDGHEAPRTFVQKRQMPRHTEEWKKHMSKVMKAKWRERHAKND

SEQ ID NO: 24486 - protein, 489 aa, synthetic construct
MRIAAAYIRVSTHMQEELSPDAQKRLLGEYAKRNGMILSNEFIFMDKGISGKKAEKRPDFMKMISMAKQKPAPFDVILVWKFSRFARNQEESIVYKNLLRNKCKVDVVSITEQTGDDMFGKLIERIIEWMDEFYSIRLGEDVTRGMVENAMRGNFQSSPALGYQVVRKGELPKKVPEESRPVEIAFKKFVYSSMGFLEIARHLNSLGYRTKKGKLFEARGVKYILMNPIYKGWLRWNYRNPDGTKKSKDDWIIVKVPKLEPTVSEELWDAANERIQLMSKIIVKKSKPSSVKRHWLSGLIKCSACDRSLSTSVHTDKRYGRTYINFQCYGYLKGKCSISHQVSEKKIVPIVLSMLKEDSLKKEVPFEILTNTKSSDEISIIKMQLDKIELKELRIKEAYRNGIDTLDEYRENKNILSMERSSLQDKLESLSVPEEEIKADMPNRIKSVYDIVSSESTTKDEKYAAINSIVKKIIYRKSDGEIDIYYYYS

SEQ ID NO: 24487 - protein, 488 aa, synthetic construct
MNVVIYARYSSDRQTEQSIEGQLKECYEYARRNDYTVIGEYIDRAISGTTDHRPEFLRMIADGDKKTFRAVLVYQLDRFARNRYDSATYKAKLKKNGIRVLSARENISDDASGVLMEAVLEGMAEYYSVELSQKIRRGMNINAEKCLSTGGNVALGFCVDGEKRFQIDPDTAPVVRKIFEMYASGYTMADIIRYLNTNHIKTSYGNEFNKNSINRILRNKRYIGVYTYRGTEVPEGLPRIVSDDLFYEVQDMMSKKKKAPARAKAFEGYILSTKLFCGHCKAAMTGISGTSKTGAKYHYYQCVTNRRDKSCPKKMVRKDFIEDLVVTETRKLLTKENIDRIAKEVVRLCEQEKDTDNLKRLRKLLKENEQATENLFKALESGQIVDVIAERISQKKQEHNELERLILEETSAHPLPTVNEVRFFLNQFRKGDVNDTKYRQALIDTFVNKIYLYDDKMTVLYNTQDSHSDVTIDNLSLSRVALVDQRGA

SEQ ID NO: 24488 - protein, 523 aa, synthetic construct
MARSTTKQPAKPKRGAKSQIIGDGVDYSRYSSHSQKDLSIEQQIAKNEELAREYGIRLVEHYCDRAVTGRTDKRKDFQRMMRDAAKGKFKYVIAWKSNRMGRNMLEALVNEAKLQELGVRVLYVEEDFDDTAAGRFAARSMMNVNQFYSENMAEDIKRGLEDNASKCKVNGALGLGFKKGEDGRYALDEPKAAIVREIFVRVASLEPFVDIINDLNARGIKTSTGKAWNRSSFHRMLANERYRGVYIWGDIRIEGGVPRIVSDELFYKVREVVTTKKNPQGRHRVNGDYLLTGKLFCGKCKAPMVGISGTSKTGALHYYYTCQNRRTGSLCDKKNVRRDDIEMIVAEAIRKYVLQDETIEWIADSTIAYNKRKEADGHISILQDQLNDTNRSIKNIMAAIEQGIITETTKGRLLELEADRSSIEAKIAIAKSDIVEISRDDLIAGLEMYRDGDICNKKYQARLFDTFLVAVYVYDDELKIVFSFSGKKNTVRIPMDASAVDNIENSAQAECSFKLPSGPPKRP

SEQ ID NO: 24489 - protein, 526 aa, synthetic construct
MPYCIYLRKSRADAEAELAGEGETLARHEKTLLALAKKLKLPITKIYKEILSGETIAGRPVMQQLLQDVEAGIWQGVLVMEVERLGRGNTLDQGIILNAFKYSSTKIITPMKSYDPNDEFDEEYFEFSQFMSRREYKTILRRMQRGREASVKEGKFAGSIAPFGYRRVKLPQEKGFTLEIEDAEAAAVRLAYELYAYGDPQPDGTFADIGRATIAKRLDQMGIRNRKGGTWATASVTRMLQNPVYIGKVHWNRRPEKKHTENGKIKKTRPLAENYLLVDGLHEPIISEELWNLAQAKMKQHYRPTGVNGIIQNPLAGLVHCSYCGNAMQRRPYLKTGQPASLICHTHFCPQISSPLYMVEGKILEALSLWMKQHEPTWEEESSADVFSTKIMALEHAIADMEQELQGLQSQFEKIFEFLETGIYTPEVFTARNKTLSEKIAEIRSAIEETQAELSKLKAARKNQVSMIPKIKNILDTYETLTPAEKNKLLKEVLDHVEYHKKIKGKKNVPADNFEIILFPKISPEN

SEQ ID NO: 24490 - protein, 469 aa, synthetic construct
MLEKILRVALYIRVSTQEQVMHGYSLEAQEAALYDWCKNFKNDRAYKDYEGIEIVDIFKDEGKSAFKPCKKRPEFMRLINDFVIPEKVDLIIFIRLDRWFRRVGEYHEMQKILEDHNVHWKAILEEYETATSNGRFMVNIKISTAENEAENTRNRILDVNRYKRRIGKVMSGNQPFGYTVGIVDGSKRPVIHEIKGKIYRDMISYFFLSGSVGKTADYCNQKYHMNSNYSWYSKVLNNIDTYLGYSEGIGGYRPPLLSLDEAEKLKNLLGNNARRPRSQRIYIFSGLLTCPVCGNRLTSCMSVYTDSNRKKKYYKRYRCQNAKVSHLCSFSTSFSERKIEAALLKGVGSAFADFETACQKNMKKNRDSAEELKKIQGQLDRLNKIFLMGNIQEDEYEATSFSLKKRMESLRLSPSRIDKKTADLLKTGEFIDYYKLLDDEHKQFFWRGIIKSVTLCNDHSNMISSILFL

SEQ ID NO: 24491 - protein, 465 aa, synthetic construct
MARSITVIPASQPYRVGGRTQQKTRNLRVAAYCRVSTDQEEQLNSFENQVEYYTKYIQDNPLYQMAGIYADEGISGTNTKKREEFKRMIHDCEEGKIDLVITKSISRFARNTQDCLEYSRRLKNLGIGIFFEKEHINTLDASGELLFTILSSLAQDESRNISENCKWGIRSKFKKGIPQVDCTKFLGYDKGDDGKLIVNKEQAKIVKRIYREFLNGYNPATIAKMLMEDHIKTGTGREEWRSVSVRAILKNEKYMGDALLQKTYTADFLTKKVKKNHGEVEQFYVKESHEAIIPKEQWEAAQLELERRDSYMQELGLTFYGYGSEINPFSCRVVCGKCGAVCGKKSWKSRGVEFWQCNNRSKNHGVKGCASENLPHENLLKGFITAWNQIVAEREQYLPKWEKKKKEGNLLEKLRAEQMIELTLQPPLTKMLPELGQMVLERVIVHGKEIMVIRFLDGTEIKVRI

SEQ ID NO: 24492 - protein, 498 aa, synthetic construct
MQIEVRKADMGKEKKRLKVCAYARVSTEASEQENSLENQVSHYTEMIQSNPAYEFAGVYADFGISGFKESRPQFQKMMQDAKNGKIDLIITKSVSRFARNTAIVLKASRELKERNVGIFFELQNINTLTEAGELLLTILAAFAQAESESASESSKMAYLHRIENGEVVAYLERSYGYEKDENGEYRAKEPEASVIREIYDLVIQGVNCTNIARVLNARNIQTVQGAEWTASTVFRIVENEIYKGDVLMQKTFIDGKRHQVQNRGEKAMYYAKDNHPPIVSEKTWEKAQRKLEDMRAERAEHSVIQEFTEENYPYMNHIFCAKCGWPLKPRVYSHGHRLSWDCSGQKRGTKKFCTGIHVLDNDLRKMEIEGNRYFSETVDKYGEVHLKHIGERTWKNKHKKKKFNHKELYPELNEENYPYYRRLYCARCGSRLGRYISHGTVRWICSSYKRKGQAKCPGVRIPDEIIKGWNLPDGKIYIMGKEDKNGEKHYSYTSESAL

SEQ ID NO: 24493 - protein, 482 aa, synthetic construct
MKIAAAYIRVSTDDQTEYSPAVQLDDILEFAKKNDYHIPKEFIFTDEGISGRTAEKRPAFQSMIRAARKKTNHIDAILVHKYDRFSRNKDDAVLYKALLKKDGVKVISIKEPIPQDDKFAVIYESMLEAMAEYYSLNLSEEVKKTMRKKAENGDYQARAPFGYRNDRKSLVIHPEEAEMVRYVFESYANGTSIFALTRELNQRGFRTIRGNQWEFRTVRYLLNNVTYHGYARWTPNGKTDWGYDIPAAIVAKGSWEPIIDDELWKRVQERYAQQKRRHYPHKRPDTEGIHWLSGKVKCSSCGRSLIISRQYVRGGFEMQCGGYNHGQCHVSHSVSSNRLIPAILDTLRQIADAPDTQADNFTIRTNNTNSGDIEAITSMIHRTQQKIVKAKEAYLAGIDTIDEYRETKLNAEKEIAELQQRLSALNEEHSFDADAFSEKVRNVLQTISGDSSMDDKKSAFSEIVEKVVYNKAENSIRLFLLD

SEQ ID NO: 24494 - protein, 468 aa, synthetic construct
MDKKINNNMNDFTKKVEEVALYIRVSTEEQAINGDSLRTQREALTKFALANHYHIYGIYEDDGFSATNLNRPALQRLLEDVRKNKINRILLTKLDRLSRGVRNYYKVLDVLDAHCVFWQTIFEKYDSSTASGRLHINIMLSVAENESAQTSERIRSVFNNKIHQKEIISGKIPIGYKKEEKKLVVDEDKKALVIDAFNFYLKSGSVNKTFEYLALFDPSMNYPRTARLLANPLYIGTKVCKYGSIENYCEPIISKETFDEVQNLLKKNQRKRDNSDHEFLFSGLLRCNECGYKMSGKYCKNFPTNCTFYYLCSNARLKKKCNMLKQLNETKIEKKLLEQIVPEINKYIDKNNILEQEKAQIRDISKERDKVNKQLEKLRDLYVNDLIQIDHYEKQYKELTSKLDSLKEEEKPVEEKKTVNYDEFRSFLSRDFVTLYNSLSRTEKRLIWASVIDTIYIDDNYNLRIVFI

SEQ ID NO: 24495 - protein, 580 aa, synthetic construct
MPEKIINCAIYTRKSTEEGLEQGFNSLDNQYEFCTNYLKSLNDPALQLLPARYDDGGYSGGSLNRPALQRLLADIQCGLVNRVIIYKIDRLTREIRDFFKLLDIFEKYNVEFVSVKENQYYNTTTAIGRLMVNMFLVFAQFERENAGDRIRDKIATSKAKGMWMGGCPPYGYDIGDRCLVINETEAQNVRFIYQTFCNTHSLADTTDALNSGGIRTKRYTTRQGRTFGGRKFSVKTVQRILQNPLYKGMVAHRGKQYPGQHAAIIDAVQFDMVQAVFAAHKEKRETRRPKMPSSSGERETAALTGLIFCGCCGSAMTPSYCCKGDIRYHYYRCYRRASKLEDKCPINQIRTSEIDRVVMEQVLAILKSRDFFVQYISHHHEFDVSTAFALFNSLDDVWNSLFETEKRRILRELLAKVTIYKDKIVLDVKKAGLAGVFAELSQNNRLAEVEYKENETFQISVAYRATRLANGAKIIVPTTAKEESRFNGSLRLARQIAKGFAWRKMMESGLSLQELTASAKTNERDIRFAMRLSMIDPAIVESVLSGKSPEFLTYAFMKKHPIPLLWSDQRKLYGFEERKQ

SEQ ID NO: 24496 - protein, 531 aa, synthetic construct
MLAYGYCRYSSNLQDEKSIEQQKNELEEYAKKNNISIIKYYIDEAKSGTKDTRDSFQNMISDACKSKEIQAVLVWKTDRFARKAIDSLYYRNKLEKVGIKLISITQPIDTETPEGKLMSTMLAGVDEYYSQNLASNVKRALKLNAQNAQFNGGIAPLGYDIVNKKYVINEREASSVRFIYDMYIEGYSLIEIALKLNSMGFKTKKNKPFSKTSIYDIIGNEKYIGKYIFNKGTKSNHDGIRADAIILEDAIPQIICKEVFEKAMNKRTKRKNAENTAKNFYLLSGLIKCECGGSYVGTTIKKQKNGNTYVSGYYRCSNHNKLGKCQMPSLKQELIENKVIKMLTEELLNAETRENIVKAVNAQYIEAQKDCKNDVEILKENLSSINQEINNIVNAVAKGYATDSLLKRLEEIENTKKNIEDEINFKDNIATHNYITSEKIEEVLKKDLSELKDKSKEKLKILVQKYIKKIEVKTTEVLIYLDFGESSPKKLVAKMWFEHMTLRVWTECSSQLSYFAIWNLYYYNNFRWFCQ

SEQ ID NO: 24497 - protein, 527 aa, synthetic construct
MYELTQSMESLNVDEIIVYLRKSRSDSPEMSVEDVLKKHEEMIQDYANTHFGSPIPEKNIYREVVSGETIDSRPQVKIVLQKIESPQIKAVLIVEPQRLSRGDLEDCGRLINILRYTNTMVLTLTHSFNLQEEYERKFFEMEITRGNDYLEYTKRILRRGRESSAAKGHYIGSVDPYGYRKIVIKKDGVNCHTLEIVPEEANVVRLIHELYAYTPGGIGFTNIAHKLDSMNLKPKKAAHWTPAIISSILCNPLYLGLIRWDTRKVVKYINDGQLEKSRPRSSDAKYYNGLHEPIISQELYDACMARRGTNPSLRRNKELCNPFAGLLYCGTCDHAMSLKIYKNHNSVSQIMLCNHQSYCHTKSVLYSAFLERFISSMENTIHDFELALLADNGNAQTVNQSIVANLETRLKKLQEKDMRQKDAYEDGIYSKEEFLERNIKTQQEIASTITALTAAKETKENYVDYGEKIRRFRDCINALNDPELSATEKNQFLKSCVSKIIYYNNMESKAGVGRYVENVFSLEIQYI

SEQ ID NO: 24498 - protein, 464 aa, synthetic construct
MARSVTVIPARSQKVRTGHKVVQEKKIRVAAYCRVSTDQEDQLHSFEAQVEYYTKYINEHENYEMAGIYADEGISGTNTKKREQFKKMIADCEGGKIDLVITKSISRFARNTQDCLAYSRKLKNLGIGIIFEKENINTLDSTGELLFTILSSLAQDESRNISENCKWGIRTKFKNGEMHLNTFKFLGYDKDENGKLVINKEQAKTVRRIYRDFLIGINPAQIAKELTEEKVPGCLGQTKWYPSTVIGILKQEKHMGDALLQKTYTADFLTKRQVKNNGEIAQVYVKDSHKGIIDKETWNAVQEEFERREKFMQKHGTDRYSYGSECYPFCEKIFCGECGSLFTRHSWKSRGIIQWQCKNHRKDGKVACTNAYVDNADLEKGFVKAFNRLVGEREKHIERWNSMKLDGTPLEKIRAGQMMEATESGQLQQYVPEAAQLVLEEITIFGAKKYEFAFLEGSRVKVSV

SEQ ID NO: 24499 - protein, 502 aa, synthetic construct
MEIQIREGSREQKRKLKVCAYCRVSTDADEQENSLENQVRHYEMVIKANPDYEYAGVYSDFAISGFKEKRPGLQKMLADAEKGKIDLILTKSVSRFARNTSIVLEATRKLKELNVGVFFELQNINTLSGEGELMLTILAAFAQAESESGSAGAKMVYQRKYEAGIPVQYLERSFGYTKDERGVFVADEAEAVWVRKIYKMAAEGYTPASIKRYLNENGIKTVGGVQWVDSTVFRLLENEIYKGDYIMHKHFVNEERKLVRNRGEVDAWYIEDDHEAIVSPELWQKAQDALAAKRDYLAEGSVIEEFTEENYPYMNKIYCAKCGYPLYKRIYSKGNRLNWGCSGTKRYGKTFCDGINIPDGVLRSAWHFKENTYIAEKASDKGVKEFTYLKEQSWKKRHKKKQPPAIPENTEAEYPYREKIFCALCGSRLVRYVNPQSHKVTWVCSRRKRKGKDACDGTRVPDTIIKGWGEIKKDIYIQRKDDKNGKKRYSYTSKKPEGADRA

SEQ ID NO: 24500 - protein, 580 aa, synthetic construct
MVRRKTALRGVSASTRITKVAIYIRVSTIHQVDKDSIPMQKKDLIAYCQLILGTDNYEIFEDAGYSGKNTDRPAFQDMMGRIRKGEFTHVLVWKIDRISRNLLDFAEMYEELQSLRVTFVSKNEQFDTSTAIGEAMLKIVLVFAELERNMTSERVTATMISRANNGQWNGGRIPFGYSYDSGTSTFSIREDEAAVCRRLKDLYLDNKSLVYTARALNADGYKTRAGADWTPTAVWIIASSPFYAGIYRYNRYKGTENRTLNPEEEWVMIPDHHPAIFTLEEHEAMKSSLKTNARYVDNPVGKPHATANIHIFQGIAYCGKCGNKMVSTPGKKHADGYRPSNYSCPLHRRSKKCDNATVNDMIVGEFAINYILNMLNAKKTFSNIDTPEELQRHLLTGSTFSDISSIEEDGLNDFFNLLSRYGSDNSYVFAIKTPRRKKASVNPELAALRKEKEKQERALQRLQDLYLYSDKSMSEKDFILRKSEISDRLKNINAQLGLITQNPDSLLSDEEFIKQASHLLIQKELKGRKYIYYKNLATSVDPEILRTYMETILDSMYIIDGRISSIVFKNGLTHKFIYKN

SEQ ID NO: 24501 - protein, 521 aa, synthetic construct
MRVVQRIPATIRNFKTKPLDTQQKRRVAGYARVSTDHDDQITSYEAQVDYYTHYIKGRDDWEFVGIYTDEGISATNTRHRDGFKRMVKDAMDGKIDLIVTKSVSRFARNTVDSLTTVRKLKDKGIEIYFEKENIWTLDAKGELLITIMSSLAQEESRSISENVTWGHRKRFADGKVSVPYRHFLGYDKGPDGNLAVNKEQARTVKLIYRLFLDGYTFHSIARELTARGLETPAKKKRWYPRTVESILTNEKYKGDALLQKRFTVNFLTKETKMNEGEVPQYYVENNHEAIISPQVFDWVQEEIKRRREGRSRYSGVSIFSSKIKCGQCGGWYGAKVWHSTDKYRRTIYRCNDKFKSHCKTPHLTEDDIKEVFLRAANQLIENKADILNSITLLKERLTDTEALEEERDKLSTDLNLLADKVQQLIAENARVAQNQDDYDQKYSELVSRYEAAKKQYDKTCDAIQYRKARSRQMDSFIKELQEQELIKEFDARLWGSLVDFITVYSKDDIRVTFKDGTEIRA

SEQ ID NO: 24502 - protein, 545 aa, synthetic construct
MRTIHKIERSIPNLRQRKKVAAYARVSVDSERMHHSLSAQVSYYSSLIQKNPEWEYAGVYADYGISGTRIKKRQEFQRMLEDAEAGKIDIILTKSIQRFARNTLDLLRTVRHLKEIGVEVWFEKENIHTLSGEGELMLTILASFAQEESRSISDNIKWRFKKKFEQGIPHAKFFVYGYRWEGNNLATDPYEAKVVQRIFEDYLSGKTRKDIVRELKEEGIRTMYGNFFKDASIRQILTNPVYTGLLEIQKTFVVDPINKHQIYNHGEKDKYVVEHHHEAIIEPGVFEQVQVEMARRKQDGLQKGGYARKFLNTCCFTGVIKCGICGKSYTHVVRRYKGKVSEYWACESHKGKETNCGAHGSIPEPALKKACASVLGTEDFEEQEFLQKVAKIVVPAYKKLMFYMTDGRVIEKNWESTALKDCWNEALKKKQRNWMTRYRQNGGAGRFTVFSGRIRCPRCGVTFIRTLDKRKDGAVPYWRVRGRHKCIHRTGIKEDTLKKIAASILGIPEFDAEVFKTKIKDIEIQEDGSLVFRFLDGHTEGVNLL

SEQ ID NO: 24503 - protein, 543 aa, synthetic construct
MPVAVYCRVSSEEQAERGTIEIQKEFAAKYVDLYQLEVFDYYCDDGISGTIPVEARPEGSRLFRDAREKKFDTILFYKIDRLGRKVRVILNAVHDLEELGVSIRSMTEPLETETPTGRFMLTSLAGISELERDTILSRMWAGSQRAARLGNWLGGIVPFGYHVVDKQLQISDDIMPGCNLSEADVIQLIFDLSGNQKMSAIKISDYLNALNIPTRYDLNGINGKRKKNASSIWYPSRVLSIIKSTTYKGTHKYGKRATNKNSKIILRPVPAIVSDELWEKANEALKTNQITAMRNAVREYLLRGIIKCGNCGRTYMGTAYSGSGREKIPYYVCNAKNSYLAHNTEKCISKNVRADWLEHLVLEDCIKILKSPNKILNMDPEKEQQSLADEVKKEHDQIKASLKKLSEERASIIELYRKKIISETDLSCQLEKLSTEEATLQERLKMKIDSRKSAATKQNKEKAISLLKKFTDKCQNLDPEKLSFETKRAIIELIVEKITVTTESAPEKYYPEISVDIEYRFATTPNHIAYVEDCTVTDSALCT

SEQ ID NO: 24504 - protein, 523 aa, synthetic construct
MAKSVTTIPATLSRFTAAPINSTKKRRVAAYARVSTDNEEQLTSYEAQIDYYTNYINGRDDWEFVGVYPDEGITGTNTKKREQFRQMVADALDGKIDLIITKSVSRFARNTVDSLTTIRKLKEHNVEVYFEKENIWTFDSKGELLLTIMSSLAQEESRSISENCTWGQRKRFADGKVTVPFKRFLGYDMGSDHNLVVNPEQAKLVKRIYGMFLQGQSPFQIARTLTEEGIPSPGGKDHWSPSNIKSILTNEKYKGDALLQKSFTVDFLTKKKKTNEGEIPQYYVKDNHEAIIDPETFEMVQTLMTTRTKGRNRKSSVSIFSSKVKCGDCGSWYGPKVWHSNDAYRKVIWQCNHKFDGQKCATPTLTEDEIKELFLRAANQVIDQKEQFIAIYDQVLSRSLDTTALESELSDLEAEINIAAELIEDCIKENAHVALDQDEYQKRYDALVARFDKAKARHTEVTDLIAERMARKHQIEAYLKNLRSREPLTEFRETDWLAMVDYIAVHSKNDIRVTFKDGTEIET

SEQ ID NO: 24505 - protein, 524 aa, synthetic construct
MDEKRLVDGTTALAEKQPRVIKIEPTERPQNVRLRVAAYTRVSSDSEDQLNSFAAQNRYYTELISSKAEWRMVDIYADEGITGTSVAKRDDFQRMMADCRRGLIDQILVKSISRFARNTKDCLQNIRELKELGVNVRFEREGIDTVNVSSELITAIYAAFAQKESESISGNMQWSYQRRMESGEFNTCKAPWGFRLDGRKLKICEPEADIVQRIFREYLSGKNPQEIADDLNASCLTERVWNYKAVDYILQNERYAGNALLQKRYTPDMLSRQQKTNHGEREMYFVPGSNDAIISPEIFKRAQGLRQKRSLGKAPVHSEIISQIRCICGARMRFKNVNSKWYLCCTSHDTKGDCLITPIRETQIHASFCRLYYKLKHQSIPILEQMLTSLQLIRNRRMLWSPDIVALNKRISDISSQNQTLAFLKQQGLVDPDIFIAKTNELTKQLQQAKLEKEKLMDAESDMTALQTRDLIDILEDGPEFLDSFDAELFAELVEKIIIESNDSVRFCLKNGLELRESIERTVR

SEQ ID NO: 24506 - protein, 536 aa, synthetic construct
MKDDAPRVIKIPAKPETTRQAEARRQLRVAAYCRVSTKEEDQANSYEVQKEYYTDKIMSNTAWTMAGIFADKGITGTSAKKREDFMRMIRHCRQKKIDVILTKSVSRFSRNTVDCLYYIRALKQLGIAVIFEKENINSLEEDSELRITLSGAFAQSESESISANVTWGKRRAMEAGKVSIQYKKLYGYRKGEDGQPEIIPEQAEIVRWLYERYLTGASLRMIKDELEQQGVKCFEDSPEWTISRIRSILQNEKYCGDVLMQKTFRQDFINRKAIGQLPMYLIENHHEGIVSREKYDAVQAEMARRNAAKSPSKNAVTGMASYASKYALSERLVCGECGTLYRRCTWTRNGEKRVVWRCVSRLDYGKKYCHNSPTLDEAPLQQAILAALNTAMADKNSLIRQITDAMETEIIPFPGGTMSLGDIERRLRELEQQFQTLLEKATNDPAAYGGQFKEILDEQTFLKEKRSVILANNNEQTKANQRIMDAAQTLENASLHITEWDESAVRQLVETVKILSKDEVAVTLKGGIEICQKIMY

SEQ ID NO: 24507 - protein, 455 aa, synthetic construct
MECVAYIRVSTERQAEEGYGLESQKRDIDEYCRKHQLIIKEYYVDAGLSGMEMSKRVELQRLISDMAKIDVIVVYKLDRLARDTVDALYMIEKIFTPKGICVESVHDFARYETPQDKFQTQVMAAVAEYDRNTMMLRMRGGMLERVKRGFWMGGGNLPFCYSYDKELGILVPIPERAETARNALELYINGYSDGRIARICHYSGEPVARKILTSVVNIGMIPYKGKVYQGKHEPIFDIERYELAQEIRKSRHDAKSWIAHPTNLLTGLCYCGVCGCAMRYQKWGQKEDSPRKIYCCSKNIDLDYLPNYNHDCDSKPQWASDIEKQVEKQMLEISVNLSKYKPKEKETKLQIMQSQLSREKNKLKRLYILYAEGNDTVIELIKQAEEEVKRITAAIEEESKAAKNTQKKEFVYDNIKKLADVWDKIDKQTKNKILKTIISKIVIVNDNIEIQLKNF

SEQ ID NO: 24508 - protein, 528 aa, synthetic construct
MQETNISINEIIMYLRKSRSDDPYMTVEEVLARHERQLQDYALSSFGSIIPEERIFREVVSGETIADRPVMQSVMKYLESGQIKGVLVIEPQRLSRGDLEDCGRIINAFRYTNTLVLTPPKTYDLSDEYDRKFFEMELTRGNDYLEYTKKILNRGRLASVKQGNYIGSIAPYGYRKIKTGSGKDTAHTLEIVPEQADAVRMMAQLYLAGNGFTRIAAHLDSLGIKPLKSDHWSSAAISDILSNPVYIGMIRWNHFKTIKTMQNGQIVKSRPTNRGTDYILVPGKHPAILDQGTFDAIAQRRGKSPKIKRGHELRNPFAGLVFCGTAGCGRSMTFKQFTNYRSKVPRRSESMICPNQRICHTKSVQYSAFVGRVKEILSKTVDDFEIKLQNDEGNIVRIHENIIRNLEQDLVKLKDKDLRQKDAYEDGIYTKEEYASRNAKLQEQICEVQLSIQRAKDTMPPEVDYQERVSRFSDCLSKFEDTDISASEMNLLLKSCIEKIIYHNSSESKPGIGRFVANPFELDIYLRL

SEQ ID NO: 24509 - protein, 462 aa, synthetic construct
MSNTPETITRAALYIRVSTEEQALHGYSLEAQEAALKQYAIDHDYKVVHIYHDEGFSARKPVMRRKVMQELLADVQAGKIDLILFTKLDRWFRNVHDYHQVQNILDKHGVAWKTILEDYQTATADGRLKVNIMLSVAENEADRTSERIKFVFDNKLRNGEYCFGGALAPYGYKAEVINGVRKLVKDPETESATAAFWEKMIKYHNTRRAARETNLEYGISRDHQSWTKVVRNKIYTGELRGIKDFCPAYISAADWQDIQYPERRIKSTQGDRHYLFVGLLRCPVCGCTLKATFKTYPSDRSKEYYGYRCSAKSLGRCTYSRQLSERNLEKYLVAHLRESLESYIAKMQLSAAAPKKKRKKADTTKLRDQLRRLNVIYLGGNISDDDYNAQATILRDAIIKAEQEEKQLAQVIDFTALRQLLDSNFELSYKSMDREEKQRFWHSIIAEIQLDDNQVKEIIFKS

SEQ ID NO: 24510 - protein, 501 aa, synthetic construct
MEIQIREGSREQKRKLKVCAYCRVSTDADEQENSLENQVRHYETVIKANPDYEYAGVYSDFAISGFKEKRPGLQKMLADAEKGKIDLILTKSVSRFARNTSIVLEATRKLKELNVGVFFELQNINTLSGEGELMLTILAAFAQAESESGSAGAKMVYQRKYEAGIPVQYLERSFGYTKDERGVFVADEAEAVWVRKIYKMAAEGYTPASIKRYLNENGVKTVGGVQWVDSTVFRLLENEIYKGDYIMHKHFVNEERKLVRNRGEVDAWYIEDDHEAIVSPELWQKAQDALAVKRDYLAEGSVIEEFTEENYPYMNKIYCAKCGYPLYKRIYSKGNRLNWGCSGTKRYGKSFCDGINIPDGVLRSAWHFEENTYIDEKASDKGVKEFTYLKERSWKRRHKKKQPSAIPENTETEYPYREKIFCALCGSRLVRYVNPQNHKVTWVCNRRKRKGKEACDGTRVPDTVIKGWGEIKKDIYIQRKDDKNGKKRYSYTSKKPSGIRV

SEQ ID NO: 24511 - protein, 478 aa, synthetic construct
MKRKMVVAIYIRVSTQEQALEGYSIDEQQKRLLSFCEAKNWTVYKIYVDPGYSGSNLDRPAVQQLIKDAERHCFDMVLIYKLDRLSRSQKDTMHLLEDVFLVNNVDLVAMNESFDTSTPFGRAMIGILSVFAQLERENIKERTSMGRKARISKGYFHGSHPPLGYQFKPGGNDLEINQYESVIVREIFDKFLSGATIYSIAEDMEKTYGNNVRGWNNTMIRRILRNPVYFGKVRYGGETFDGLHEPLISEKDFAKVQAVLTRNKELDRRTYDYRTSTGKTADHLLTGLLYCGDCGARMAYNKVSKNVSRYSCYSVSRKNKVLIRSDYCTNRLNPYSAHELEELILGEIAKLAKDPNHVVETIETTLPDDKSTPIRNRLDEVNTQVSKLLDLYQLGFTDLSQISEKLEALKDEKNKLENQLENLKVIPTIDVNAVYETLEDFDDLLEYGTPQEIHAVVHTLIDKIVILNDDIKIYWSFC

SEQ ID NO: 24512 - protein, 567 aa, synthetic construct
MQSKNKNQIGITALYCRLSRDDGTESESNSIGNQKKLLSQKAKEMGLTDTKYYVDDGYTGTNFNRPGFQQLIDDIEIGLVSAVMVKDLSRLGRDYVSVGNYTDSYFPEHNIRFIAVNDAIDSDEGESEIAPFKNILNEMYARDISKKIRSSHRLRGSMGEPLSQPPYGYMKSPENKKKWIIDPEAATVVKSIFKMCLDGKGNETIARELQENEVLIPMAYWRSKGLNRGGKKTQTNPYKWCKTTIQKIISQQEYCGDIINFKTYSKSFKNKRRIENSKENWAVFKDVNEPIIDRETFETVQKFISKTKRRAPKKENGERSIFNGLIYCGDCHSKMRYHTSTSNKEIHYFTCSDNKVDYRGKCQGRHYVRADALEEVVKLELRRLVEMLEIDESYFAQLLLRKNDEEREKDKKFLESELQKAIARNNTVSQIYEKLYEDNVIGKVSDEWFVELSHKYEKERMNLKAKIADTRHKIEELKNNNSEYEKFISAIRRFMQMDNLTSPLLRELIDHIDIFETEGTGKSRTQRIVIYYRFIGYIELPNATKQTHIADTRKGVAVEYITEQFTA

SEQ ID NO: 24513 - protein, 502 aa, synthetic construct
MEIQIREGNSRQKRKLKVCAYCRVSTDADEQENSLENQIRHYEEAITSNPDYEYAGVYSDFAISGFKEKRPGLQKMLADARKGKIDLILTKSVSRFARNTSIVLEATRKLKELNVGVFFELQNINTLSGEGELMLTILAAFAQAESESGSVGAKMVYQRKYEAGIPVQYLERSFGFKKDERGVYIADEEEAVWVRKIYEMAADGYTPASIKRHLNENGVKTVGGAEWIDSTVFRLIENEIYKGDYIMHKHFVNEERKLVRNRGEVDAWYIEDDHEAIVSPELWQKAQDALEAKRDYLAESSVIEEFTEENYPYMDKIFCARCGHPLYKRIYSNGNRLNWGCSGTKRYGKSFCEGINIPDGVLRGAWNFDENMYIGEKPTDKGKKEFTYLKEASWKRRHKKKEPEPIPENTETEYPYREKIFCGLCGSRLVRHVNTKSHKVIWVCNGRKRKGKDFCDGTRVPDTIIKGWGEIKKDIYIQRKDDKNGKKRYSYTSKKPKGADRA

SEQ ID NO: 24514 - protein, 519 aa, synthetic construct
MKKVTKIDKIQPSKAAKRKLRVAAYCRVSTDSDAQLESLETQKMHYENYINSRDDWEFAGLYFDEGITGTKADKRPKLMRLIDDCKAKKIDFVITKSISRFSRNTTDCLSLVRTLLNLNIPVYFEKENINTGSMESELFLSILSGLAEGESTSISENNKWGIKKRFENGTYKLGYVPYGYRWENGEIIVDPEQAVIVKRIFSELLAGKGTDAIAKSLNSENVPTKKGGRWTSTSIRGILTNEKYTGDCIFQKTYTDSNFNRHRNDGQLDQYYVTDHHEAIISHEDFDAAAALIEQRANEKGILRGSDKYQQRYAFSGKIICGECGDTFRRRIHSSTYGKYPAWVCNTHLADTSKCSMLYLRDDDIKLAFATMMNKLIYCHKLVLKPYLESLQANTSDEAFLRIQQLEILLEQNAEQRETLHKLMAQGYIDQILFTQENNALLTQANDFRSDIEALNRSVTDDTSKVYETERLIHFCERGEMLPEYNEDLFELFVDHIEVYSRKSIGFVLHCGLTFKERI

SEQ ID NO: 24515 - protein, 521 aa, synthetic construct
MGNVMVIPARRQVGNTARQQDDKPKLRVAAYCRVSTDSDEQATSYEAQVEHYTEFIQKNPEWEFAGIYADDGISGTNTKNRDEFNRMIKDCEAGNIDMIITKSISRFARNTLDCLKYIRQLKDKNIPVYFEKENINTMDAKGEVLITIMASLAQQESQSLSQNVKLGLQFRYQNGQVQVNHNHFLGYTKDADGNLIIDPEQAEVVKRIYREYLEGYSMNKIAKGLEADGILTGAGKTKWWTSTINKILRNEKYIGDALLQKTYTTDFLNKTRVKNNGIVPQYYVEENHEAIIPKDIFLRVQEELVRRRVVKTSANGKKRSYSCNHCFAQIVICGECGEMFRRIHWNNRGCKSIVWRCLSRLEPTGQECHARTVNEAVLENVVVQAINTLLGDKSTYQAQLQQNIAKVIREAQKTTADGIDEQLMELQKELLQKANNKEAYDEIADQIFKLREQREKCTVDIAARDAQIARINELQDFIKQQRTDLVEFDEALVKRWLKQITVWEDHFTVELKSGLKIDIEG

SEQ ID NO: 24516 - protein, 525 aa, synthetic construct
MAKRVTTIPATLNRFDSRPLQSVSKRRVAGYARVSTDSEEQATSYEAQVDYYTRYIKSNPDWEFVGIYTDDGITATNTSHRYGFKQMVEDALAGKIDLIVTKSISRFARNTVDSLVTVRELKEKGIEIYFEKENIWTLDAKGELLITIMSSLAQEESRSISENTTWGKRKSFADGKASVSFSRFLGYDRGPNGEFVINEAQAVTVRYIYKRFLEGLSTYQIAKELTQMGVKTAAGKDKWYTSSVLSILKNEKYKGDALLQKSFTKDFLTHKRVDNNGEVPQYYVEGHHEGIVTADQFEQVQAELYRRKNTDRYSGVGCFSSIIKCGECGSWYGAKVWHSNDKYRRVIYRCNKKYGKGCKCKTPHITEDEIKEMFIKAANELFSEKDEIIENTKTMMDMVCNTGYLDKELGDKVAELNIIAEQMQTAIAENSRRALDQNEYERGYAGLTERYNTIKAVYDKISEQIESKKVQRELFKGFIHALEKQGALVEEFDEGLWSSLVQEVVVNTKDDIRFIFKNGLEIKIR

SEQ ID NO: 24517 - protein, 435 aa, synthetic construct
MQIKEISATKLPDIGIKRVAAYARVSSDKDAAIHSLSSQISYYNEYISTHVGWEFAGVYADEGITGTKDNRPEFMRMLEDCRKGKIDLVITKSITRFARNTVVLLDTIRELKLLEIDVFFEKENMHSISKNGELMLTLLAMYAEEEARSASENQKWRIQKMFEQGRPNTGRMLGYYLKNGQLTIIPEEAEVVRMIFEDYLSGMGRLAIANKLNDLHIPTVRGGKEWREGAIYLILRNEKYTGDMILQKTYSEDFRTKKRIINNGERRKYLVEKSHESIISKTIFAQVQEEISRRQSCIKMATHTSKGQFSGLLTCSECGKHFRRRIANASSKYAKPAWLCSTFATKGKRYCNNKQIPEAILIEKTEEVLGVSSLEGMELRDYLTGIICHKEQKLTFVMANGDQITVAWSNPSRRNSWTEEMKQTARQKTLERSSL

SEQ ID NO: 24518 - protein, 527 aa, synthetic construct
MSTKKRVTVLEPISSQVIYDNTTEAPKLKVAAYARVSTEQDEQQSSYEAQVNYYNQYIRNNPAWEFVGIYADEGITGTNTKKRDGFNRMIADAKAGKIDLILTKSISRFARNTVDALQTIRELSALKIEVYFEKEGIHTLDKQCEVMLTIMSSLAQEESRSISENVRWGKQKSMQDGNVSFGYGHFLGYRKGKDGRPEVVPEEAAIVRDIYRMFLDGMTIRNIAKELTERGIKTPGGKDIWSVSTIRSILSNEKYKGDALLQKTYTLDYLTKTVRKNKGEVKQYYVTNSHEAIIDEDVFNLAQVELQKRSKMRRGLRNSSPFCTKLVCGDCGSFYGHKIFHAKEKHSKDVWYCNRRYQGNNNCSTPILAEDDLVKYYLQALSKILENKDRYVSACKAQMDEADALEKIRHKREKAETNLAKDMTKIQALVRENAYISQDQQVYRQRFEEMSKHIEQQKIHISKLQEQELRLVGVREKLSRFIEALEFFDAEPIFDSATWNSLIERVLVNQGNLIFEFKNGEKIRISI

SEQ ID NO: 24519 - protein, 464 aa, synthetic construct
MARSVTVIPARNQKVRTGHKAVQEKKIRVAAYCRVSTDQEDQLHSFEAQVEYYTKYINEHENYEMAGIYADEGISGTNTKKREQFKKMIADCEGGKIDLVITKSISRFARNTQDCLAYSRKLKNLGIGIIFEKENINTLDSTGELLFTILSSLAQDESRNISENCKWGIRTKFKNGEMHLNTFKFLGYDKDENGKLVINKEQAKTVRRIYRDFLIGINPAQIAKELTEEKVPGCLGQTKWYPSTVTGILKQEKHMGDALLQKTYTADFLTKRQVRNNGEIAQVYVKDSHKGIIDKQTWNAVQEEFDRREKFMELHGTDRYSYGADCMPFCEKVFCGECKSLFTRHSWRSRGIVQWQCKNHRKDGKVAWTNAYVDNADLEKGFVKAFNRLVTDRDKHMERWQQMKSDGTPLEKIRAGQMMEAVENEPLTRFVPEIAQLVLCEVTVLGAKKYEFFFLEGSRVKVSV

SEQ ID NO: 24520 - protein, 441 aa, synthetic construct
MSTPQRVVREIPALYRGNMSKVTEKENVTYYARVSTDHDEQEESYERQRSHFEQLIKAHPEWNYVEGYADQGITGTKAELRPEFMRMINDCRAGKINKILVKSISRFARNTVDTLKYVRELKELGISVFFETQGIDTMTPNGEVLITILAAIAEQESRTISTNIKWSYKKRFQDGKVIISAGMIGYKKEGYSYVIVENEAKLVKRIFLEYISGKTIRQIADGLNADGFKTKRNTKWKPSGIQSILANEKYTGNAYLGKTFKQDVLSKTRVKNIGQGNMYYVENSHPAIISQETFDLVQKEREKRNEVRSSSKTGKGRYSSKYPLSGMLICGNCGSNFRRYGRNLANGEYVPTWICTKHQKNRKDCEMKQLKEVNILETYKMVIEENVGTIKSVVESLKNSIDEELATINNDNLIQIEEMLNIGRKKIMNLFKAKKNYCRRI

SEQ ID NO: 24521 - protein, 588 aa, synthetic construct
MRIVNKIEAKTPQIPHRKRVAAYARVSMESERLQHSLSAQVSFYSSLIQSNPAWEYVGVYADNGITGTKAEAREEFNRMIADCEAGKIDIVLTKSISRFARNTVDLLNTVRRLKELGVSVQFEKERIDSLTEDGELMLTLLASFAQEEIRSLSDNVKWGTRKRFEKGIPNGRFQIYGYRWEGDHLVIHEEEAKIVRLIYDNYMNGLSAETTEKQLAEMGVKSYKGQHFGNTSIRQILGNITYTGNLLFQKEYVADPISKKSRINRGELPQYFVENTHEAIIPMEVYQAVQAEKARRRELGALANWSINTSCFTSKIKCGRCGKSYQRSNRKGRKDPNANYTIWVCGTRRKTGNAYCQNKDIPEQMLKDACAEVMGLDTFDEIIFSEQIDHIEIPAPNEMIFYFKDGRIVPHHWESTMRKDCWTDERRAAKGRYVQEHQLGPNTSCFTSRIRCDSCGENYRRQRSRHKDGSFDSVWRCASGGKCQSPSIKEDALKNLCADAMGLEEFSETVFREQIVCIHITAPYQLSIRFFDGHTFETAWENKRKMPRHTKERKQHMREVMIQRWREKRGESNDNTCDDKPIHGNADQ

SEQ ID NO: 24522 - protein, 503 aa, synthetic construct
MSKIHKIEAMIPKQIEKKKVAAYARVSALTEMTQYSFSAQVNYYSALIQKNPNWKYVGVYADKGITGRSIKKRKEFNRLIDDCNNGKIDLILTKSVSRFARDTVDTLNTIRHLKNIGVDVYFEKENIHSISQEGELLLTFLAAYAQAESENTSENIKWGIRKGFKVGKPNGYKAPYGYKWNGNSYSIVPEQGAIVKEIYKRYLDGEPAYSIAKALKKKGIKGQTGIPMDDSTIRYIVSNISYTGTLLLQKWFFTQNHVRKENKGELPMYAVENMFEPLISKEDFQKALQIKKERAEAMPNKNPRLTAFSGIVKCGNCGCSVCRRTTRYGKKWVCNAKDRKGMAACDFRDIYEIELEAAATKALAVNEFKEDLVRREVKLITIDNAYIVFDLKDGKKKQILRTYTKGYSGFSCRLFCGNCCKMLEADSRTLSINGQKKRYKIWCCRKCPGQREFDDVIRKATQSLFNEPQCEGLFAQNIEKAIIYNDRIDFYFKEGKVITWEKE

SEQ ID NO: 24523 - protein, 524 aa, synthetic construct
MGKRVTTIPATLNLYDSVSLKNPQKRKVAGYARVSKDIEEQATSYAAQVDYYTAYIKKNPEWEFAGIYTDEGITATTTKKRNGFKQMIADALAGKIDLIITKSVSRFARNTVDSLTTVRELKENGIEIYFEKENIWTFDSKGELLITIMSSLAQEESRSISENVKWGKRRAFANGKGSLSFNTFLGYDRGPNGEFVINEEQAATVRYIYEKFLEGFSAYRIAKDLTEMGIKTPGGKEKWANSSVLKILKNEKYKGDLLFQKTYIKDFLSHKSVRNNGEIPQYYIEDHHEGIITAEQFDQVQLELYRRKKIKKYSGISIFSSILKCGNCGGWYGSKVWNSNTKYKKTIYQCNKKYKNRCKTPNLSEYEIKQLFVQVVNQLISEKEEIIKNTEEIKKTICDMNSLTMELKDKTAEINTVVEQINNIVIQNSKVSLNQDEYNKEYFRLKRKYDTIASEIDRLSKQIKEKDLQGKLFDNFISTFKKQNETISEFDEFLWSGLVYEIVVYTKQDVRFFLKNGLEIDTGL

SEQ ID NO: 24524 - protein, 530 aa, synthetic construct
MEQYLIYLRKSRSDLEAEAHGEGETLSRHEHTLLELAKRQHLNVTDIYREVVSGDTIAARPMMQRVLSEVEQGVWSGVLVMEVERLARGDTIDQGIIAQTFKFSGTKIITPIKTYDPDNEFDEEYFEFGLFMSRREYKIINRRLQRGRLASAKEGKWPSGLAPFGYRRVKLKNEKGCSLEPVEEQAAIVRMIFDLYTVGLQDEDGSAHPLSLGSIATRLNDMHIPSPSGSQWARITIRGIIKNPTYIGMVRWGSRETKKKVVDGKVVSVRGPADPEKECVFKGIHPPLVPKETFELANDKLARSENTSTHKEKVVRNPLAGLLVCSECGRQMMRMINPVHPDMPVVRCPRRGCPNCSSYLPIVEERVIQGLSEWMKGYELEWSSAAASSSVSSVGVREKALASAEAELRKLQQQLERTHDFLEQGIYDTDTFLSRSRMLSDKIAAAKDSVARCSRELTEEKLRETSRRDIIPKVKNLLDVYPLLETAEEKNALLKEVLEKVVYQKLNEKRKKSPDGFTIEIYPRIPKSEK

SEQ ID NO: 24525 - protein, 503 aa, synthetic construct
MNNRIDAIYARQSVDKKDSISIESQIEFCKYELKGGNCKEYTDKGYSGKNTDRPKFQELVRDIKRGLIAKVVVYKLDRISRSILDFANMMELFQQYNVEFVSSTEKFDTSTPMGRAMLNICIVFAQLERETIQKRVTDAYYSRSQRGFKMGGKAPYGFHTEPIKMDGINTKKLVVNPEEAANIRLMFEMYAQPTTSYGDITRYFAEQGILFHGKELIRPTLAQMLRNPVYVQADLDVYEFFKSQGTVIVNDVADFTGMNGCYLYQGRDVKASKKNDLKDQMLVLAPHEGIVPSDTWLTCRKKLMNNMKIQSARKATHTWLAGKIKCGNCGYALMSIFNPSGKQYLRCTKRLDNKSCPGCGKIITSELEAVVYQQMVKKLASYKTLTGRKKAAKANPKIAALQVELLHVDSEIEKLVDSLTGANNVLLSYVNVKIAELDGRKQELVKQIAELTVEAISPEQVNQISGYLDTWDNVSFDDKRRVVDLMITTVAATSDSLNITWKI

SEQ ID NO: 24526 - protein, 498 aa, synthetic construct
MQIEVRKAEMGKEKKRLKVCAYARVSTEASEQENSLENQVSHYTEMIQANPAYEFAGVYADFGISGFKESRPQFLKMMQDAKNGKIDLIITKSVSRFARNTAIVLKASRELKERNVGIFFELQNINTLTEAGELLLTILAAFAQAESESASESSKMAYLHRIENGEVVAYLERSYGYEKDENGEYRAKEPEASVIREIYDLVIQGVNCTNIAKVLNARNIQTVQGAEWTASTVFRIVENEIYKGDVLMQKTFIDGKRHQVQNRGEKAMYYAKDNHPPIVSEKIWEKAQRKLEDMRAERAEHSVIQEFTEENYPYMNHIFCAKCGWPLKPRVYSHGHRLSWDCSGQKRGTKKFCTGIHILDNDLRKMKIEGNRYFSETVDKYGEVHLKHVGERTWKNKHKKKKFNHKDLYPELNEENYPYYKRLYCARCGSRLGRYISHGTVRWICSSYKTKGQAKCPGVRIPDEIIKGWNLPDGKIYIMGKEDKNGEKHYSYTSESAL

SEQ ID NO: 24527 - protein, 474 aa, synthetic construct
MARSITVIPASQPYRVGGRTQQKTRNLRVAAYCRVSTDQEEQLNSFENQVEYYTKYIQDNPLYQMAGIYADEGISGTNTKKREEFKRMIRDCEEGKIDLVITKSISRFARNTQDCLEYSRRLKNLGIGIFFEKEHINTLDASGELLFTILSSLAQDESRNISENCKWGIRSKFKKGIPQVDCTKFLGYDKGDDGKLIVNKEQAKIVKRIYREFLNGYNPAAIAKMLMEDHIKTGTGREEWRSASVRAILKNEKYMGDALLQKTYTSDFLTKKVKKNHGEVEQFYVKESHEAIIPKEQWEAAQLELERRDSYMQELGLTFYGYGSEVNPFSCRVVCGKCGAVCGKKSWKSRGVEFWQCNNRSKNHGVKGCASENLPHENLLKGFITAWNQIVAKREQYLPKWEKNKKDGNPLERLRAEQMIGLTLQPPLTKMLPELGQMVLERVIVQGKEIMVIRFLDGTEIKGDRFKFCVNVKN

SEQ ID NO: 24528 - protein, 514 aa, synthetic construct
MPTDYALYLRKSRADLEAEAHGEGDTLARHEHILMELAKSRALPIGAIYREIVSGERIANRPVMQQLLSEVEDGRWKGVLVTETSRLARGDTIDQGIVAQAFKFSGTLIVTPAKTYDPTQEADEEWMEFGLFMSRQEYRMIRRRQLAGTRASKKEGHYVPGRPPYGYERYKLDGRGWSLRPVEPQAGVIRTIYDMYLSGKGFSEIANELNAMKIRTPLDKKWVPATTRAILQNPHYAGFIPSAMKVNTKIVQKGKLITKRPVNKNCELYEGIHEAIIPRDVWYSVQQRMKDTVTPRVPRKYQQMNPLAGLVYCDQCGKLMSRHPYRREDKVRFGCENPSCSTVSSLFEDVENLVLQSLREFLHEIELSSPTLLDTKSEEIALQNIEKQLTDINHRLQRTYELLEDGVYSKETFLQRQSAISQDQTALLNTKHEIERKLHNKQTDIEAQKDSAPLIRHVLDVYPTLEDPKEQNLLLKQVIRRIDYHKTVRVYGKAKSDLHLTIHPKIAIPQTSNI

SEQ ID NO: 24529 - protein, 526 aa, synthetic construct
MAKVTIIPSKINPITLTPVGQVAKRKVAAYARVSTDSDEQYTSYDAQVTYYTNFIKGKPNWEFVKVYADEGISGTSTKRRDEFKEMIESALNGKIDLIITKSISRFARNTLDTISITRQLKAKGIEVYFEKENLWSLDDKTEFLLTIMASIAQEESRSISQNITIGKRWGMKEGKVSFAYKNFLGYKKVDGKIVVDEAQAETVRLIYMMFLKEGKTCTGIAEFLKSKGIPTPSGKSCNWTKNTVYSILTNEKYKGDALLQKKYTADYLEHRVVPNNGELPQYYVENNHPAIIEREVWEMVQTEMMRRSMLGAAYSGNSIFASKLICGDCGKPYGKKKWHSTSKYAREIYRCNAKYNKGQTQCQTPNLTEEDIKTRFIKAYNLVMCDKKQVIEDTLAVIELLADTTDLDAEIANLQTKIERISSDVSLMVRENARTQQDQIKFAARYEELTKEYETQKAALEKAVKEKAYKTGKATKMRAYLEAMKQADDYLEVWSEEAWILMVETATVNRDKTITFKFVNGKEVRV

SEQ ID NO: 24530 - protein, 511 aa, synthetic construct
MKRITKIDAAAKETKKLRVAAYARVSTDSADQLVSLDAQKEHYEQVIKNCPNWEFAGLYYDEGVSGTKMAKRDGLLRMLADCERGLIDYILVKSISRFSRNTVESVETVRRLSAMGIYIFFEKENIDTGKMEGELMLSIMSSLAEDESRSLSENNKWSIQKRFQNGTYVIGTPAYGYKNVDGKMVIDEEKAAIVRRMFASVMEGKSGAKIANELQAEGIPTARGGKWQSSVIIGMIRNETYIGVAVFQKTYKDDQFNSRVNYGEKGMYRIEGHHEPIVSEEVFRAANFAVDNNAREKGITKSRKYTKRYALSGKVFCGECGGKCKRKKIYGEVWYGCDTHVKDKKKCRQLPVRADMVEAAFVNMMNKLIYGRDAVLLPMSGRLLGGGDKEVLGRLESLNTELAMVAERRQAADKFFAKGLLDTAVYREELDALAQKEKEINVARACIEGAPDLDFDRQLALNELLKYTAKAEQLTAFSDEVFTKYVDRVIIFSRKEVGFVMKCGPVFRERI

SEQ ID NO: 24531 - protein, 519 aa, synthetic construct
MAMAQNITFIPAVKTVGTQKPAEKKQKVRVAAYCRVSTEFEEQESSYETQVAHYTSYINGNPEWEMVEVYADNGISGTRTAKREAFNRMIKDCEAGRIDMIITKSISRFSRNTVDCLKYTRKLKEMNIAVFFEKENINTLDAKGEVLMTIMAALAQQESESLSANVRLGIQFRNQQGKVQVNHNWFLGYTKDESGKLVIVPEEAEVVRRIYREYLEGASFVKIRRGLEADGILNGAKHARWHETNIKQILTNEKYIGDALLQKTYTVSVLDKKRSRNDGVMPKYYVEGCHEAIIDRETFLLVQEEIARRSSLYKGGKKRVYSSKYALTGNVICAHCGNIYRRVVWSVGNEKPVVWRCVSRLTTGQECSARTVPEEDLHAAIASAANMAYSNRDDIIPVLKENIENVVGCDVDDEIEVIDGMIRKSQMDLLDAGRDEALVQEIGERIVSLRERRQNVLTQAALRKDEIDRIKAMIGFIEEQTGEAEYSEILVRRMVEKVTIHDDRITVEFKSGLAIDVDA

SEQ ID NO: 24532 - protein, 520 aa, synthetic construct
MPRKKAPAAEAPRLVAYYRYSGGSRQTEQSIEGQRRDCEAYARAHGMTILREYVDRHISGKTDDRPAFQQLVADSAKHTFDAVICWKTDRLARNRYDSAVYKKKLRDNGVEILYAAESNISGAEGIIIEGLMEALAEYYSAELAEKARRGMRESALKGKALGSSRPLGLTVDADKHYIIEPTGAEAVRYIFEQYAAGLSSSSIVERLNAMGLRTSHGGPFNKSSINRIIQNEMYRGVYVSKKFDVRIEGAIPAIIDNDLWKRAQNMFERNRQSRTPHASRADYILSGKLYCGECGCLMKGVCGRSSGNGQMYHYYACPGRSIGRACTRKNIPQDELEAMVVNSVADLLLEPELLEQIADAIVELQQAEAARPDPEKQALEKSLSDVRNKIQNILSAIENGTSSAALSARLADLEQQESTLSYQLSSLAAKKPLTFTRDQILFLLQQFRVSPSERTKAYCRRLVDTFVDHIELTNTELILYFNISDETIDKNKKAPRSNPSKESSTEKRLVRVARIELTAS

SEQ ID NO: 24533 - protein, 502 aa, synthetic construct
MEIQIREGNSRQKRKLKVCAYCRVSTDADEQENSLENQIRHYEEAITSNPDYEYAGVYSDFAISGFKEKRPGLQKMLADARKGKIDLILTKSVSRFARNTSIVLEATRKLKELNVGAFFELQNINTLSGEGELMLTILAAFAQAESESGSVGAKMVYQRKYEAGIPVQYLERSFGFKKDERGVYIADEEEAVWVRKIYEMAADGYTPASIKRHLNENGVKTVGGAEWIDSTVFRLIENEIYKGDYIMHKHFVNEERKLVRNRGEVDAWYIEDDHEAIVSPELWQKAQDALEAKRDYLAESSVIEEFTEENYPYMNKIFCARCGHPLYKRIYSNGNRLNWGCSGTKRYGKSFCEGINIPDGVLRGAWNFDENMYIGEKPTDKGKKEFTYLKEASWKRRHKKKEPEPIPENTETEYPYREKIFCGLCGSRLVRHVNTKSHKVIWVCNGRKRKGKDFCDGTRVPDTIIKGWGEIKKDIYIQRKDDKNGKKRYSYTSKKPKGADRA

SEQ ID NO: 24534 - protein, 578 aa, synthetic construct
MKGAIYSRVSTEQQDYSKQTNELKDYAKRNGIEVVYVFEEKESGFNNNRPEFEKLRKLTKQDIDIILVWEISRISRRAIYLQQQVQEFTDKGICIYAKKDGFSTLNDDGSVYASTKMLIGFASIIAEQEAATLKERTISSKRNKILREGKSYTYYAPYGYDYNKETKMLSINEKQAQVVKRIFQLSIDGYSTERIAILLNAEKIPTKGKKENWTAGTVCNMLTNPVYKGEANYTLKKEKKAGSTYCKPMEVVTISTPAIIEKEQFELSLQKLAERTKRSNSFGTKYNPLLRGLIHCPHCDVKYVYNFGTNQYLCVNKYKKASNKNVHCTAKCISNKLDSIVWNVVKTFFYKELAAGKAQEQIEPLQAEIESYKRQILLLDGKQSELTARANIIVDAAIEIKIQFPNMPDLYANKMKEVEEINKEASKYQKEKERLEKLIHSNDARIKNINRASKESALVESITDETEKYDLVHKAIDKIMIFGEGKTSIIIVTFSTGQTIYLGYSSKSNSKYYTIFYPSSDIYFDIQTSKGYINHLKEKATINSDGSIYLGDLTGEVKEYSIIDFVNYLDIEENRRYY

SEQ ID NO: 24535 - protein, 532 aa, synthetic construct
MAKRKITVIPSTINPLTQTPVGSVQKRKVAAYARVSTDSDEQYTSYETQKTYYENYIKSKPEWEFVRVYADEGISGTNTKKREGFKSMITDALDGKIDLIVTKSISRFARNTLDTISYIRKLKSAGVEVYFEKENLWSLDSKSEFVLTIMASIAQEESRSISMNVTLGKRWQMQEGKVSFAYSRMLGFKKTENGYAIDKEQAKIVKEIYTDFLIWGMTSTGIANKLTKRGVKTPSGKSEWSKNNIESILTNEKYKGDALLQKTYVVDYLEHKVAMNKGEITQYYVKDSHEAIIDKAEWDMVQDEIKRRKELGATYSASSIFISKLVCGDCGGIYGKKLWHSNDDYRSERYLCNNKYKDKNKRCTTPALTEKTIIDAFIKAYNSVMVDKNSLIEDAEAIKLLLSDTSKIDNEMDKLNTELQVINGLVDHLVRDNSSRLQSQEEYQKKYDELVTRYQNAKTRYEELSIEKSRKEFQSLRLDMFISKIKESPSLISEWNMEIWSILVDKAIVNSNCSITFRFRNGVEKTIKVKKC

SEQ ID NO: 24536 - protein, 523 aa, synthetic construct
MRFFSYGRKSVFSDKSDSIDNQFRMNREYCESKFSGQVDSWQQFSDEDFTGANTSRPDLQRMLSFIKGGFCDVLVVYQLDRLSRDVRDFANIYALLEEHGVMFISIKENIDTTTPIGRAMMYVTVVFAQMERETIAARVTDNMLGLAKKGYWTGGNPPVGYVRKHIVVNGKKHCSIEVDPDGARYVTQIFDTFLAYNCSLQGMETRFKNQGIRTQNGKFFSTAQLHKMLTMPYCVEATPEVYDFYAAKGCIMDPGSPREMWDGSTGVIIYGRSTEKNKKHQLQPPEKWTVCLGKHKPFMPAEKWLAVQSRFTQNKCIKDAKWPVPLLKGVLRCKCGNLMQVSRKKKVDGTCSSWYYCRKRMRQGVDACDMGQIKCDLLDEEVLELFRGITADPALIQKFVKAEAPADVPDLKAAQARVSACERKIGRLAASLALAEDSAASKYIIAEMERLDVELGALKREASLAEMESHRAAASAKDAKATAAEIAKLIHGLDGFDDKEKNAIARAVIQECTWDGERLFITL

SEQ ID NO: 24537 - protein, 539 aa, synthetic construct
MYQSNSNSTYAALYTRFSRDEPDGESNSIANQKKLLLNYAHSRGIVNTKFFVDDGFTGTNFNRPDFKAMIAECEAKKISTIIVKDMSRLGRNYLMVGYYTEIYFPENNIHFIAINDDVDSVKGDNEFTPFRNIMNEWYVKDTSKKVKSVIHNKGMSGERICNNVIYGYKHNPDNPKEWIVDEEAAQNVRTIFQMFLNGKGTSQIAKYLHSEKILVPSVYAREHGKISARATPADPCLWDSKTIREMLKRQEYVGDTVNFKTKKVSYKSKKKIYLDKSEYVIFPDTQEPIIDRDTYERVQKIMESRKKVPIVREPDPLGGYIFCADCGSRMYITRSTVFPQKNCYHCGSYKRSSKLCSSHYIRECVINQLILSELQKVVSIVKNDRERFLNAAIQSYVNRTSYDVKKLRKDKQLCEHRIQELDVLIKKIFEQSVLGTLSKERLAILAAGYESEQAEIKNKLSAISKEIEITDSKQLNADRFIAIVDKYTNIDSLTPEIMSEFIDKVLVHKPIYDGNNKRHQTIEIYFNGIGAFDYDSCNS

SEQ ID NO: 24538 - protein, 498 aa, synthetic construct
MQIEVGKADMGKEKKRLKVCAYARVSTEASEQENSLENQVSHYTEMIQSNPAYEFAGVYADFGISGFKESRPQFQKMMQDAKNGKIDLIITKSVSRFARNTAIVLKASRELKERNVGIFFELQNINTLTEAGELLLTILAAFAQAESESASESSKMAYLHRIENGEVVAYLERSYGYEKDENGEYRAKEPEASVIREIYDLVIQGVNCTNIARVLNARNIQTVQGAEWTASTVFRIVENEIYKGDVLMQKTFIDEKRHQVQNRGEKAMYYAKDNHPPIVSEKTWEKAQRKLEDMRAERAEHSVIQEFTEENYPYMNHIFCAKCGWPLKPRVYSHGHRLSWDCSGQKRGTKKFCTGIHVLDNDLRKMKIEGNRYFSGTVDKYGEVHLKHVGERTWKNKHKKKKFNHKDLYPELNEENYPYYRRLYCARCGSRLGRYISHGTVRWICSSYKRKGQAKCPGVRIPDEIIKGWNLPDGKIYIMGKEDKNGEKHYSYTSESAL

SEQ ID NO: 24539 - protein, 560 aa, synthetic construct
MKEKQLQDITALYGRLSRDDEVGGESMSIQSQRAILGQYAKEHGFTNCQFFMDDGYSGTNFDRPAFTEMMELVEQRRVRTIIVKDLSRLGRNYLEVGRYTEVIFPENKVRFIAITDGVDSAAGDNEFAPFKNIINEWYAKDISRKVKSAFKAKALRGEYTGAYPPYGYDRDPNDRHKLVPNQYAWVIKEIFQMALAGKSCSIIAKELGEKQVLRPQAYLHEKFGTFASDIVLTYPYAWDHSTVRAILMNQVYIGNMVHFRTGTQNFKSKKMIWKPETDWVVVEGTHEALVDAETFWTVQERIKVKQPGKKRSENNIFRGIMFCGECGKRMAFCSRKKDERRKSLGTFSCNANRRYGGKVCTTHYISLEQVKAIVLADIRRHAMLAAEDTDAYADYLMGLSQAGQLNEQKAMKKELDAAQRRLSELTTLVQRIYEDNVFGRLSDDLYQTLSAKYEAETKELKTRAAEIQALLTEATTKTQGIQDFADLVAPYADITELDEELVHTLIEKIIVHEKEIIDGETVMRIEIYYRFIGKTSDCLNRSVAPIKIKTESVVATDSIA

SEQ ID NO: 24540 - protein, 503 aa, synthetic construct
MTTKKAVLYARVSSDRQEKEGFSIPAQIKLLHEYAKKNNISIVEEFVESETAKKAGRTQFNNMVKYLKKNSTVRIILVEKTDRLYRNLKDYVTLDDLNGLAIHFCKEGNILSAESKSQDKFMHGIRVLMAKNYIDNLSEEIRKGLNEKCAQGYYPSSPPMGYINKQNANGKKELIIDPTVAPFIKQIFESYLMGNYTYKSLAEYMHACGFRPKNRNCTMKTIENILHNEFYTGIFIYKGVKYYNAKHDAIISPELFMHVQEKIKGKYKTARKKHNFAYSGFIKCKHCGRPLIAELQHGRHKKGNYIYYRCHSCKNTTLRQDEFENAFQEHVLNNLYFSEECISGIISIAKELINMESEFACVSADELNKKIKLLQRRLSQLYTDKCDGIIDTETYISKRDEWQHELDVALVKYEKIAKAGNEFVGNVELLLNLCKDAPQLYLNQSSEEKRKLMNLLISNPIFDGETIDFPLVLAFEYAIKLHKLETRGVEPLSKMDLDKLLRV

SEQ ID NO: 24541 - protein, 545 aa, synthetic construct
MARKKNIAAGQNAVIYARYSSHNQREVSIEQQVRECMKHAAELGLHVVGTYEDRAISGKTDKRPNFQRMMRDAEKGKFQAVVAWKSNRIGRNMLQAMVNEAKLEDCGVKVFYAEEDFDDTAAGRFALRNMMNVNQFYSENMAEDITRGLYDNASKCMANGRQPLGYKRGEDGRVVLDEANAAVVREIFTRVAAGDLFVDIARDLNAQGIKTSKGANWNKGSFQSICQNERYRGIYIYGDVRVADGIPRIVSDDLWYRVQEAMRMKKNPVGTRHRVGAEDYLLTGKLRCGHCGSYMTGVSGTSRNGELHYYYTCQKRRTEHACDKKNIRRDVIEPAVAQAIKMYCLTDDVIAWIADRTVEYWEKHDNDLQIEALEQQLEENKKATSNMLKAIEMGIITEATRTRMVELETEQSRLSVQLNAAKEDVVKIDREQIISYLELLQQGDIHDRDFQMELFKNFLVAVYVYDDNRMKLVFSCMGDQNSVEIPLETGEDPPDGGLSPDAKMFVLTPDSSTRSERHHTLCGAFFVLHCSRKTHKNFCPLPQPA

SEQ ID NO: 24542 - protein, 518 aa, synthetic construct
MVAIYVRQSLDKKDSLSIESQINDCITLCKRNGWDDYQVYKDKGWSAKNLDRPEFQKMNNDVEAGKIKAVVCYKIDRISRSIRDLVNLIEDYHELGVHFVSFADNINTAAPGGLMMATLFGSLAQMEREAIIARVTDNYYYRCELGYWGGGPAPYGFNLKKIVENGQKHTVLEINEREAAVVKQFFKWYLEPEGTIYEILKKADKAGIRTRKGGAWTSRVVSELLSKPMYAPNSMDIYNFYAAQGVRVRVTPEQCDGKLSLNVFGRRDRGSKHPKRSRPVNEMTLAICKNPPIIDSDTFLKTQFKKKTKLQVSPRTGTAKTTMLSGLVKCALCGRAMSPSGSSRGVRYFTCSGKRNYAAGTCTSKSIKVSALEKIVIDDILRYATNPKVIDMFHAMQGSKLTAEQSHEVNLLQQEAAKLDIEIDNLLDACSAGNTTAIEYLNKRIERIDTRKHEILTRINEIKRDTENVISLFSGIEIENVPYILAHGSIDEKKNVCQFLLNEVLFTNADDVKVYYKI

SEQ ID NO: 24543 - protein, 525 aa, synthetic construct
MPKNVRKIPASVNLYNAVPITNKKKRKVAAYARVSTDQEEQLTSYEAQVDYYTNYIKSRDDWEFVDVYTDEGISGTSTKHREGFNKMVKSALAGNIDLIITKSVSRFARNTVDSLTTIRKLKDIGCECYFEKENIWTFDGKGELLLTIMSSLAQEESRSISENVKWGHRKRFADGKVTVPFGHFLGYKRGEDGNLVIDEEQAVIVKRIYREYLSGSTAVAIAKGLTNDGIETPGHKQKWHASTVRSILTNEKYKGEALLQKYYTPDFLTKKQKVNNGEIQQYYVENNHPAIIEPEIFEMVRIEKDRRLMLNGKYSGTDILTSRIKCGECGGSYGAKVWHSSSKYKKVIYQCNRKYAGKEKCKTPAIRADDVEARFVNAVNSILENKDEIISNLEMVLDKICNKKELSDEKEKLEKSLTEQVEKIQDLIEINSRVAQNQKKYKKEYDALIKEYEETKSMFDQLEIESSKKAAKHQMIKDYINTLKKQNKPLEKFDGLMWGSLLESATIKDKDTIVFKFKDGTEIVG

SEQ ID NO: 24544 - protein, 447 aa, synthetic construct
MRKITKLETKKIDLPKLKRVAAYARVSVERGRTLHSYSAQVSYYNDLIQKNPEWEFAGVYADLGISGTGIEKRNDFKRLLQDCEEGKIDIILTKSVSRFARNTVDLLKVVRHLKELGIEVRFEKENINSLTGDGELMLSILASFAQEETISISNNVKWGIRKRFEKGIPNGGFIIYGYRWKNKKLEVVPEEAEVVRYIYDNYLQNKAYQKVASELNELGYKAYKGGKFSPSSVREILSNITYTGNLLLQKYYIVDPIIKKEKKNTGELNQYYVENSHEAIISMEQFEAVQKEFERRNKLGQRANQSLHITCFTSKVKCPLCGKSYRRSGKKNRMGKDYTYYVWVCRTKSEKGAKYCGAKVIPEEELKIAACNALGWNEFDSDLFDETIEKVVPIGEDMIEFYPYDGGVIKQEWHSTARQRGWNEERKRTTTEKRLKTLEARKNAKEC

SEQ ID NO: 24545 - protein, 463 aa, synthetic construct
MRRKTTAPVEKILLRVAIYIRVSTDKQVKDGDSMRDQLATGQKYIDSHENMILVDTYIDDGISGQKLKRDDFQRLIDDVRAGRIDLIIFTRLDRWFRNLRHYLNTQDILDKHGVSWTAIEQPYFDTSTPHGRAFVNNSMIWAELEAQNDSDRILGVFDDKVDNGEVLSGSTPLGYKIVNKHLVPDDDAPTAVAIFQYYRKTGNLSMTLRYMESEFGLVRSAASLKNMLTNTKYIGEFRDNKNYCPAIIDRDLFFDVQRLLKINIKSGKKHDYIFSGLVVCDDCDHIMSGCQQRARGRVRADGTRIIYKYSVYRCRQGVNLHRCPNRKLVFETTLEKMLLERIRPELENYIAEYEVANLPALRTDAKRRSVEGKMQKLKDLYLNDLITMDEFKLDREKLLMQLEKINAEDSRPVKDLSYLKNFLKMDFESVYDSLSIPERRELWRSIVKEIRVDHDKNIHIIFL

SEQ ID NO: 24546 - protein, 503 aa, synthetic construct
MAGRITQVTFGSPQLPRDKNVAAYCRVSSGKDAMRHSLAAQVSYYSELIQNHAGWEYAGVYADEAVTGTKDSRKNFKRLLSECRAGKIDMVITKSISRFARNTVTLLETVRELKTLGVDVYFEEQNIHSLSADGELMLTILASYAQEESRSASENQKWRIKKNFEEGKPWSSTLLGYRNVNGRYEIVPEEAETVRMIFAWYLEGAGATTIRNRLNAMGIKTRLGNSWSRSPILKLLRNYAYTGNLILQTTYREDYITKRSVKNNGEKPMYHAQGTHEAIIDMDTFNRAQEEIQRRAEHFASPDGNKSTARYPFTSMVKCSRCGKSYVRSGSPKYRTWTCHTRRKDGLNCCGAEIIPEEELFRLTAEVIGGKVTEDAVRDKITVIRAEKDRTLVFCLKDGKETVKQWREHEIKYICTEEQKRQISLKNSGRKRTDEQKRQQSERMKEYWKTHEFTEEQRRLISEKKKAYWSDREASAEHREMLRQRMKEVRTMRKNGGKEENDG

SEQ ID NO: 24547 - protein, 525 aa, synthetic construct
MANVTVIPATRNIHTGIRKDAVTKRKTAGYARVSTDSEEQLTSYEAQVDYYTRYIQSRPEWEFVKVYTDEGISATDTRHRDGFNEMIKDALDGKIDLIVTKSVSRFARNTVDSLSTVRKLKERGVEVYFQKENIFTFDSKGELLITIMSSLAQEESRSISENVTWGKRKRFADGKVSLAYSTFLGYKKGEDGQMEIVPEEAETVRLIYRMFMQGKTPYAIAKYLTEQEIPTPTGKSGWRHRTVENILTNEKYKGDARLQKCYTVDFLSKKRKANEGEVPQYYVEGSHDAIISPSEWQLVQLEMERRRAAGRSNCCSPFSAKLKCGDCGAYFGSKVWHSNSKYKRTVWQCNAKFKGEHKCTTPHLYEQRIQELFLEALSSLMENRDSLIDDCRAVMHVLGDCEAINREMEEVRSEMEVTTGLIQKLIDENATRKMDQNDYRKRYDGYVSRYAALESRMNGLEKERKEREFKYDIFSGFLFELGEIHELPLAFDDRLFYQLVDYATVYSDGRVVFTFRNGTEITTEM

SEQ ID NO: 24548 - protein, 613 aa, synthetic construct
MKRKARIQMGIDDRLVAIYARKSRITNKGDSIGVQFKQSADYAINQLSLPEDYEFARYEDKGLSGYYSDRPDFQRLLRDIEMGKIKAVACYKLDRISRKTSDLMRLLEYFERHDVTLLVCSNNINTRISTSKIIIQVLAIIAEFERDILTERIQDNLMELAKDGRWLGGKTPTGFSSQRVTTGSGKNKSAISFLVPVQEEKEIVLEIYSTFWETRSLLQTANIISEKYETKHGAKFTTSTIRLILRNPIYCVADEYSYNYFLEHDGNLFGEPSDFDGQHGLTAYNKTDQMKVEDEDSTFFNPKFSQLLTRKPISEWIVSVGRHEGFISSRKWVETQNMLDEIAEKYNRPHRKTNALLSGLMYCPICGKRLRVLPESNRWTNGKPRFKYACPGVRAKECTFKGVEGVTLDEFVIHSLSSLQEEHSDYYRQLLENRVASMIRTDQSEKEYQETKKAIERLNADIAAQVRNLREADDALKRFIQDDIKELTDELAKCEAALRRMEDTQSENQYLVHELNGMKKRLLSFEEFAKDAQPEALFTLVHSIVDRIYITTDGTKQKCQVYIKGCATEDYSDVLGAAGYIEEEPLLPVVSYMPPMCDLDYYSIYDPLVQKGG

SEQ ID NO: 24549 - protein, 520 aa, synthetic construct
MKNVTKINQIDFSIFKKTRVAAYCRVSTDSDEQELSLDTQKNHYESYIKANSEWEYAGIYYDDGVSGTKTAKRDGLLRLMEDCEKGLIDLVITKSISRFSRNTTDCLALVRKLLNYEVYVIFEKENINTGSMESELMLAVLTSMAESESRSISENEKWGIKKRFQNGTYVISYPPYGYANVDGEMVIIPEQAEVVKEIFAGCLAGKSTHIIAKELNEKGVPTKKGAKWTGGTINGILTNEKYIGDALFQKTITDANFKRKRNYGEEEQYYCENHHEPIIDKDTFEKAKESIRQRGLEKGNCSEDTAKYQNRYAMSGKIKCGECGRSFKRRYHYTSHGRSYNAWCCGGHLEDSKSCSMKFIRDDDLKRAFLTMMNKLVFGNDLVLKPLLISITTNNSKKNANSVEDIEKEMESNEEQRKQLNTLLTNGYLERPVFAETHNKLIMEYEHLEAERDLLFRMDDAGYTMEQALKELVDFLNDAKPFTEWEESLFERFIEKVKVLSRDKVEFEFKCGLKLKERID

SEQ ID NO: 24550 - protein, 519 aa, synthetic construct
MKKITKIAETASAKVKLKKIRVAAYCRVSTDSDAQLESLEAQKTHYENYITSRDDWEFAGLYYDEGITGTKKDKRPELLRLIEDCKSGKVDFVITKSISRFSRNTTDCLELVRKLLALRIPIYFEKENINTGSMESELFLAILSSMAESESVSISANSKWSIQKRFENGTYKVSYPPYGYDWDGEQMVINAEQAAVVKEIFAALLSGKGTHAIADDLNQRGIPTKRNGHWTATTIRGMLSNEKYVGDCFFQKTYSDSRFVRHNNHGEQTQYLVKDHHEAIISREDFEAAQTFIHQRATEKGVVKGSDKYQNRYTFSGKIICGECGNTFKRRIHHCTGYKYAAWCCNTHIKDKDKCHMLFVKDDDLKQAFITMMNKLVYAHRIILKPYVDALKNTSSDDSLRRIQEIQTLLAHNTEKRETLTKLMTQGIIDPILFNKETNELLSQADSFRDEINALKNAVSGDVTKIDEAAALLRFTGKGGILQEFDDDLFQEYVNRIIVRSRNEVCFELKCGLTLRERM

SEQ ID NO: 24551 - protein, 592 aa, synthetic construct
MPNLRKIEAAVPTIREKKKVAAYARVSMQSERMLHSLSAQVSYYSGLIQKNPDWEYAGVYADDFISGTNTVKRDEFKRMLADCEAGKIDIILTKSISRFARNTVDLLETVRHLKDLGIEVRFEKENIRSMDGDGELMLTILASFAQEESRSISDNVKWGTRKRFEKGIPNGRFQIYGYRWEGDHLVIQEDEAKIVRLIYDNYLNGLSAETTEKQLAKMGVKSYKGQHFGNSSIRQILGNITYTGNLLFQKEYVIDTISKRSKINRGELPQYFVENTHEAIIPMEVYQAVQEEKVRRRELGALANWSINTSCFTSRIKCPLCGKNYRRSGKRQRKNPDEVYYIWICRTKSEKGAKSCPAKAIPEKALKNACAEVLGTAEFDDAVFSAQIEQLYVVGDDTLEFHFYDGSVLEKKWKSTAKKDWWTEERRAAWGELHKHKATNPNRRRFYEFTGLIKCGQCGESFRCQSMTRKDGTRIRSWHCGRTCGNTNIRDEILKSMVCDVLGLDAFSEESMDAALEKITVNGTAVRFHLRDGSVAEREYTQPKRKGTKHTEEFKEHMRQLMKAKWKEGKMHGTKKSDNHSSHDQPVHGGAD

SEQ ID NO: 24552 - protein, 518 aa, synthetic construct
MTTIPATISRYTAVPINSTKKRRVAGYARVSTDHEDQVTSYEAQVDYYTNYIKGRDDWEFVAIYTDEGISATNTRRREGFKAMVADALAGKIDLIVTKSVSRFARNTVDSLTTVRMLKEKGVEIYFEKENIWTLDAKGELLITIMSSLAQEESRSISENTTWGQRKRFADGKASVAYKRFLGYDRGPNGGFVVNPEQAKTVKLIYKLFLDGLTCHAIAKELTERKLPTPGGKAVWSQTTVRSILTNEKYKGDALLQKEFTVDFLQKKTKKNEGEVPQYYVEGNHEAIIDPVTFDYVQAEMARRTKDKHRYSGVSMFSSKIKCGECGCWYGSKVWHSTDKYRRVIYQCNHKYKGGKPCSTPHVTEEQVKDAFVRAVNILLSEKAELGANVRAVIAMLCGSAELEKQQAELKEELEVVVGLVERCVAENARTALDQDEYSERYNGLVSRYEAVKAQLDEVTQAIADKNDRKKLLEQFLRMVETQEPVTEFDERLWSSLVDFVTVYREKDIRVTFKDGTEI

SEQ ID NO: 24553 - protein, 519 aa, synthetic construct
MKKVTKIDKIQPAKNAEDKLRVAAYCRVSTATDAQLESLEAQKSHYENYINSRDDWCFAGVYYDEGITGTKASKRLELMRLLADCKAKKIDFVITKSISRFSRNTMDCLEIVRTLLNLNIPVYFEKENINTGSMESELFLSVLSTMAEGESASISSNNKWSIKKRFENGTYRLSSAPYGYKLESGGLQVVPEQADIVKRIFRELLSGKGMYSIAKKLNAEQVPTQKGGRWTSTSVHNILTNEKYTGDCIFQKTYADSNFNRHINNGELNRYLIQNHHEAIISHEDFNATAALIEQRAAEKGIESGSDKYQQRYAFSEKLICGECGNTFRRRIHKGKYNSYVAWVCNTHLSDTNRCSMLFVRDDALKLAFATMLNKLIFSYRLLLKPYLAAMQSNTADEALLRIQYLENQLDQNAEQRSTLHKLMAQGYIDQILYTQECNELLLQARDFRSEIEALNNTVAGDTTKVYETERLINYCKRGEMLTDFNKSLFELFVDHILIYSRQKIGFVLRCGLTFEEMI

SEQ ID NO: 24554 - protein, 521 aa, synthetic construct
MGNVMIIPAKRQVGNTSRRQEDKPKLRVAAYCRVSTDSDEQASSYETQVEHYTEYIKKNPEWEFAGIYADDGISGTNTKKREEFNRMIEACKTGEIDMIITKSISRFARNTLDCLKYIRMLKDKNIPVFFEKESINTMDAKGEVLLTIMASLAQQESQSLSQNVKMGLQFRYQNGQVQVNHNHFLGYTKDREGNLVIDPEQAEVVKRIYREYLEGSSMDKIAKGLEKDGILTGAGKKKWWTSTINKILRNEKYIGDALLQKTYTTDFLNKTRVKNNGIVPQYYVENNHEAIIPKDIFLRVQEELVRRRVVKTSANGKKRSYSCNHCFAQIVICGECGEMFRRLHWNNRGVKSIVWRCISRLESTGLECHARTINELVLQDAVVKAINQMLGDKSNYQAQLQLNIAAVIRASQATSVENIDEKLMALQQELIQKAQSKEAYDEIADEIFRLRELRQQTTIDTAARDEQIKRINDLQDYIAQQTTHLTEFDESLVRRWIKQITIWDDHITVELKSGVSIDVDV

SEQ ID NO: 24555 - protein, 464 aa, synthetic construct
MARSVTVIPARSQKVRTGHKAVQEKKIRVAAYCRVSTDQEDQLHSFEAQVEYYTKYINEHENYEMAGIYADEGISGTNTKKREQFKKMIADCEDGKIDLVITKSISRFARNTQDCLAYSRKLKNLGIGIIFEKENINTLDSTGELLFTILSSLAQDESRNISENCKWGIRTKFKNGEMHLNTFKFLGYDKDENGKLVINKEQAKTVRRIYRDFLIGINPAQIAKELTEEKVPGCLGQTKWYPSTVTGILKQEKHMGDALLQKTYTADFLTKRQVRNNGEIAQVYVKDSHKGIIDKQTWNAVQEEFDRREKFMESHGTDRYSYGADCMPFCEKVFCGECKSLFTRHSWSSRGIVQWQCKNHRKDGKVACTNAYVDNADLEKGFVKAFNRLVTDRDKHMERWQQMKSDGTPLEKIRAGQMMEAVGNEPLTRFVPEIAQLVLCEVTMLGAKKYEFFFLEGSRVKVSV

SEQ ID NO: 24556 - protein, 542 aa, synthetic construct
MFNFKNNDEIIAVYCRVSSDEQSEKGTIENQKEYAEKYVRLNMLNVYDYYMDDGVTGTLPLQKRPEGKRLLEDAKAGKFNLVLFFKLDRLGRSVRVILNAVYDLMELNVDVRSMTEAFDTTTPSGRFTLNTFAGIAELERDTILTRMRMGTIRHAKLGKWLGGPVPYGYTLGNGYLEISHTKIPGLAYSEADIVKLIFEKTVYEKMSAEAIADYLNNLSVPTKYKILNRKLITSGYWYPSRILSMLHNTVYYGVHIFGQMSKHQKPEIIKQTNPAIVDIDLWDAAQKQLTSNKLLAARCRKNDYLLSGLIKCGLCGRTYIGTGYAGSKKEKVLYYVCNDKNRYHPDKNQKICQSQNLRADWIESIVWNDCLSYIMQPDKLYLENKTQSLTDPKDELHALEQAAVKLERERSSILDLFRKKIITENDLKNQLDKIAKEQDKLNRAISDKKALISKIDKINNNMIKMVDLLKSFQKYISDNITFTDKRKIVEALVENIIVYTDYDNGQRDIPIVTIAINYVFKNEKNPLKRNYQPSSKQNIHGF

SEQ ID NO: 24557 - protein, 521 aa, synthetic construct
MKKVTKIDGVQKNTAINSRLRVAAYCRVSTSSDAQLESLEAQKSHYEQYINSREDWQFAGLYFDEGITGTKAEKRPELLRLITDCEARRIDFVITKSISRFSRNTTDCLALVRKLQSLEIPIYFEKENINAGSMESELFLAILSSMAEGESASISENAKWSVKRRFQNGTYKLGYTPYGYDWDGKNMIINPDQAAVVKRIFADILSGKSTNAIADELNAEKVPSKKNTNWTSSTIRGILANEKYTGDVIFQKTYTDENFNRHTNYGEVDQYMALDHHEAIISHSDFDVANALVNQRAAEKGIEKGSDKYQQRYAFSGKIICGECGDTFKRRIHSCITYKYVAWACNTHLKNKESCHMKYVRDDEIKAAFITMLNKLIYGYRLILTPYLKVLENSSGDEAIHRIQHLEQLIAQNSEQREALTKLMAQGYIDQILYNQETNELLLQAETYRSDIEAITIGMTGDAAKVTETRLLLHFVSHTDMLTAYSEELFENYADHIEVMSRNEIRFVMKCGLTFTERIGD

SEQ ID NO: 24558 - protein, 520 aa, synthetic construct
MKTNLSEEYAVYLRKSRGDSTLESLGVDVLERHEHMLLDLAKKMNITIGHIYREVVSGDSISARPEMQALLHDVEDFRWKGVLVVEVERLARGDTIDQGIVQRTFQYSDTLIVTPLKIYNPADESDQEYFEFGLFMSRREYKTIKRRLQNGKYAAASEGRWPFNASPYGFNQVRLAKGFTLDIDPAEAPAVKLAFSLFTGPDRIGVTMIRKYFSDHGILTRSGKQWTDGMIRDMLSNPVYDQKVAIGRRRTVTKLVDGRPVNTRPRSNDYKVYDGLHPRMIDHKIFLEAQSYLGLGAPKPPESYGVKNPLAGLIVCAECGHKLVRRPATRATTKNGAKYDTMLCRTPQCPTVGCSLEILEKELLNSLSDWVKDYELKTILPESHVKEKEDLVTAAASELSTLESQRERLYDLLEQGVYTKDIFLERSHSLQERINDARVRLSTLELELANERQIDAHILNFIPSCKELLSTYWSLSAADRNQALRMLIESVEYRKYEKNKKGKKDDASFELIIKPRIPRG

SEQ ID NO: 24559 - protein, 556 aa, synthetic construct
MPNLPYSNEFAKLIIAIYCRVSSEDQAERGTIEIQKEFAAKYVNLYNLEVFDYYCDDGVSGTLPLEQRPEGKRLLEDAAKKRFNMVIFYKLDRLGRKVRVILNAVNDLDALGVTVKSMTEPFENETPTGKFLLTTLAGIAELDRDTILSRMWSGAQYAAKQGRWLGGVIPYGYMVADKKLVISTDPIPNCRLSEEDVIKIIFRMAAKEKANCAEIADYLNSIKIPTRYMLNGISGKRYKKTAEIWRPSRISEIIRSTTYKGLHQYGKNATHKNSKIITRSVPPIVSDEIWQEANNTMKDNRVSCKRNTKNLYLLQGMIRCGLCGLAYSPTFYKTRNTSYYCCTCKGQQKTKFYNRDTCIGKPVRVDWLDTLVWSKCLELLKEPEKIYDAKPSTNKEPHNIVPTPTEFELIKNRIQELSTEREKLLDLYRKGIIIESDLITQINKLYLEETELNNKIIKIDNQPKQELKRSKASTVMVLKEFIEMIKNTDINQLPFELKREVVKMLIDKVFVYTKVDPDKFYPSINVIISWRFDAAPFNIDYIENYTLIIFLLPRKK

SEQ ID NO: 24560 - protein, 536 aa, synthetic construct
MLQELNTSAQKITALYCRLSRDDDLQGDSNSIINQKNILQKYADDNGFKNTVTFVDDGYSGTTFNRPDWQRLMEFVNRDEVATIIVKDMSRLGRDYLKVGYFTEILFPENGIRFIAINNGVDSDKPTDNDFTPFLNIINEWYAKDTSKKIRAVFKSKADRGETLTFLPPYGYMKDPNDKHKWLIDDEASIVVKEIFRLCISGLGVSKIANELNNRNIMPPGYYKITHGQWNKDLDYSNTKWSPAIISEILNRQEYIGNTVIFKPDPYKRNKRKFKPTKPEELKIIENTHEAIIDKDTFDVVSNIRAHKRKNTKLGYVPKLAGKLYCSDCGEVLYYVCPREKYHNPAYFVCSSYRKHRCEYTHAIREADIEAIILSDIKRLTSFVKNNEDEFVAKVSDYSKSELNKALKNATKEIDTATARYKKLDSIIQNLYEDKLEGNLTDERFNKLSVSYENEQKELETRIKVLQDFVNKENEKYLNASYLINLVKKYTEINELTDEIVQEFIQKIVVHHKVKIDGVKTQQVDIYYNGIGHIEI

SEQ ID NO: 24561 - protein, 482 aa, synthetic construct
MAKSVTTIPATLSRFTAAPINSTKKRRVAAYARVSTDNEEQLTSYEAQIDYYTNYINGRDDWEFVGVYPDEGITGTNTKKREQFRQMVADALDGKIDLIITKSVSRFARNTVDSLTTIRKLKEHNVEVYFEKENIWTFDSKGELLLTIMSSLAQEESRSISENCTWGQRKRFADGKVTVPFKRFLGYDMGSDHNLVVNPEQAKLVKRIYGMFLQGQSPFQIARTLTEEGIPSPGGKDHWSPSNIKSILTNEKYKGDALLQKSFTVDFLTKKKKTNEGEIPQYYVKDNHEAIIDPETFEMVQTLMTTRTKGRNRKSSVSIFSSKVKCGDCGSWYGPKVWHSNDAYRKVIWQCNHKFDGQKCATPTLTEDEIKELFLRAANQVIDQKEQFIAIYDQVLSRSLDTTALESELSDLEAEINIAAELIEDCIKENAHVALDQDEYQKRYDALVARFDKAKARHTEVTDLIAERMARKHQIEAYLKNL

SEQ ID NO: 24562 - protein, 520 aa, synthetic construct
MTAVIYARFSSHNQTEQSIEGQLKTCYEFAQKNGYTIVGEYIDRAISGTTDARPDFLRMIEDSGKKGFQFVIVYQLDRFARNRYDSATYKARLKKNGVRVLSARENITDDASGILVEGLLESMAEYYSAELAQKIRRGMDINAEKCLCTGGNIALGFKVAPDKHFIVDEETAPIVVKIFELYASGQTVAQICETMNAQGVTTSRGVPFNKNSLRKMLQNKRYIGIYTYKDKEIPGGMPRIISDDLFYRVQEIMFKNKKAPARSKAKQEYLLTTKLFCGKCRDMMTGIKGTSHTGMPYYYYKCNSAKKKQCSKKAVQKDYIEDLVIEECRKQLTPANIDKIAHEVVALCEREKDNSTLKRIEKLMRENERKQRNLMNAVAECEIESVRKSLYEEISRLTSEHDTLKSEHAIEQAGTVSLTITEVKFFLSQLRKGKADDLTYRKTLINVFINAIYLYDDKLVIFFNSGDKPVTVDDDLLNQTEENDGFVFSSSCSTIRQGPGAITCSGLFSLPQICARVQPI

SEQ ID NO: 24563 - protein, 513 aa, synthetic construct
MPEVRLITPITRQSTKKMQVAAYCRVSSNSADQLNSYAAQIRAYKKYIGARDDWELVDIFADEGLTGMKSETRDEFQRMIRMCELKHIDLIITKSISRFARNTKDALAYVRKLKLLGVGVQFEKEGISTLSMGDEMLLNTFSALAQEESQSISMNQRLSIVKRMELGEYVDSNAPYGYRLVDKMLTVYEPEAGIVRNIFALYLQGFSTSEIARELNKLNIPTKAGKEIWRPSRVAYILKNERYIGDSFYQKTYRETAVPFNQHPNRGQEDRFYAKGTHPGIVEKDVFDAAQTLIEKRKDVFAKATTQNIYPLTSRIQCSECGSFYRRRIVSGTVKWVCSLHKDDSMACDSNYYSEERIYDGFISMVNKLRFSEDNILGQVISRLEMTLAAMKRNNLAARDLSKSIAELNAKLLMLEQLRSKGYLAPEVYQAQANEIGAELAKLKDVRQEKFNSKAAIMLEEVKKLKMLIFELEEPLEAFDEKLFLEIVKSIQINKEDEMSVELLGGLRFRERI

SEQ ID NO: 24564 - protein, 543 aa, synthetic construct
MEVTKVPKKIVTVIEPKRSMTVDKEKYRQKRVAAYCRVSTDSEEQLVSYANQKKVYTEMIASRKDWCFAGLFADEGKSGTRADKRPEFNKMINDCLAGKIDYIITKSVSRFARNTVDCLDYVRMLKSKGIGVYFEEQQIDTLKTDSELYLVIYAGFAQSESESISKNITWSVRKKFEDGTPVFMYKRFLGYRKGADGEPEIVPSEAAIVERIFNLYLAGETVDKISKMMQAENYDIPGKTISFSKGMIMNMLSNERYCGDAILQKSVTIDCIEKKRKKNTGEAPMYYVQNNHPAIIDRVTFNKVQEELARRKTKTPGSAKSSITSTGKYSRYALTDVLICGNCGTRYRRVTWSRNGVKRIVWRCISRLDYGKKYCSDSPTIMEDKLQEAIVRAVNKFNEQDNATYKALMRATISEALGLNGDPEEVDMLERKVEALNNKMLALVNESVSSGDGIEAHESEFMTLSQETELLKQRIAAIQESTAKDNGEQSRLEQIQAIISERESKCMEYEDSIVRQMVECIKVYPGGKLEIIFGGGYLVEESV

SEQ ID NO: 24565 - protein, 501 aa, synthetic construct
MNIREDVIYARQSVDRKDSISIESQIDFCKYELKGGSCRVFKDKGYSGKNTDRPEFQKLLGEIRKGKVRRVVVYKLDRISRSILDFANMMELFQEYDVEFVSSTEKFDTSTPMGRAMLNICIVFAQLERETIQKRVTDAYYSRCLKGFHMSGQAPYGFDLEPTVVENIRTKMMVADPIAANHVRLMFEMYAEPETSFGDITRYFEEQGIKVYGKSLTRPFLSQLLRNPVYAQADLEMYEFFKSQGAVVVNDAADFAGTNGCYLYQGRDVKEDKDKSLKDQILVLAPHEGFISSDIWLRCRKKLMTNITFQNGRKARNTWLAGKIKCGKCGYALKTTHNPSGYEYLRCSKRADHKGCPGCGTLRKAEFEQFIFTAMGEKFREFKLLRGGEGKANPKITAYQVELAQVETEIEKLLDTLTGANATLLAYANKKIEDLDSRRKTLSKAIADLSVETLSSQQIELLSGYLDDWEHISFEDKRKAADGLISSISATSDYVKIEWKI

SEQ ID NO: 24566 - protein, 495 aa, synthetic construct
MLAYGYCRYSSNLQDEKSIEQQKNELEEYAKKNNISIIKYYIDEAKSGTKDTRDSFQNMISDACKSKEIQAVLVWKTDRFARKAIDSLYYRNKLEKVGIKLISITQPIDTETPEGKLMSTMLAGVDEYYSQNLASNVKRALKLNAQNAQFNGGIAPLGYDIVNKKYVINEREASSVRFIYDMYIEGYSLIEIALKLNSMGFKTKKNKPFSKTSIYDIIGNEKYIGKYIFNKGTKSNHDGIRADAIILEDAIPQIICKEVFEKAMNKRTKRKNAENTAKNFYLLSGLIKCECGGSYVGTTIKKQKNGNTYVSGYYRCSNHNKLGKCQMPSLKQELIENKVIKMLTEELLNAETRENIVKAVNAQYIEAQKDCKNDVEILKENLSSINQEINNIVNAVAKGYATDSLLKRLEEIENTKKNIEDEINFKDNIATHNYITSEKIEEVLKKDLSELKDKSKEKLKILVQKYIKKIEVKTTEVLIYLDFGESSPKKLVAKM

SEQ ID NO: 24567 - protein, 534 aa, synthetic construct
MARAAKQDNNSEIIDGVIYARYSEGPNQTEASIEGQVRECKEYAKRNGIRIINVYSDSKHTGTNDNRAEFQKMLRDSRRGGFSVVVVWKIDRFGRNRAEMAQNKALLKLQGVKVVSAKEYIPDSPEGIILESVLEGMAEYYSANLSQNIKRGMKENALHCKSNGSGKSLGYIVDKDGYFEIEPNEATIVKTIFQKYDEGMKIADIWREIVASGAKTKRGKDFTQYGISRVLSNRAYIGEYRYGDIVTPGGMPRIIDDDLFNRVQERRALSKKAPASRRSNSDVDFLLTGKVFCGHCKGTMRGMSGTSKTGRKFYYYACHDKIFKHNKCTKKNVKKEWLETEVTRITRDDILNKETIEFIADRVVEIQRQEQEDKSMLRYYEQQLRDTQSAINNIMKAIEAGIITSSTKSRLFELEEQKSIIEGEIEREKIITPVIEKEQVIFSLERFFGGDINNKEYQRNIIDMFVNKVILYDNKIIITYNISSQNEISVDVVEQAAFAALDECSSKLSLPPPATRRGGHFPSRLFCKHTKSPL

SEQ ID NO: 24568 - protein, 530 aa, synthetic construct
MEQYLIYLRKSRSDLEAEAHGEGETLSRHEHTLLELAKRQHLNVTDIYREVVSGDTIAARPMMQRVLSEVEQGVWSGVLVMEVERLARGDTIDQGIIAQTFKFSGTKIITPIKTYDPDNEFDEEYFEFGLFMSRREYKIINRRLQRGRLASAKEGKWPSGLAPFGYRRVKLKNEKGCSLEPIEEQAAIVRMIFDLYTVGLQDEDGSARPLSLGSIATRLNDMHIPSPSGSQWARITIRGIIKNPTYIGMVRWGSRETKKKVVDGKVVSVRGPADPEKECVFKGIHPPLIPKETFELANDKLTRSENTSTHKEKVVRNPLAGLLVCSECGRQMMRMINPVHPDMPVVRCPRRGCPNCSSYLPIVEERVIQGLSEWMKGYELEWSSAAASSSVSSVGVREKALASAEAELRKLQQQLERTHDFLEQGIYDTDTFLSRSRMLSDKIAAAKDSVTRCSRELTEEKLRETSRRDIIPKVKNLLDVYPLLETAEEKNALLKEVLEKVVYQKLNEKRKKSPDGFTIEIYPRIPKSEK

SEQ ID NO: 24569 - protein, 478 aa, synthetic construct
MNKVAIYVRVSTTNQAEEGYSIEEQIDKLKAYCMIKDWSVYDVYVDAGFSGSNIKRPAIQKLIKDTKRKVFDTVLVYKLDRLSRSQKDTLYLIEDVFLENKIDFVSLLENFDTSTAFGKAMVGILSVFAQLDREQIKERMQLGKLGRAKSGKPMMWAKVAYGYTYHIGTGKMTVNQSEAIIVKEVFSSYLNGRSITKLRDDLNEKYPKTPAWSYRTIRQMLDNPVYCGYNKYKGQVYPGNHAPIISKEIYNQVQDELKIRQQKAYEHNNNYRPFQSKYMLSGIAQCGYCKAPLKITLGTIRKDGTRFKRYQCVQRTPRKTKGATVYNNNEKCNSGFYEKDDIEAYVLESISKLQTDSNCIDELFNDEPEKLDRDALNKEIETLSNKISRLNDLYINNLITLDDLKTKTDTLQSKIDILKEKLEKDPALERQKNKQKMLKKLDTKDIFKMDYEEQKMLVRALINKVQVTADSIKILWKI

SEQ ID NO: 24570 - protein, 539 aa, synthetic construct
MKKTKNSVQRAVIYARYSCSNQTEQSIEGQLADCEKFAEKYNYYIVDTYIDRAMSATTDRRPQFQQMIADSATGGFDVIIVWKLDRFARNRYDSAVNKQKLNSNGVKVVSVMEHIEDTPEGALMESVLEGFAEYFSKDLSQKVSRGMRETALKFKATGLIPYGYKKTSDNICVPDEHTAPVVKKIFEMYAGGMINKDICDWLNSHGYRTSNGNLFKNQYLRKILNRRRYTGSYTYGDLELHDENQRIISDELFDCVQIQLQAKKRTGRIAREQYILVGKLFCGYCRNPIRGESGRNHQNRIYTYYKCSVNKTGGKCPKTTVQRDIIENSTIKFILNNFLNDEIINSVVDTIQASETAENNSAELIALRTQIEDTDRKINNLLSAIENGVFTPSTKQRLNDLENAKEKLKYELIVKQSEKNNFNATAFKRFLKNIDVDDFKTTEQRQKLINLVLYREYLWNDKVLYIFNLTPSKPNDSVDIDSYVDALIASTGSTSSTSPTDGVPQVAISELLFGYFFIMGFFPFHKHFALSCFALYIYR

SEQ ID NO: 24571 - protein, 488 aa, synthetic construct
MEKTRAVAYIRVSTERDAQLHSYEFQEHYWQSAFEDDPNTDLIGIYADKGISGHSVQKRPKFLVMMQDAREHKFDKIYTKSVSRFARNTTQLLEAVRELRDLGIEVVFENENIHTFQPTSEIFLTIAATIAENDLEVDSARQRWSIQHRCENGWISVGSGLFGLKLTADNELEIVPEEAAVIRYIYESYVDGGIGSKKIADTLNAAGVQSRNGYPWDAKHIIGLLRNEKYKGDVIMGKSVRHFGEYHKNPNAEYAPRYYMEGTHEAIVDRDTWEAAQRILEERSRNHCRTRIAHSFTGMIECGCCGKNYLHKVNNSQCKWQTDIWACRTYLRDGKKACGNSRIKDTVLKEKFISAYNEFIERRPHGDSMVALQEVLEDLRQQEQELAELMMQRLIPKAAYEEERKSVKMQITDISDKISERRAKRVPESEYVSITEFSEEKAKRFLSKVVVTMFTVTFVFYNGAKITRTYDNGQPGNKVGWNKKKEES

SEQ ID NO: 24572 - protein, 540 aa, synthetic construct
MATATRRVVRTMPQMFIDVTDNQSERLQVAAYARVSTEKEEQEDSFERQVEHYKQLIYSKPEWQFVDVYADPGISGTRAEKRPDFLRMIEDCRAGKIQKVLVKSISRFARNTVDALQYIRELKDLGISVYFESENIDTLTPGGEVLLTILAAMAEQESRTISSNIKWAWQRKFQKGDVILNTGLMLGYRKIGKDDEGHDVYEINEEEAEIVRRIYREFIAGYSITQIAKRLQADGVKTKLGKENWRHNVIESILTNEKYTGNALLGKTFKPDVLTKYRQKNDGKKAPIYYVEGSHPAIIEKGLFDLAQQEMQRRRDANDNKVGGGRYSSRYPFSGMLVCGICGSKLRRQVRTMGSGKRTASWGCCNRINNGRAECDSHHVNEEVLEATYLTAMRRLVDSAEEVVEVVRDGTELALEPENKAAMERIDEETIQLQEAALALHKAKQRMEIGAVEYASRVKEYSERMKELEAERNELQGTAAKYAEVRMWLDTFIEQTMQSDTLTTVDGTTMKMLVDRIHVRNDGIVVEFKCGVAIEQEYVK

SEQ ID NO: 24573 - protein, 538 aa, synthetic construct
MEQKKRVNCLYRVSTIGQVEKDDIPMQRQYCREFIASHPDWVLQNEFYEKGVSGFKKSAKERDAMQELQQEAVAGSFDILLVYMFDRLGRRDDETPFVVEWFVRNGVEVWSAVEGQQRFDNHVDKLLNYIRYWQASGESIKTSVRVKTRMEQLTKDGCFTGGIVPFGYKLQKQGRINKKNQEVNDFVIDEDAAEIVRFIFYKYVNEGYGAQRISHYLLENGIRRADGSMIPNTTIVRMIKNKLYMGVISNGNAESEIIPELQIVDEATFRRAQELMEKRTTHHADTPLNLRGSSLLVGNIFCGHCKNRLTLTTSGKKYIRKDGTVRNQVKSRYQCHFKARHPDLCDGQSGYGVIKLDEIVDALVRYQLSRIRVSAKDSLIAEQHEKAAALARSRYKMSAMRLEEKQKELSDYEAETINVIRGKSRLNVDLLNSLVAKCKEEIAELSQEVDAQKADMEHQLESAAQEQAEFEKLESWADLYDNCTFEAKKMIVSQLIKAVYVYRDYRLEVEFRVSFDDFRRLCVGCEPNGGRIATVESV

SEQ ID NO: 24574 - protein, 534 aa, synthetic construct
MGRQTAISSSLALDKTPLMITIPASGPIRTRKLRVAAYARVSSNSDDQLHSFAAQYAYYTELIISNPEWEFVDVYADQGITGTSAEKRDDFQRLLKDCRRGRIDKILTKSTMRFARNTSESLMAVRELRNLGIGVCFEEQGIDTAQMSGELLTAIFSAMAQKESDTISENIRWSIRNRMENGTFVTTSIPFGYIRDEAGEIKVDSQRAGYVREIFEAFLSGKNTKEIAEEMKRRQETEKPLQSYQWTVHAIARILKNEKYTGNSLWQKSFKTRTLPHRYKVNKGELAQYYAKDTHPPIISCSVYDKAQELLRIRKEQFHPQGMMRSHLSGCIECGCCGSAFRKIQHGGKVYHACRVHTVDRKKCPTKQIPESEFRDAFLRLYYKLRHRGIPVLSQLLTDLQTAQNRKLLWSLDIVELNKQIADIIRQERLLAQLKQQGLVDPDVYITRSNTLAEQLRTAKLEKERLLESEEDQVIRQTQVLLDTLESGPEFLEAFDEELFSELVEKIIVESNECLRFRLINGLELTEPIERTVR

SEQ ID NO: 24575 - protein, 549 aa, synthetic construct
MTETAPKVIVIPAKKETPQEQAQKRHLRVAAYCRVSTNSKEQLTSYENQLAYYTEKIMKNPDWTMVKVFADEGKTGTSTCKRKEFLQMIRMCRQGKIDMILAKAVSRFARNTADTINYTRELRSLGIPVIFEEQNINSIYPESEFLIAIHGAFAQSESENISANVRWGKRRSMKAGHVTMQYKWMLGFEKGPDGKPIINEEEAETVRFIYQRYLAGDTLRAIKSKLEAQGALNAAGKQEWTIKNLLSILSNEKYCGDALLQKTFIQDCISKKVIQNNGQLPKYLIQDHHEGIVSRDVFYAVQLEIARRRAQTGGTSKSAPTGRSKYSGKYILTNLMFCGHCGTGYRRCVWNKGGVKRAVWRCGSRLDYGAKYCKHSETLEEAPLQQAILNAINSVMDNRDSLEAQLMGAMEQELAPIPGETMSLADIDRTLEELEKQFNSLLAEASAAGGTEDYAERFRMISNTMADLKEHKVRIKQVYLENELVNQRLKAASAAMSAYSAELTEWDQSVVYQLVEKVTVLAKNKIKVTLRDGSEVEQEIEQVDWRKAS

SEQ ID NO: 24576 - protein, 432 aa, synthetic construct
METKITKIDALPKLEKKLRVAAYARVSSEKDAMLQSLSNQVSYYNNLIRSTEGWSFVGVYADEALSGTKDTRDEFQRLIKDAVEGEIDLILVKSISRFARNTVTMLETVRKLKAIGVDVYFEEQNLHSLSGEGEMVLTFLASFAQEEARSVSENQKWKVRKTFESGVQWSATKSYGYRVINKKYVVVPEEAKIVKYIFDLYINGLGFQAISNKLQSENIKPFYAKAWNKTSVKNIISNINYTGDLLLQKGYSENFLTKKYVANKGAKDQFLVEDDHEAIISKEIFNKAMDLKRGRAKYFKASRETQIRYELSGKIKCGICGKSFNHRTTKYSQKWICITYNEKGKSVCPSKCVPDAELKRITDKVGLDNIDWVEVFPNNELKIYLRDGTNVIEKWNDYSRKNSWTDEMKAKAREQAIKKSLVNYLKGGNING

SEQ ID NO: 24577 - protein, 537 aa, synthetic construct
MAKRKFNKGGEVRLVAYYRYSGGSGQTEQSIEGQRRDCETYARLHNMTIQKEYVDRHISGKTDDRAAFQQMITDSDKGAFDMVICWKTDRFARNRYDSAVYKKRLRDNGVEIVYAAESNIAGAEGIIIEGVMEALAEYYSAELAEKMRRGMRESALKGQAISRCRALGLKTDEHKRFVIDEKTAPTVRFIFEHYAAGESATSIVDKLNAKGLRTSQGNPFNKSSIPRIIQNEAYRGVYVSKSYDVRIEGAIPAIIDDELWERAQTMLKLNRQLKAKNEPKADYILSGKLYCSCGSLMRGMSGHSATGEVYRYYTCPNKNCHLRNIPKDDLEGKVMQSISDHLLQPEAMEALAEAMVEVQKADAEKPNAERVAIEQSLADVRRRSKNILDAIENGTANAQLCARLDDLSEQERTLNFQLSALEKEKPVVFTKEQYLFLLEQFLVEPSERTPEYGRRLVNTFVTSMVVSDRELVINFNVSDETVNKNKKTSQTNLQKESSSGMRLVHLAHQQANYSLYAASGYFSLVEHQFSARLWRTA

SEQ ID NO: 24578 - protein, 581 aa, synthetic construct
MAYAMKVPATSADNRIVAIYVRVSTGYQVDKDSLPFQKKELKAYCKHILHVDMSRVEIFEDAGRSGKNTKRPAYERMMQKVRAGLVSHVLVYKIDRISRNLVDFSLMYDDFKYNRVTFVSLNEQFDTSSAIGEAVLKIILVFAELERKLTSERVKDIMIGRANEGKWNGARVPYGWDWDSSAGWPVHSEKEAPFGRAMYEMYLEVKSTGKIRDYNNAHNIPTKRGGEWTSKTVGDFLRNPMNKGDYRYNYRESARGRKKPVDEVVYLEGVFEPLVDPEIWEKVNKIIDINRDQRNMGGSHPVEKNCNVFAGLIQCGSCGSGYLVGKKDRRRKNGFTPSMYYCGAKTRAIHCQNLNVSDVKIGPFVINYISAMVRVSNERRKIKTPEDLEEMLLSDKAVFADIMGLSSDSLNNTFELLTGKSATGGALWRADLVDQEGVAADPAEIESLKDQIRKYERAKERLEDAYYFSDDGMSEKEYLEKKNRFDSGRVAAENKLKELTETHIASGVDESAFMKSASAFLLTHKIRAGSHIVYSDLAGMVEEESIKEFFNLVLDHITVKDRRVTEIVFANGLSHKFIYRD

SEQ ID NO: 24579 - protein, 546 aa, synthetic construct
MEETIKAVGYARFSSSMQREESITAQKRYMMMYAKRNNMEVIDWYCDEAKSAKTVNRPAFQKMINDAKNNPEFKAVLVHKTDRFSRNLSDSIQYKKLLEEYGVQVIFVNERFENNPESHLLYHIMGSVNQFYNENLAREVMKGLKENAYQCKFTGGRPPLGYDVDKDLKLVINEKEAEAVRLIFEMSAEGYGYGETIDKLNILGYKTKKGLPFVKNSLYEILRNEKYKGTYIFNRSCSANSLNKRNNHRRKPEEEIIRIENGCPAIVSSGLWHRANAVKKATRSSYTNAKNTYLLTGLIHCGECGGKFHGNVRYNKNNTNLVYRCSSKKNKRKCESKEIRCEYLDSFVIDKFVEFFFNDDNIKVITKQLNEQYNKSCISDLEYNEAKSTLKILEKSRNNLVEAIAKTGINDIMSDKIKEYEEQIKKTAEFIQKYEKQKIDRVITEDEVREQINHLKDYFYNPKNLIRTKYVLSQYIDRIDISNENVQVQFKVSMSPSDNTDGDCFCVHTEMIKRKYLFDYVCEKVDFEQWNIEKLNKSETEHRKGA

SEQ ID NO: 24580 - protein, 522 aa, synthetic construct
MLEKNIIIYLRKSRSDDPGMSVEDVLAKHELQLQEYAVSEYGEQIPEDHIFREVVSGETIADRPVMKQVMRLLEAGNITAVLVIEPQRLSRGDLEDCGRIINIFRYTHTLVATPPKTYDLTNEYDRKFFEMELMRGNDYLEYTKKILNRGRIASVKKGNFIGSVAAYGYKKVKIGTGKDACHTLEIIPEQADAVKLMFKLYLEGKGFTNIAKTLDELKIKPLRSETWSPAAISDMLENPVYVGKIRWNYFKTVKKIEDGQIVKSRPINQDPSDWFLVQGKHPAIIDQATFDVDAAQERRGRTPKIKRFNELKNPFAGLLYCQCGKAMSLKIYNQKKGKCEPTKLMLCNKQSWCKTKSVKYDTFLERIVETLESTIADFEIKLKKDNGDAAQLHKNIVYNLETNLKKLKDKDIRQKDAYEDGIYTKEEYASRNAKLQEQISETTKALCQAKDSVPPTINYKEKIARFTDCLNALNDVSVPAAEKNMLLKACFEKIIYHNDMPSISGHGRWIENKFKLEIFLRL

SEQ ID NO: 24581 - protein, 434 aa, synthetic construct
MKKTIVNIAPAVAETPRTKRVAAYARVSCGKDTMLHSLAAQIDYYRDYIMMNPEWRFAGVYADESKTGTKDNREQFQLLLTECRSGNIDMVITKSISRFARNTVTLLETVRELKSLGIDVFFEEQNIYTMSAEGEVMLTLLASFAQAESLSCSDNCKWRIRKGFEEGRASTCTMLGYRLVDGEITLVEEEAETAKRIFDLYLVGYGLQKIANTLNEEGLYSIFGNEWHPTTVRKVLTNEKYCGDLLLQKVYRENHLTKRKCYNTGELPQYFVEDDHPAVVTRQIFMAVQDELKRRAKEKTQPVGSKSSFTGKIRCSCCGKNYRRKTTPYNIVWCCSTYNSKGKKYCPDSKVIPEETLKRAAAEILKTDGFSDEAFETQICTIEAHPCNLLRFIFTDDSTTDYVWKDRSRSESWTDEMKAAAGRKTKERNANHGK

SEQ ID NO: 24582 - protein, 548 aa, synthetic construct
MANKTVKKIEATKPTLSAQYSTFTRKRKVAAYARVSTAKEEQENSFDAQVSYYTQKIQANPEWVFVEVYSDEGITGTNTKKRDGFNRMIEDALAGKIDLILTKSVSRFARNTVDSLVTIRQLKEKGVEVFFEKENIYTLDAKGELLLTIMSSLAQEEARSISENTSWGRRKSFADGKVSLGYSNFLGYDKGPDGELVINEEQAKIVRRIYAEFLAGKTPGGIAKGLTADGIETPGHKKVWQASTVLNILKNEKYYGAAILQKEITVSYLTKEKRPNTGELPMYYIEKDHEPIVSPETYQMVQEEMRRRKEAGSNMQCVSIFSSRIICGDCGGYYGRKIWHSSTKYTAWHWHCNAKFQKRKYCETPTLKEESLEETFVEVFNGLIADRDEIMENYRLCIDTVTDDSEYRRQLEDLNNGCGEVQTLIRSLLMTYSRQDTADDIHEKLKEYEDRLDTMARLKQELDLKIAACAAKRVQITGFLNELMKHDAPLAKFDPLVWQAVINYATVNRDCTITFTFRDGTEKTVPIKNGVRPYTKRNKPQEVDGNDG

SEQ ID NO: 24583 - protein, 490 aa, synthetic construct
MTDKNLLVITPHRKEPGKQRIAAYCRVSSRSDEQLNSLTNQINFYRSLFENDDTVIFVGIYAEEGLSGTQAESRPQFMKMIEDCRSGLIDCIWTKSVSRFGRNTVDTLIYTRELRSLGIDVFFEKENIHSTESSGELMLTLMAAFAESESETMSENIKWGKRRRYEQGITGSITLNGMYGFRQNKGIVTIVENEAELVRQIYKDFIDGYSYGEIADRLIAEGVPTRMPGASWAKTTVQHIIRNEKYCGDCLFQKAFIANPITHQQVRNNGELPKYLVEDCLPAIVDKETWKLAQAVAARHTSHRQAPNERYPFTGKLFCGVCGKPYYYYHYTTTNKQPLAAYRCMSRKTQSAVEVPGQTYTPPHKATFNLNASPELIAYRERYCKPPKERPMLCTDIRISIDLPQKAFCRAWNLIVAKKLRYQATLRSTVDNAEDILVRYRAEEMCLLIDEIGKINEFSYPLMLKTLNRVVVNANGKLTFIFQSGIKITV

SEQ ID NO: 24584 - protein, 527 aa, synthetic construct
MYELTQSMESLSVDEIIVYLRKSRSDSPEMSVEDVLKKHEEMIQDYANTNFGSPIPEKNIYREVVSGETIDSRPQVKIVLQKIESPQIKAVLIVEPQRLSRGDLEDCGRLINILRYTNTIVLTLTHSFNLQEEYERKFFEMEITRGNDYLEYTKRILRRGRESSAAKGHYIGSVDPYGYRKIVIKKDGVNCHTLEIVPEEANVVRLIHELYAYTPGGIGFTNIAHKLDSMNLKPKKAAHWTPAIISSILCNPLYLGLIRWDTRKVVKYINDGRLEKSRPRSSDAKYYKGLHEPIISQDLYDACMARRGTNPSLRRNKELCNPFAGLLYCGTCDHAMSLKIYKNPNSVSQIMLCNHQSYCHTKSVLYSAFLERFISSMENTIHDFELALLADDGNAQAVNQSIVANLETRLKKLQEKDMRQKDAYEDGIYSKEEFLERNIKTQQEIASTITALTAAKETKENYVDYGEKIRRFRDCINALNDPELSATEKNQFLKSCVSKIIYYNNMESKAGVGRYVENVFSLEIQYI

SEQ ID NO: 24585 - protein, 505 aa, synthetic construct
MSNAAIYARYSSGHQREESIEGQIRECTDFAKRNGLTIVEHYIDRAISAKTDDRPSFQQMVADSSKKTFDTIIVYTLDRFARNRYDSAVYKAKLKRNGVRVLSAKENITSDPSGIILESVLEGMAEYYSVELAQKVKRGMTENALACRWASGRIPFGYTIDADKHLHPDPALVPIVQEAFEMYAAGAKIVDIARKINSYHVVTGMGNKFGRSSFDRMIRSETYIGVFKWNDIRKENAVPPIITPELFYKCQARYNARNKKNVARPSAIYLLSGKLRCGCCGGSMCGMSGKSRNGTMHYYYSCYSTRRRTSHCDIGNIRRDEIEHIIAAHAASILKKPINLDIIANQALKTNNSVKNYRLESLIQQEKDLTQKLENCMKAIDQGLVSITLMDRIKQYEADLQSVKNDISLEKIKSNPIQVTKEHIIFFLEKFALLEGEEFKDRIISTMVRDIVIKKEKDGNYLVTVQYNYANSKELPNEESYSVPESIGSQDVELVETSGIEPLTS

SEQ ID NO: 24586 - protein, 434 aa, synthetic construct
MERVVERVDALIPAQPKALRVCAYARVSTGKDAMLHSLSAQVSYYSKMIQSHNGWMYCGVYSDEAVTGTKRERAGFQHMIEECRQGNIDLVITKSISRFARNTVTLLQTVRELKNLGVDVFFEEQHIHTMSADGELMMTILASYAQEESLSASENQKWRVRKAFENGEIINLRFLFGYDITPDGIRANEVDAAIVREIFARFNGGESMSSICRDLDARGHKGVLGGTWCAERMRNTLSNEKYLGNALLQKRYRNNHIEKKLLPNRGELPMYYAEGTHEPIIDQATFDKAQERLRMLAQQAANRKKPTRSVFSGLIHCGLCGNTYKRVTYRKKHYWNCTTFQTKGKSECAAKRIPEETLEVLTCEVLGAVSFDPDMVRSKITAIRAEKSNMVVFCMDDGSEIVKRWKDRSRAESWTPEMKEKARQRALQARRKKK

SEQ ID NO: 24587 - protein, 529 aa, synthetic construct
MSRTAARSVTVIPPTINPLTHLSKVAVQKRRVAGYARVSTDSDEQFTSYEAQVDYYTQYIKRNPEWEFVKVYTDEGISGTNTKHRIGFNEMIADAMSGKIDLIVTKSVSRFARNTVDSLVTIRKLKEKGVEVYFEKENIYTFDGKGELLLTIMSSLAQEESRSISENVTWGQRKRFADGKVNLPYKQFLGYRKGADGFPEVVPEEAIVVHRIYTRFMEGLTPGAIAKELTADGIPTPSRKQRWQTSTVESILQNEKYKGAALLQKCFTVDFLTKKRKVNEGEVPQYYVEHSHEPIITPEEFDKVQTELARRKQISRQYSGKSIFSSRIVCGDCGSYFGSKVWNSTSKYRRVIWQCNSKFKGEHKCETPHLDEETIKARFVAALNAIIESKDNILEDCRLMQATLTDCTGIDTEIKSLLEEIDVVTELTKRCIAENSQTAQNQEEYAARYNGFVERYEKAKAQLEQLRATKAAREAQAEAIGAFMFEVQELDALTEFDEKLWLTIIDTITVHADGRMTFKFRGGKTLTSY

SEQ ID NO: 24588 - protein, 464 aa, synthetic construct
MARSVTVIPARSQKVQTGHKAVQEKKIRVAAYCRVSTDQEDQLHSFEAQVEYYTKYINEHENYEMAGIYADEGISGTNTKKREQFKKMIADCEGGKIDLVITKSISRFARNTQDCLAYSRKLKNLGIGIIFEKENINTLDSTGELLFTILSSLAQDESRNISENCKWGIRTKFKNGEMHLNTFKFLGYDKDENGKLVINKEQAKTVRRIYRDFLIGINPAQIAKELTEEKVPGCLGQTKWYPSTVTGILKQEKHMGDALLQKTYTADFLTKRQVRNNGEIAQVYVKDSHKGIIDKQTWNAVQEEFDRREKFMQRHGTDRYSYGADCMPFCEKVFCGECKSLFTRHSWKSRGIIQWQCKNHRKDGKVVCTNAYVDNADLEKGFVKAFNKLVTDREKYMEIWQQMKSDGTPLEKIRAGQMMEAVGNEPLTRFVPEIAQLVLCEVTVLGAKKYEFFFLEGSRVKVSV

SEQ ID NO: 24589 - protein, 453 aa, synthetic construct
MKCVAYIRVSTEKQAEEGNGLDSQIRDIKNHCRKNGMIIEDWYVDDGYTGSNMDRPELQRLVNDCTRKRVKCVVSFKLDRLSRSMIDGLYLIERVFQPNNVRFECVHDSVSYDSPMEQAYTQMMAVFAQLDKNTMMLRMRGGMLERVKQGYWMGGGNLPYCYSYDKNSGILVPIPEKADKAQKALDLFLDGYSDVKIKNMLGFKSEPVVKSILTSVVNIGKIPYKGNIYQGRHTPIFDQEKFELAQEMRKTRSKSKICCQTEPNLLTGLCYCGVCGCKMRYQKWTHGKHKIYCCSRSKDLSYIPNYDENCDNSIEWSDEIEEQVEKEIIRISLDLSSYKPKEKETKLDIMRFQLKKDKKRLKRLYALYADGNDTVIEMIKDLESQIEKTKKNISDEEKNNANSQKKEFVYENIKKIADVWKYTDKKHKNMILKTIIDKIVIVNGNIEIQLKKF

SEQ ID NO: 24590 - protein, 536 aa, synthetic construct
MQTGKITALYVRFSYDDGIDAESGSIEHQKSLLRSYAESNGFTDLSYYADDGYTGTNFNRPDFQRMLGDIHKGLVSTVIVKDMSRLGRNYLMVGQYVEIEFPKHNVRFIAISDNVDSAKGMNDLLPIHNLMNEWYSRDISKKVRAMIRQKGNSGQSIASKLPYGYYNTPENKQTWLIDESAANVVRRIFDLYLNQSFGMYQIARILKAEGIPRPTYHRRMAKGIKVEADDLCVWSASVVRDILQHREYIGDTVNFRTEITSYKNKKVIHNSDDKLKIFPNTHPAIIDKETFQKVQDKISKEIRHTRNVHSYLFADYLYCMDCHSRMHGRQCYLKGGRTLSAYECSTYRKSKGCCFHGVPEMYLQAEVLVKIQNVLAFAKSNPAEFRQNISKALKEQSDGSKAVIQEELDKAQARTAEIDKYIQGLFEAKVRGEIDGSLFASLKKTYDEEKEQLNKLIIDLITKLSRENEADEKIQLLYAAIRKYDAVWELTPEVLTDFIEKIEVGQVSAENKKISFELRDNQISVFFWGVGIIDFM

SEQ ID NO: 24591 - protein, 700 aa, synthetic construct
MDSNAFLNDLMSKMKLPEAKGKKKAEQSESVAQILAAMQKVKTEKKKPPVTSYAPTKEMPVNELESMEEFSQLASDVMQECRPAIPAVKTSISEKTVRVAAYIRVSSTNPAQEYSYKMQERYFMSLLAGNAGWTSAGIYSDHGISATSREGRTGFNRLLRHCKQGKIDRVICKSISRFARNTQDFLVALRTLKENNVTILFEREAMDTADAYSEFILTTLAAIAQEESRSISANIAWSNQKRFPAGNVCNKDIYGYEFRKGEYLVNENGYRYRAVFIIPEEAEIVRMVFRLFTKEELGFTQIAQKLDALHIPPPNSGCRQRQKRKPTVLPAGALKEEDKRGWTATDVRYMIANVRYCGSVLCQKTYTDHRNGHKQKVNKGEKPKYLIRNHHPAIISEELWQEAQEVWKAYTAKYRGIEKGRNERNYSKLLLCGECGRYFQGHSTTRTTIWRCATKLAQQGQKRCRMEPIYEEQIQTLLCKAFAEKFKLGEKMDAEVHEVMQMISKAPIDNARNQALKNLTEKLREIHDFDHMEQEGDFLKRQLSAVNYSIRDVHQHIRDIQAEKEALKVRCEVLGEPRDKEAVTELENRLLNEEEQLEKLEHEAQQQAEQVRYMEDYWKKLEQTHEIREKTLQWLDSLAGGTQMFLDEAVGTYVKAFVLSVTIFSPKHFRIHWFDDTCTEVECDSVFEGYQQPGMIRRKY

SEQ ID NO: 24592 - protein, 502 aa, synthetic construct
MEIQIREGNSRQKQKLKVCAYCRVSTDADEQENSLENQIRHYKEVITSNPDYEYAGVYSDFAISGFKEKRLGLQKMLADARKGKIDLILTKSVSRFARNTSIVLEATRKLKELNVGVFFELQNINTLSGEGELMLTILAAFAQAESESGSVGAKMVYQRKYEAGIPVQYLERSFGFKKDERGVYIADEEEAAWVRKIYEMAADGYTPAVIKRYLNENGVKTVGGAEWIDSTVFRLIENEIYKGDYIMHKHFVNEERKLVRNRGEVDAWYIEDDHEAIVSPELWQRAQDALETKRDYLAEGSVIEEFTEENYPYMNRIYCARCGHPLYRRIYSNGNRLNWGCSGTKRYGRSFCEGINIPDGVLRGAWHFDENMYIGEKQTDKGKKEFTYLKEASWKRRHKKKEPEPIPENTETEYPYREKIFCGSCGSRLVRHVNTKNHKVIWVCNGRKRKGKDFCDGTRVPDTIIKGWGEIKKDIYIQRKDDKNGKKRYSYTSKKPKGADRA

SEQ ID NO: 24593 - protein, 464 aa, synthetic construct
MARSVTVIPARSQKVRTGHKAVQEKKIRVAAYCRVSTDQEDQLHSFEAQVEYYTKYINEHENYEMAGIYADEGISGTNTKKREQFKKMIADCEDGKIDLVITKSISRFARNTQDCLAYSRKLKNLGIGIIFEKENINTLDSTGELLFTILSSLAQDESRNISENCKWGIRTKFKNGEMHLNTFKFLGYDKDENGKLVINKEQAKTVRRIYRDFLIGINPAQIAKELTEEKVPGCLGQTKWYPSTVTGILKQEKHMGDALLQKTYTADFLTKRQVRNNGEIAQVYVKDSHKGIIDKQTWNAVQEEFDRREKFMESHGTDRYSYGADCMPFCEKVFCGECKSLFTRHSWKSRGIVQWQCKNHRKDGKVACTNTYVDNADLENGFVKAFNRLVTDRDKHMERWQQMKSDGTPLEKIRAGQMMEAVGNEPLTRFVPEIAQLVLCEVTVLGAKKYEFFFLEGSRVKVSV

SEQ ID NO: 24594 - protein, 580 aa, synthetic construct
MVRRKTALRGVSASTRITKVAIYIRVSTIHQVDKDSIPMQKKDLIAYCQLILGTDNYEIFEDAGYSGKNTDRPAFQDMMGRIRKGEFTHVLVWKIDRISRNLLDFAEMYEELQSLRVTFVSKNEQFDTSTAIGEAMLKIVLVFAELERNMTSERVTATMISRANNGQWNGGRIPFGYSYDSGTSTFSIREDEAVVCRRLKDLYLDNKSLVYTARALNADGYKTRAGADWTPTAVWIIASSPFYAGIYRYNRYKGTENRTLNPEEEWVMIPEHHPAIFTLEEHEAMKSSLKTNARYVDNPVGKPHATANIHIFQGIAYCGKCGNKMVSTPGKKHADGYRPSNYSCPLHRRSKKCDNATVNDMIVGEFAINYILNMLNAKKTFSNIDTPEELQRHLLTGSTFSDISSIEEDGLNDFFNLLSRYGSDNSYVFAIKTPRRKKASVNPELAALRKEKEKQERALQRLQDLYLYSDKSMSEKDFILRKSEISDRLKNINAQLGLITQNPDSLLSDEEFIKQASHLLIQKELKGRKYIYYKNLATSVDPEILRTYMETILDSMYIIDGRISSIVFKNGLTHKFIYKN

SEQ ID NO: 24595 - protein, 588 aa, synthetic construct
MRIVNKIEAKTPQIPRRKRVAAYARVSMESERLQHSLSAQVSFYSSLIQSNPAWEYVGVYADNGITGTKAEAREEFNRMIADCEAGKIDIVLTKSISRFARNTVDLLNTVRRLKELGVSVQFEKERIDSLTEDGELMLTLLASFAQEEIRSLSDNVKWGTRKRFEKGIPNGRFQIYGYRWDGDHLVIHEEEAKIVRLIYDNYMNGLSAETTEKQLAEMGVKSYKGQHFGNTSIRQILGNITYTGNLLFQKEYVVDPISKKSRINRGELPQYFVENTHEAIIPMEVYQAVQAEKARRRELGALANWSINTSCFTSKIKCGRCGKSYQRSNRKGRKDPNANYTIWVCGTRRKTGNAHCQNKDIPEQMLKDACAEVMGLDTFDEIIFSEQIDHIEIPAPNEMIFYFKDGRIVPHHWESTMRKDCWTDERRAAKGRYVQEHQLGPNTSCFTSRIRCDSCGENYRRQRSRHKDGSFDSVWRCASGGKCQSPSIKEEALKNLCATAMGLEAFDDTVFREQIVCIHITAPYQLSIRFFDGHTFETAWENKRKMPRYTEERKQHMREVMIQRWREKRGESNDNTSNDKPIHGNADQ

SEQ ID NO: 24596 - protein, 523 aa, synthetic construct
MAKVTTIPATISRFTATPINEKKKRRTAAYARVSTDSEEQLTSYSAQVDYYTNYIKSRDDWDFVSVYTDEGITGTNTKHREGFKRMVADALAGKIDLIVTKSVSRFARNTVDSLTTVRQLKEKGVEIYFEKENIWTLDSKGELLITIMSSLAQEESRSISENCTWGQRKRFADGKVTVPFKRFLGYDRGPDGNLVLNKDEAVIIRRIYSMFLQGMTPHGIAARLTADGIKSPGGKDKWNAGAVRSILTNEKYKGDALLQKSYTVDFLTKKKKVNEGEIPQYYVEGNHEAIIQPELFELVQQEMDRRKTSGGRHSGVHLFSGKIRCGQCGEWYGSKVWHSNSKYRRIIWQCNHKYDGEEKCSTPHLTEDEIKAMFITAANKLIGKKAAILSPLRASLDIAFGTSALEAETEKLQEELMVASDLIQKCIYENAHVALDQTEYQKRYDGLTARFNAAKARYEALDETIRSKQSRRAAIEAFLATLAEANLVDTFDTALWCGLVDFVTVHSTDDVRITFRNGMEIKA

SEQ ID NO: 24597 - protein, 526 aa, synthetic construct
MPYCIYLRKSRADAEAELLGEGETLARHEKTLLALAKKLKLPITKIYKEILSGETIAGRPVMQQLLQDVEAGIWQGVLVMEVERLGRGNTLDQGIILNAFKYSSTKIITPMKSYDPNDEFDEEYFEFSQFMSRREYKTILRRMQRGREASVKEGKFAGSIAPFGYRRVKLPQEKGFTLEVDDTEAAAVKLAYELYAYGDPQPDGTFADIGRATIAKRLDQMGIRNRKGGTWATASVTRMLQNPVYIGKVHWNRRPEKKHTENGKIKKTRPLAENYLLIDGLHEPIISEELWNLAQAKMKQHYRPTGVNGIIQNPLAGLVHCSYCGNAMQRRPYLKTGQPASLICHTHFCPQISSPLYMVEGKILEALSLWMKQHEPTWEEESSADVFSTKIMALEHAIAEMEQELQGLQFQFEKIFEFLETGIYTPEVFTARNKTLSEKMAEIRSAIEETQAELSKLKAARKNQVSMIPKIKNILDTYETLTPAEKNKLLKEVLDHVEYHKKIKGKKNVPADNFEIILFPKISPEN

SEQ ID NO: 24598 - protein, 520 aa, synthetic construct
MLEKNIIIYLRKSRSDDPGMSVEDVLAKHELQLQEYAVSEYGEQIPEDHIFREVVSGETIADRPVMKQVMRLLEAGNITAVLVIEPQRLSRGDLEDCGRIINIFRYTHTLVATPPKTYDLTNEYDRKFFEMELMRGNDYLEYTKKILNRGRIASVKKGNFIGSVAAYGYKKVKIGTGKDACHTLEIIPEQADAVKLMFKLYLEGNGFTNIAKTLDELKIKPLRSETWSPAAISDMLENPVYVGKIRWNYFKTVKKIEDGQIVKSRPINQDPSDWFLVQGKHPAIIDQATFDAAQERRGRTPKIKRFNELKNPFAGLLYCQCGKAMSLKIYNQKKGKCEPTKLMLCNKQSWCKTKSVKYDTFLERIVETLESTIADFEIKLKKDNGDAAQLHKNIVYNLETNLKKLKDKDIRQKDAYEDGIYTKEEYASRNAKLQEQISETTKALCQAKDSVPPTINYKEKIARFTDCLNALNDVSVPAAEKNMLLKACFEKIIYHNDMPSISGHGRWIENKFKLEIFLRL

SEQ ID NO: 24599 - protein, 528 aa, synthetic construct
MAYCIYLRKSRADRELELQGFGETLKRHRDTLIELAKKKNLPIGEIYEEVVSGDSIAARPQMQRLLNDVSDGKWEGVLVMEIERLARGDTSDQGIVTKTFTYSNTLIITPMKTFNPTDEFDQEYFEFGLYMSRREYKTIKRRLHAGMEASCKEGNYIHHTPPFGYSIVKNKKSKGYRLEPKPGEAEIVKLIFQWYTKGILKEDGSYELLGTARIADKLNSEYSIKPLGGVWTIPTISTMLRNEHYLGYIVFGKKKRKKVVENGIIVDKWTRNESYGLYKGKHPALVSQETFDLAQERLAKNPRRPSKTITNPLAGVIKCGMCGRSMYRRPYQKRGQSASLICSEKTCHNVSSAFYLVEDALLTAIKEWIDGYEIKEEANKYDTSVLESKTKLLEEQQKQLITYKNQLTKVFEAYENGIYDSDTFLSRQKTVSESISSTEDAIIKLNKEIANEREIISHQEEIIPKAKKILEIYKTSDDVQLKNDLMKSILDKVVYTKTANGHFKGQRQDDFKLELFPKLPKNKGDSSE

SEQ ID NO: 24600 - protein, 503 aa, synthetic construct
MEITVEKVDTGVQKLGFQALSTLKTVRVAVYARVSTDQEIQLHSLEEQMKAFRAKIAQHPGWMLVDVYADEGISGTSVKKRKEFLRMMEDCEAGKVDYIMAKSISRFARNTVECLSYVRHLQSIGVQLYFEKEGLDTATSVSELILTVMAAFAQEESRSISENLKWGIRKRFESGESRWTKTYGYRKTKDGEIVIEPDEAAIVRMIFKMYQYGIPMTDILDELTFIQAPSARGKQTWNKTALKYLLENEKYIGDMRLQKWVSVDHISHRSVRNDSTVIPVYNVRNHHVPIIDRHTYQQVQRIMKLKSPHGEYSRYPYYDTNIVCPLCGKKMIPRVMKVNSHKRILGCFDVDGCRGYAVKGYLVDAALLEAYNTLEIKEKKRTVAMQRMLEIKAESPKLDTVQYYWLDDLVGHIEFKQDTMRVFWKCGLESEVALNASKVEEPTHVAELYRNSLDRAQRSENKPVSVVRADKKSVNTREAQRNAAMQTAKNLRAKENGVAANDY

SEQ ID NO: 24601 - protein, 546 aa, synthetic construct
MEETIKAVGYARFSSSMQREESITAQKRYMMMYAKRNNMEVIDWYCDEAKSAKTVNRPAFQKMINDAKNNPEFKAVLVHKTDRFSRNLSDSIQYKKILEEYGVQVIFVNERFEDNPESHLLYHIMGSVNQFYNENLAREVMKGLKENAYQCKFTGGRPPLGYDVDKDLKLVINEKEAEAVRLIFEMSAEGYGYGETIDKLNILGYKTKKGLPFVKNSLYEILRNEKYKGTYIFNRSCSANILNKRNNHRRKPEEEIIRIENGCPAIVSSGLWHRANAVKKATRSSYTNAKNTYLLTGLIHCGECGGKFHGNVRYNKNNTNLVYRCSSKKNKRKCESKEIRCEYLDSFVIDKFVEFFFNDDNIKVITKQLNEQYNKSCISDLEYNEAKSTLKILEKSRNNLVEAIAKTGINDIMSDKIKEYEEQIKKTAEFIQKYEKQKIDRVITEDEIREQINHLKDYFYNPKNLIRTKYVLSQYIDRIDISNENVQVQFKVSMSPSDNTDGDCFCVHTEMIKRKYLFDYVCEKVDFEQWNIEKLNKSESEHRKGA

SEQ ID NO: 24602 - protein, 502 aa, synthetic construct
MEIQIREGSREQKRKLKVCAYCRVSTDADEQENSLENQVRHYEMVIKANPDYEYAGVYSDFAISGFKEKRPGLQKMLADAEKGKIDLILTKSVSRFARNTSIVLEATRKLKELNVGVFFELQNINTLSGEGELMLTILAAFAQAESESGSVGAKMVYQRKYEAGIPVQYLERSFGFKKDERGVYIADEEEAVWVRKIYDMAAQGYTLAAIKRYLNENNVKTVGGAKWLDSTVLRILENEIYKGDYIMHKYFVNEERKLVRNRGEVDAWYIEDDHEAIVSPKLWQRAQDALEAKRDYLAEGSVIEEFTEENYPYMNRIYCARCGHPLYKRIYSNGNRLNWGCSGTKRYGKSFCEGINIPDGVLRGAWHFDENMYIGEKQTDKGKKEFTYLKEASWKRRHKKKEPEPIPENTETEYPYREKIFCGLCGSRLVRHVNTKNHKVIWVCNGRKRKGKDFCDGTRVPDTIIKGWGEIKKDIYIQRKDDKNGKKRYSYTSKKPKGADRA

SEQ ID NO: 24603 - protein, 464 aa, synthetic construct
MARSVTVIPARSQKVRTGHKAVQEKKIRVAAYCRVSTDQEDQLHSFEAQVEYYTKYINEHENYEMAGIYADEGISGTNTKKREQFKKMIADCEDGKIDLVITKSISRFARNTQDCLAYSRKLKNLGIGIIFEKENINTLDSTGELLFTILSSLAQDESRNISENCKWGIRTKFKNGEMHLNTFKFLGYDKDENGKLVINKEQAKTVRRIYRDFLIGINPAQIAKELTEEKVPGCLGQTKWYPSTVIGILKQEKHMGDALLQKTYTADFLTKRQVKNNGEIAQVYVKDSHKGIIDKETWNAVQEEFERREKFMQKHGTDRYSYGSECYPFCEKIFCGECGSLFTRHSWKSRGIIQWQCKNHRKDGKVACTNAYVDNADLEKGFVKAFNRLVGEREKHIERWNSMKLDGTPLEKIRAGQMMEATESGQLQQYVPEAAQLVLEEITIFGAKKYEFAFLEGSRVKVSV

SEQ ID NO: 24604 - protein, 525 aa, synthetic construct
MARAVTVIPPTIQPITHLARNAVMRRRVAAYARVSTSSEEQLTSYEAQVDYYTRFIQSKPEWEFVKVYTDEGISAVNTKKREGFNQMVRDALDGKIDLIVTKSVSRFARNTVDSLVTVRKLKEKGVEVYFEKENIYTLDSKGELLITIMSSLAQEESRSISENVTWGQRKRFADGKVSLPYSHFLGYRKGDNGLPEIVPEEAETVRWIYSLFLSGKTTGSIASLLTREGIPTPAGKKKWAASTVESILKNEKYRGDALLQKAFTVDFLTKKQKKNEGEVPQYYVENSHPAIIDPIEWKLVQRELERRKAIGRSYSGNSIFSSRLVCGDCGGYFGSKVWHSTDKYRRTIWRCNSKFTGEEKCQTPHLTEDEIKARFLDAFNMLVSDKERMLDECRTMQAALTDTGPLDSEISVLLSEMEVVAELTKRCIEENSTTAQDQAAYLERYNGLAERYESAKAKLEKLRAVKAKRESKAEDIGGFMFELAEYGDPITEFDDRLWLTVIDIVTVHRDGQLTFKFQTGHEISI

SEQ ID NO: 24605 - protein, 438 aa, synthetic construct
MARTIQQISFPAPMRPSLKRVAAYARVSSGKDAMLHSLSAQVSYYSALIQKHTGWLYCGVYADEAFTGTKDSRDGFQSLLAECRAGNIDMVITKSISRFARNTVTLLETVRELKALGVDVYFEEQNIHTMSADGELMMTILASYAQEESRSASENQKWRIRRGFERGELINLRFLFGYKIEKGRVAVDPEKAAVVREVFRRALEGASLTSLAIDLNRRGFTGVLGGKWNSMRIREMLSNEKYLGNALLQKQYRNNHLEKKEIPNRGELPQYYAEGTHEAIIDQATFDAAQELLAGIAEKSPIKRPCHRSAFTSMITCTVCGRKYKRCTRRKRHFWNCPTAVRTDLPSCGTSQIPEKLLYDLAAQVLGLAQFDEGVFLERVKGIDALPGKTLVFHFYNGSTAERHWEHISRAKSWTPEMKEIARQRALAQRRGEKWQER

SEQ ID NO: 24606 - protein, 531 aa, synthetic construct
MLAYGYCRYSSNLQDEKSIEQQKNELEEYAKKNNISIIKYYIDEAKSGTKDTRDSFQNMISDACKSKEIQAVLVWKTDRFARKAIDSLYYRNKLEKVGIKLISITQPIDTETPEGKLMSTMLAGVDEYYSQNLASNVKRALKLNAQNAQFNGGIAPLGYDIVNKKYVINEREASSVRFIYDLYIEGYSLIEIALKLNSMGFKTKKNKPFSKTSIYDIIGNEKYIGKYIFNKGTKSNHDGIRADAIILEDAIPQIISKEVFEKAMNKRTKRKNAENTAKNFYLLSGLIKCECGGSYVGTTIKKQKNGNTYVSGYYRCSNHNKLGKCQMPSLKQELIENKVIKMLTEELLNAETRENIVKAVNAQYIEAQKDCKNDVEILKENLSSINQEINNIVNAVAKGYATDSLLKRLEEIENTKKNIEDEINFKDNIATHNYITSEKIEEVLKKDLSELKDKSKEKLKILVQKYIKKIEVKTTEVLIYLDFGESSPKKLVAKMWFEHMTLRVWTECSSQLSYFAIWNLYYYNKFEAFCQ

SEQ ID NO: 24607 - protein, 497 aa, synthetic construct
MNTVIYARYSAGPRQTDQSIEGQLRVCTDFCKQRGLTVIDTYCDRHISGRTDERPEFQRLITDAKRKKFEAVVVYKTDRFARNKYDSAVYKRELKRNGIQIFYAAEAIPDGPEGIILESLMEGLAEYYSAELAQKIKRGMHESALKCQSTGSGRPLGYRVDEQKHFQIDPESAQTVQTIFEQYIKGESNAAICELLNSRGLRTAQGKPFNKNSINRIIKNRKYIGEYRYHDIVVEGGMPAIISKDTFNLAQAEMERRRTRKAPKSPKAEYLLAGRLFCGHCKGPMQGVSGTGKSGNKWYYYYCGNTRGENKTCDKKQVSRDRLERAVVDFTVRYILQEEVLEELARKVHAAQERQNDTASEIAFYEKKLADNKKSIANVLRAIESGAMTQTLPARLQELENEQAVILGEISFLKGKRLAFTEDQIFFALMKHLEPYPGESEQDYRRRIISDFVSEVYLYDDRLLIYFNISSEDGKLKSADLSNIEGGEFDEGLVSSR

SEQ ID NO: 24608 - protein, 486 aa, synthetic construct
MKTAIYIRVSTQEQAKEGYSIPHQKEKLFKYCQAMNWQVVEIYADEGISGSTIEKRPAAIKMLQDAKKKLFENILILRVDRLCRNTKDLLEIVETLKKYDVSLNAVDQQIDYKTSIGKMTLTILGTFAEFEHSTIHERTMEGRKQKAKQGIKSLGRRVPFGYNYINGCFVANSDAKIVKLIFEKVADGYGFNQTATFLRNNNIPTIDKLDWNRLHIKRIINNKIYMGHCVLKLNMTEVVDTIATNVEPIIDEKLFIQAQKTISYRTKGVFSKYAYDDFIFSDVLYCSCCGWKMSPKKTKRTDPKINEAKLEDRIYRYYKCIYNMSHPTKQTCLNTKILNAEKFEKHFLLYMDYFIIELKKPLKLQKKITSSPTNKDFLEKQIKELTQKKSKLLDKYLAGIIDDSSYIAKNDELIEEIKSLENKLNFKEELLDKENKEINVDFLNGLKFVFSDLWSIMSNHEKRNFITQTFEKIEVNQGKIVKIILR

SEQ ID NO: 24609 - protein, 450 aa, synthetic construct
MINCAIYPRKSKAVDNSDSMDVQIDMCRRYLDDKYGSGNYTATVYDGDYGITGHSTKKRKDFQRMMRDVSDRKIQLVVIQRYDRIARNTRDFCNLYHDMEINGCNLVSVSQQIDTTTPYGKNFMYMQASMAELEWALNSERRKDTIRYAASIGKSILPNHSTPFGYHNAVVNGVRRLVKEEQWEDAVADLFEYYRKYRNYSATARHINQQYGTRFEIQAIKRIIRSPFYYGCYKDNDNFCEPYISKEDWQDLQQKKPVIRTAGNKRTEVLFSGMIRCPECNRLMRSCQKSHRSGNVYRYYHCEYHSAKMCGFARVKSENLIEEMLLNRVDTFLAEREAAISDQKSEKKHSANNVSKYRAELDRLNTMFLKGRISEEYYDTEYLRLNDLIGQYEASRQSHDSVKHLQEVFVSDWKEMYKDLDKLHRKFFWRDVIRQIVVDDNMNVIDVIFL

SEQ ID NO: 24610 - protein, 502 aa, synthetic construct
MEIQIREGNSRQKQKLKVCAYCRVSTDADEQENSLENQIRHYKEVITSNPDYEYAGVYSDFAISGFKEKRPGLQKMLADACKGKIDLILTKSVSRFARNTSIVLEATRKLKELNVGVFFELQNINTLSGEGELMLTILAAFAQAESESGSVGAKMVYQRKYEAGIPVQYLERSFGFKKDERGVYIADEEEAAWVRKIYEMAADGYTPAVIKRYLNENGVKTVGGAEWIDSTVFRLIENEIYKGDYIMHKHFVNEERKLVRNRGEVDAWYIEDDHEAIVSLELWQRAQDALEAKRDYLAEGSVIEEFTEENYPYMNRIYCARCGHPLYKRIYSNGNRLNWGCSGTKRYGKSFCEGINIPDGVLRGAWHFDENMYIGEKQTDKGKKEFTYLKEASWKRRHKKKEPEPIPENTETEYPYREKIFCGLCGSRLVRHVNTKNHKVIWVCNGRKRKGKDFCDGTRVPDTIIKGWGEIKKDIYIQRKDDKNGKKRYSYTSKKPKGADRA

SEQ ID NO: 24611 - protein, 464 aa, synthetic construct
MARSVTVIPARSQKVRTGHKAVQEKKIRVAAYCRVSTDQEDQLHSFEAQVEYYTKYINEHENYEMAGIYADEGISGTNTKKREQFKKMIADCEGGKIDLVITKSISRFARNTQDCLAYSRKLKNLGIGIIFEKENINTLDSTGELLFTILSSLAQDESRNISENCKWGIRTKFKNGEMHLNTFKFLGYDKDETGKLVINKEQAKTVRRIYRDFLIGINPAQIAKELTEEKVPGCLGQTKWYPSTVIGILKQEKHMGDALLQKTYTADFLTKRQVRNNGEIAQVYVKDSHKGIIDKQTWNAVQEEFDRREKFMEAHGTDRYSYGADCMPFCEKVFCGECKSLFTRHSWKSRGIVQWQCKNHRKDGKVACTNAYVDNADLENGFVKAFNRLVTDRDKHMERWQQMKSDGTPLEKIRAGQMMEAVGNEPLTRFVPEIAQLVLCEVTVLGAKKYEFFFLEGSRVKVSV

SEQ ID NO: 24612 - protein, 565 aa, synthetic construct
MLRTPGDLFFLAEAVNSTNKFYSVSDKSARVYFLYSFLGGETMRFFSYGRKSVFSDKSDSIDNQFRMNREYCESKFSGQVDSWQQFSDEDFTGANTSRPDLQRMLSFIKGGFCDVLVVYQLDRLSRDVRDFANIYALLEEHGVMFISIKENIDTTTPIGRAMMYVTVVFAQMERETIAARVTDNMLGLAKKGYWTGGNPPVGYVRKHIIVNGKKHCSIKVDPDGARYVTQIFDTFLAYNCSLQGMETRFKNQGIRTQSGKFFSTTQLHKMLTMPYCVEATPEVYDFYAAKGCIMDPGSPREMWDGSVGVIIYGRSTEKNKKHQAQPPEKWTVCLGKHKPFMPAEKWLAVQSRFTQNKCIKDAKWPVPLLKGVLRCKCGNLMQVSRKKKVDGTCSSWYYCRKRMRQGVDACDMGQIKCDLLDEEVLELFRGITADPALIQKFVKAEAPADVPDLKAAQARVSACERKIGRLAASLALAEDSAASKYIIAEMERLDVELGALKREASLAEMESHRAAASAKDAKATAAEIAKLIHGLDGFDDKEKNAIARAVIQECTWDGERLFITL

SEQ ID NO: 24613 - protein, 522 aa, synthetic construct
MTAVIYARYSTDSQREESIEGQIRECTAYAEKNGFTVVKHYIDRAVSAKTDNRPQFQQMIKDSERGIFDIIIVWKLDRFARNRYDSARYKTQLKRNGVKLVSATEVISAGPEGIILESVLEGYAEYYSADLSEKVVRGMTENALKGIYNGGTIPFGYMIDETRHYQPDPLLAPYVEQTFQKYADGATMTDLRDWLKAHNIKNSMGGEMSYNTIQRMLSNRRYIGELRLRDVVQPNAIPALVSEELFNKVQEKLAKNKKAPARHKAEESYLLTTKLYCGKCGALMFGESGVSHTGKMYTYYKCAAAKKKKTCDKKAVRKQWLEDLVVNETMKLVEDDASMNAIIAKVMELQNQESTDLPIYEKQLKETEVGITNMLNAIQMGILTSSTKERLEALEDQRKELQARIAEERLAKPKMKEEFVRFWLLRFRKLDMTQPEQRQALVDTFINAIYLYDDKVLITFNYKEGTETVAFGEAVKAEKSSDMSARGAPDIERQIVRFGVLFCYVTPKNRGLHGQCTAFARS

SEQ ID NO: 24614 - protein, 511 aa, synthetic construct
MLRAALYARYSSDNQRYESITAQLRASREYCKQRGYIVVKTYTDEAISGTSVAGRDAFQQMILDSSDDIFDVVIFHKIDRNARDEIDYYTNVDRLRKNGVRYEYSAEGIDVTTTNGKLTEGIKVAVAAWYSRNLAQEVRKGQKENALQAKFNGGRPPLGYKIVNQRYEIEPREAEAVRLIFDMYLHGSGYIDIAAELNRRGFVTRNGKPFAKNSLYEILGNERYTGTYIFNRIVTDDFGRRNNHKINDAAIKIPGAIPAIIDAETFAAVELKRQKNKHRSSSFRAVEKYLLSGKVKCGMCGTPMNGHRVKMQDRVYTYYCCNKSYLPAAVKCRQKQAGKEVLEKAVLQVVAENILSAPARQQIVKELAVQIAHIGDTTREERKTLKAALAGAEQRLANLYKIIENGIFDDFDLERLNKTKAEIMDIKNKISNLPENADCLMLNVADIENAFKRLHAALLAGDKHAQQYCIDIFVTEVTVNEETIDIQLNVNPQQKFSVKMVETSGIEPLTS

SEQ ID NO: 24615 - protein, 464 aa, synthetic construct
MARSVTVIPARSQKVRTGHKAVQEKKIRVAAYCRVSTDQEDQLHSFEAQVEYYTKYINDHENYEMAGIYADEGISGTNTKKREQFKKMIADCEGGKIDLVITKSISRFARNTQDCLAYSRKLKNLGIGIIFEKENINTLDSTGELLFTILSSLAQDESRNISENCKWGIRTKFKNGEMHLNTFKFLGYDKDENGKLVINKEQAKTVRRIYRDFLIGINPAQIAKELTEEKVPGCLGQTKWYPSTVTGILKQEKHMGDALLQKTYTADFLTKRQVRNNGEVAQVYVKDSHKGIIDKETWNAVQEEFDRREKFMQKHGTDRYSYGSDCYPFCEKIFCGECGNLFTRHSWKSRGIVQWQCKNHRKDGKVACTNSYVDNVNLEKGFVKALNILIEEREKYMKRWNAMKSDGTPLEKIRAEQMMETVENDPLKRFVPEVAQLILCEVIVLDAKKYEFTFLEGSRIKVSV

SEQ ID NO: 24616 - protein, 502 aa, synthetic construct
MEIQIREENSGQKQKLKVCAYCRVSTDADEQENSLENQIRHYEEVITSNPGYEYAGVYSDFAISGFKEKRPGLQKMLADACKGKIDLILTKSVSRFARNTSIVLETTRKLKELNVGVFFELQNINTLSGEGELMLTILAAFAQAESESGSVGAKMVYQRKYEAGIPVQYLERSFGFKKDERGVYIADEEEAAWVRKIYEMAADGYTPASIKRCLNENGVKTVGGAEWIDSTVFRLIENEIYKGDYIMHKHFVNEERKLVRNRGEVDAWYIEDDHEAIVSPELWQKAQDALEAKRNYLAEGSVIEEFTEENYPYMNKIFCARCGHPLYKRIYSNGNRLNWGCSGTKRYGKSFCEGINIPDGVLRGAWHFDENMYIGEKQTDKGKKEFTYLKEASWKRRHKKKEPEPIPENTETEYPYREKIFCGLCGSRLVRHVNTKNHKVIWVCNGRKRKGKDFCDGTRVPDTIIKGWGEIKKDIYIQRKDDKNGKKRYSYTSKKPKGADRA

SEQ ID NO: 24617 - protein, 527 aa, synthetic construct
MAKSVTKIPQTRNIFTAAPIKGIAKRKVAGYARVSTDSDEQYTSYEAQVDYYTRFIQSHPDWEFVKVYTDEGISGTNTRHRDGFNEMIEDALAGKIDLIVTKSVSRFARNTVDSLVTIRKLKEHGCECYFEKENIFTFDGKGELLITIMSSLAQEESRSISENVTWGHRKRMADGKVYVAYSTFLGYDKGPDGNLVVNKEQAKIVRLIYRSFMEGMAPIGICRMLEERGIPSPGGKKKWYEGTVISILTNEKYRGDALLQKTFTVDFLTKKHKVNEGEVPQYYVEANHEAIIPPEEFEQVQAEIARRKKIGRSYSGTIFGSKIICGDCGGYYGQKVWHSNDAYRRVVWRCNRKYGKGERCSTPTITEDDIKKLFVQAFNKLMSERTTAIQDCEELASSMEDTSGLDQEIEVTQKEIDTVVEQNRRLIREQAVTGMPTEEFDARAAMLNERYKAADDKLTKLKAEREDHLTRGKGIRRFLSVLDGQPQNLDDWDEQAWNLLVSRVIIRRNGCVEFVFRGEITITVRAQ

SEQ ID NO: 24618 - protein, 436 aa, synthetic construct
MEKQVTRVPVKPTLERLKNVAAYARVSSGKDAMLHSLAAQVSYYSQMIREQPGWRFAGVYADEAMTGTKDTREEFQRLLADCRAGRIDMVITKSVSRFARNTVTSLETVRELKLLGIDVYFEEQKIHSMSGDGELMLTILSAFAQEESKSASDNQKWRIRKGFQDGELMCLRTMFGYRISKENGIEIDPEQAETVREIFARIIRGDTLNSITRWLNRNGLYGAYGGKWNTARIRDLVSNEKYTGNALLQKVYVNNHIEKKRIRNSGELPQYYATDTHPAIIDQATFDAAQEALARIASSHAPRKPIKHYAFTGMILCPNCGRHFKRVQNHGLSRWACSTFINEGKEYCHSRKIPEEVLMRVTADLFGWNAFDEIMFRDTVDSITAVEPNQLIFHMKDGTERKAEWQLESRSKSWTPEMKAKAAADARRREYGKKRH

SEQ ID NO: 24619 - protein, 434 aa, synthetic construct
MERVVKRVGTLIPAQPKALRVCAYARVSTGKDAMLHSLSAQVSYYSKMIQDHSGWMYCGVYTDEAVTGTKEERAGFQRMIQECRQGRIDLVITKSISRFARNTVTLLETVRELKSLGVDVFFEEQNIHTMSSDGELMLTILASYAQEESLSASENQKWRIRKAFENGELANLRFLFGYNITADGVQVNEKDAAIVREIFARFNEGESMSSIGRDLDARGYRGVLGGTWCAERMRNTLSNEKYLGNALLQKQYRNNHIEKKLLPNRGELPMYYAEGTHEPIIDQATFDKAQKRLKMLAQQTANRKKPTHSAFTGLIHCGLCGNTYKRVTYRKKHYWNCTTFQTKGKSECAAKRIPEETLDALTCEVLGVTHFDPDTVRSKITAIRAENNNVVVFCMDDGSEIVKRWADRSRAESWTPEMKEQARQRALQARRSKK

SEQ ID NO: 24620 - protein, 526 aa, synthetic construct
MIQTGKITALYARFSHDEGNSGHDSNSIANQKELLAEYANTHGFINHQFYTDDGYSGTNFERPAFQKMMTDVENGLIGTIIVKDMSRLGRNYLMVGQYTEIIFPEYNVRFVAISDNVDSAEGLSDLIPFSNLINEWYAKDISKKMRAMITQKGNSGRRLCSRAIYGYMKSPEDKEKWIIDEYAASVVRRIYELYISGNGVSRIANILRDEKIQRPFVYLYQKESDTPYEWTGATITVIITNREYCGDTVNFKTHKPSYKSKKIIKNPPELQRVFLDTHPAIIDRVIFEKAQNRYAKRCRKKKSKTKDTLFTGYVYCKDCKSRFHVFRHKARGNMIVSYECSGYRKQQKKCTYHRIDEDALKQCVLQKIKLMWYEAKSDIRSFKAKVRKRLNADETASRSKIQSEIGAAQTRIAEIDKYVQGLFEAKVRNEIDSDIFGSLSKTYTEEKAELNAKIADLILQENSAKDAYQKINRLYEAIEKYDSITELTPEVLSDFVDRIEVGEHLKGTKEQKIDVFFVGVGLMDTL

SEQ ID NO: 24621 - protein, 556 aa, synthetic construct
MARAAKQDSNSEIIDGVIYARYSEGPNQTEASIEGQVRECKEYAKRNGIRIINVYSDSKHTGTNDNRAEFQKMLRDSRRGGFSVVVVWKIDRFGRNRAEMAQNKALLKLQGVKVVSAKEYIPDSPEGIILESVLEGMAEYYSANLSQNIKRGMKENALHCKSNGSGKSLGYIVDKDGYFEIEPNEATIVKTIFQKYDEGMKIADIWREIVASGAKTKRGKDFTQYGISRVLSNRAYIGEYRYGDIVTPGGMPRIIDDDLFNRVQERRALSKKETPHRRSSSPADFLLTGKVYCGHCKSSMRGDSGTSKNGNSFYFYTCHGKRYKHNGCKKKNVRKEWLETEVTRLTVENILNDEVISFIADRVVKIQKEEQENKSMLHYYEQQLRDTQSAINNIMKAIEAGIITSSTKSRLFELEEQKSIIEGEIEREKIITPVIEKEQVIFSLERFFGGDINNKEYQRNIIDMFVNKVILYDDKIIITYNISSQNEISVDVVEQAAFAALDECSSKLSLAPPAGACPCTQSALLYVERFFIAAHQFYLKPNHCFAVADISRQGFL

SEQ ID NO: 24622 - protein, 463 aa, synthetic construct
MTTKVERCAIYIRVSTTEQMMHGKSLEAQKEYLTNYAREHNMAVVGIYADEGKTARKELKKRKAIHSLLQDVEAGKIDVIIFWRIDRWFRNLSDFYKVQDILDSHNVRWISTSEPGINMETRDGRLQLNVVLSIGQNEVDTTSERIKFVNESSIRSGKLIFGDANMGYGYKSGIVDGQKRMVKDPDREHVVDAFYKYFFKHQNKCATLRYIQETFDPDFSFGIMRTLLSSEFYKGTYRGFPYCPAYLTEDEWNKLQKIQKRNVKATPSGRIYLFAGMIRCPVCGQKLCGTGCSSIISRKTGAKKTYCYYRCNRAMIDHVCSYRHRLSQNLVENYLLDNLENEYKNYKVKCKKIEKEKEKQKKKQSPEKLRKELDRLNFLFQKGRIDWDYYNEEYGRVESELNDLQNSLPEPAPNYSYLEELLNTDFKTMYDQLSQENRRAFWRSIIQEIHINEDSTITSVDFL

SEQ ID NO: 24623 - protein, 456 aa, synthetic construct
MRNQNTSETPVRAALYVRVSGEEQKIKGLSIEAQKERLVAYAKERGWIIAGLFVDAAKTARKNMHKRSEFQKMLDLVRADGVDMLLFCRLDRWFRSVRDYYKVMEVLEAHNCQWKTTDEEYDTTTANGRLYINVKLSIAQNEADICGERIHVVFDSKIQHGTVLSGKCPFWLRINNERRYELIPENAAIIRDAFNHFENTTSQRATIRYIRETYDVNWCEATFRRMLRDKLTIGVYDKNGRYNDDFCPPVISKEQFEHVQELLRRNSRHNPAGRVYIFTGILVCEECRHNLVGYYSRDYIYYRCSQHFQRGRCIHNHSAREDVIEAWLFEHLGEEIEKYEVAWNVQAAERKRTAASIDRSVLRRKLTKLKDLYMNDLIDIDEYKKDYETYTAALSALEDPEEEKHIDLSGVRRIISHDFREIYDSLTREEKRTLWKNTLKEIRVNNANEITGISFF

SEQ ID NO: 24624 - protein, 588 aa, synthetic construct
MKRAALLLRCSTDAQDYERQKLDLLDTIKGMGYTTSDDLVFGQYITGKDDVRKKDRESVAECKQAVREGKVDAIFINEVSRLSRDSIAGRLFIREFNDEYKIPVYFRDLGMWTINPTTRIVDRSFETMLGFYFDMAQNELKSMKTRFASGKRKNAREGKTIGGAVPFGFYKDEDGKLQVDEEQAQVVRLVYNKYLEDGGSIPSVCRYLLSCGYDKKFNKKFGTGSVRNLLRERRYIGEQRYNLVNPDEPDEAKKQEVYIYKVDAIIDTTIYNKVQIKLDKNRTTETKKVNKDKKIHLLAKLITCPICGDSYTSKTASANKSGERYRIWNYCCVSKYNFSECTSDITLNADNIESIIWQLTKREILALQELSLEERQSKIDEAEQKLASYKDELDVIAKSIDKLNVKKKKLVALFLDIEDDDTAIFNEQREAINKEIDSYNNRIQFLNTEITICEGNIARFKEADFTDEVLDKIEQDLLKKKELIKEYIKVIRPYRLTKARLILEVESKQTNYCILFEPRNSKRRCWYIQSSLAQWQNGLLKTSTAPLGNFFYIPMGSLLLDEPDDLDAIASFEDMKEICRINNYVIEY

SEQ ID NO: 24625 - protein, 512 aa, synthetic construct
MKKCVIYARYSSERQTEQSIEGQLRVCYEFAKNNELIVVHEYIDRAMTGTNDLRKEFQQMLSDSEKTKEWDICLVYALDRFGRNSIEQAINKYRLQKTGKIVISATQRTSRNIDGSQNLDGIILENMYVGMAEYYSAELSQKVKRGLNESRIKGQFTGGVPIFGYEAYGTKAEGRRVRIKEDEAVIVRRMFEEYASGRLIKDILDDLNNEGVLCHGKPFTRTAFYNLLKNEKYIGIVRFGDQVFDNIYPPIVNEQVFDICRAKAQSNKNGKHTDVHYLLRNKVHCGYCGKTVSSESGTSRTGKVVRYYKCSGRKVDKKCDNTPIRKELLEQLVVEATYETLANPRLIDKLATLILNAHQQKMADASVINIIEGQLHDTEKALSNLIACMEKGIVSASTAKRLEELEQQKTEFETKLALEKAKETIPIDKKDIVDYLQQAIRKTPRLMIELLIKDVILYKDRIEIHFNYTDLIRPDAERRRAFLFYKFSKDVVMKRKSNLPLEKKTIRFEMYV

SEQ ID NO: 24626 - protein, 490 aa, synthetic construct
MTNKNLLAITPHRKEPGRQRIAAYCRVSSRSDEQLNSLANQIDFYRSRFENDDTVVFVGIYAEEGLSGTQAESRPQFMKMIEDCRSGHIDCIWTKSVSRFGRNTVDTLIYTRELRSLGIDVFFEKENIHSTESSGELMLTLMAAFAESESETMSANIKWGKRRRYEQGITGSITLNGMYGFRQNKGVVTVVEDEAELVRRIYKDFIDGYSYGEIADRLIADEVPTRMPGASWAKTTVQHIIRNEKYCGDCLFQKAFIANPITHQQVRNNGELPKYLVEDCLPAIVDKETWKLAQAVAARHTPHRQAPNERYPFTGKLFCGICSKPYYYYHYTTTNKQLLAAYRCMSRKTQSAVEVPGQTYTPPHKATFNLNASPELIAYRERYCKPPKERPMLCTDVRISIDLPQKAFCRAWNLIVAKKLRYQATLRSTVDNAEDILVRYRAEEMCLLIDEIGKINEFSYPLMLKTLDRVVVNANGKLTFIFQSGIKITV

SEQ ID NO: 24627 - protein, 434 aa, synthetic construct
MKKTIVNIAPAVAETPRTKRVAAYARVSCGKDTMLHSLAAQIDYYRDYIMMNPEWRVAGVYADESKTGTKDNREQFQLLLTECRSGNIDMVITKSISRFARNTVTLLETVRELKSLGIDVFFEEQNIYTLSAEGEVMLTLLASFAQAESLSCSDNCKWRIRKGFEEGRASTCTMLGYRLVNGEITLIEEEAEIAKRIFDLYLAGCGLQKIANTLNEEGMYSIFGNEWHPTTVRKVLTNEKYCGDLLLQKVYRENHLTKRKCHNTGELPQYFVEDDHPAVVTRQIFMAVQDELKRRAKEKTQPVGSKSSFTGKIRCSCCGKNYRRKTTPCNTVWCCSTYNSKGKKYCPDSKVIPEETLKRAATEILKTDGFSDEAFETQICTIEAHPGNLLRFIFIDGSTTDYVWKDRSRSESWTDEMKAAAAKKAKERYASHDK

SEQ ID NO: 24628 - protein, 521 aa, synthetic construct
MRVAIYCRLSREDDDKLHENDESESIQNQKSMLINYAIERRWDIYNIYCDEDYSGIDSERPEFNKLLEDAKNHKFDIVLCKTQSRFTRDMEIVERYLHNKFVEWNIRFVSLVDHVDTLDKGNKKSRQINGLVNEWYLEDLSENIRRTFDSKRKQGLHIGSFVCYGYKRNPENKNKLIIDTEVSDVIRLIFNLYEQGKGVNKIAQILNDKGILTPTKYKQSQGINFKNQGKNMDYWCESTVSKILKNEVYIGNLVQGCNKKVSYKSKQMKNQPKSEWIIVENTHEPIITKEQFYKVQEIFKRKTRRCKNGEVHLFANKLVCLDCGTKLYKCRNDRDYVYFSCKGSKKLYGTCTPHSIGYENLKNLVAEKIREKILAFYNFDNISDDLFVSNDNLNKAKLLQNKVELLSKEMKDINNAIKELYLNKVSGKVPEEVFEDLNSSFLSDKSAKQKELTKLENDLSNLKEKELNSKFIKEQKEKIINHFKNFKELNYDIVNSFIDYIEIGEKNKKTKSQDVIIHWNF

SEQ ID NO: 24629 - protein, 628 aa, synthetic construct
MKAAFLIRCSTKNQDLNRQTRDLTRLAKSMGYEYDLENLVYGEKITGKDDVTKKNRDSIDRLLRAAKEQRFDVVLVSEVSRMSRDPASGRIYVRLLINMNIPVYFKDIDLWTINPETGKKVRDAEFVIGAAFDAAWKYLKSMKTQIASARRNELDNNRISIGQPYFGYKRYEGTDKSKKNQIVVNEEEAEVVQAVYNEYLKEGATLKSTALAITDKYGEKLNRKFSLGTIEHILTYESYATGIKKVNLKDPDTDEVEVFDVSTPIIIDKELYEAATNKRKKNRVKDEPYPNQQVYLLSKLIKCPDCGYTLTPRRKAGEFGQTYRLVNGKPAVSWLCMSGINNITDCTNRTSIANEKLEPIIWELVKKELIGYANMNDEKREEQIRECEEKIEYQNYSIQNFTKEIDKLKKRLSTAYQFSINAAEMAGDDEDMRTMAMEEFNRTAKGVRQEMKNFEKSIEQAKGELEKLRDLKTFYSQPTLPKDYLEQIEGNFTEKRNLVKQLITKIVPYRITTFKKKERESGVKTCNKMITVKNGAVLLEVYTIGGVYNVFYNANSKFQVKTAYYVHGEYATFQNGIRKFPAYDEGEYFVISNANMVMETDDIDEVVTVNEFVDIAIANNWVIEYQYI

SEQ ID NO: 24630 - protein, 578 aa, synthetic construct
MNTLSALNITPSPPRMCRVAIYIRVSTLQQVDKDSLPMQRKDLIAYSKLILNTDDYVIFEDAGYSGKNTIRPRYQDMMGQIRTGAFTHLLVWKIDRISRNLLDFAQMYQELKELNVTFVSKNEQFNTSTAMGEAMLKIILVFAELERNMTSERVTATMISRANTGKWNGGRVPYGYKYDQEEEDFLIIASESNVVKLIHDKYEELQSLVYLARYMNEHGYRTRSGNEWSPPSLAIILKSWWYCGCYEYNKRKAGNRQKLKDESEWIMIEDHHIAIISYDQKERVLAILKGNKRFATEHNLYVKGIHVHVFGGLCWCRNCGKKMTSTSSNKNRSWQYSKYLCSTRRRSLTKCRGRSTSDPVLGEFIFNYILNMLNAQKGFDSIHSPADLQAALLTGDAFSDIKSIDREELNDLYNTLSSNVSGNIYGRSFNVNKEKKNDEVQSSLTILKAEKKKLDRALDRLTNLYLYDDMAISEKDYMIKKTEIETRIAEIDEKIGIVNKNSVDDSITDEEFVDKASTFIITQKLTDRNYISYKRLATSIDPKILYMFTHDVIDYIDIYNGKVQRIVFRNGLSQTFIR

SEQ ID NO: 24631 - protein, 526 aa, synthetic construct
MPKVTMIPATINPLTHLPKVAAQKRRVAGYARVSTDSDEQFTSYEAQVDYYTKFIQSKPEWDFVKVYTDEGISGCNTKKRDGFNSMVSDALAGKIDLIVTKSVSRFARNTVDSLVTIRKLKENGVECYFEKEGIFTFDGKGELLITIMSSLAQEESRSISENITWGQRKSFADGKVHLAYKRFLGYEKGEDGRPTIVESEAKVVQLIYRLFLDGKSQAAICRCLENLGIPSPGGKDKWIKTTVTSILQNEKYKGDALLQKSFTVDFLEKRMKPNEGEVPQYYVEGSHPAIVDPDEWDHVQTEFARRKALGRAYSGKSVLSAKLVCEDCGGFFGSKVWHSTDRYRRTIWQCNSKFKVEERCHTPTVNTETVQRLFTQAYNRMMENREQIIKDCETMRRALTDFAELDAEIERQLEETQVVAELVKAAVKENASTAQSQEAYLRKYEALTERYEKAAAELERLQNLRTTQSKQDKAMALYIRTLKKQPVVLREWSDTIWTVMVEKAIVHRNGAITFVFKNGTEVKVGE

SEQ ID NO: 24632 - protein, 433 aa, synthetic construct
MSGRITTVSKPPKLERKKRVAAYARVSSGKDAMLHSLSAQVSHYSDLIQRNSDWLYAGVYADEAKTGTKDSRADFQRLIADCHAGKIDMVITKSISRFARNTVTLLQTVRDFKAWEVDIFFEEQNIHTMSADGELMLTILASYAQEESRSASENQKWRIKRNFEEGMPWNGAMLGYRLKDGRYEIVPKEAALVRRIYNEYLAGDGYQAVAKRLTEEGVPSRFGGKWNQSVVSKILSNYTYTGNLLLQKTFRENHITKKTVINHGELPKYHAEDAHDAIISIEIFHAVQTEKARRAAQFNKKPAPRTTYPFTSLLVCDICGKNYRRKTTKTGIVWVCGTFNTLGKSVCASKQIPEATLQQVTAEVLGVKAFTREQLHSQVQSIRVCNGNILVFCFKDGSKVTRTWKDRSRAESWTDEMKEAARRKTLERSKHNA

SEQ ID NO: 24633 - protein, 518 aa, synthetic construct
MIKAVIYARYSCDNQREESIEGQLRECKEFATRKGYTLVGSYIDRAMSAKTDNRPEFQRMIKESAKELFDVVIVWKLDRFARNRYDSAHYKATLRRNGVKVVSATEVISEGAEGIILESVLEGYAEYYSAELSEKVIRGMTENALKCQYNGGYIPVGYKVDENKHYQIDELTAPFVKEAFLMYVNGRHIKKIVEYFNENGIRSSRNKPMTKTTVSTILQNRKYIGEYQYRDIVVSDGIPAIISRELFALAQQRTEQNKYAPSASRSEIKYLLTGKLMCGDCGSVYAGESGTGRTGQKYHYYKCVKAKKRDGCERKAIKKDEVEEAVIEATVENIFVDEVIEEIADRVISWQEKESTLVPLYQRELAEVEKSIANLLSAIEQGIITSATKNRMAELESLKIDLEVKIAREEIQTQILTKDQVKFWLKNMEKLDLASIDNRQRIINTFVNSIYVYEDRFEVNFNCREGFETIPLDIERFVSRLEIVGEPYLCNKIDAHLEKLVFTSFFCVLRVKISGVKP

SEQ ID NO: 24634 - protein, 464 aa, synthetic construct
MARSVTVIPARNRQRETGHRAVQEKKIRVAAYCRVSTDQEDQLHSFEAQVDYYTKYINDHENYEMAGIYADEGISGTNTKKREQFKRMIADCESGKIDLVITKSISRFARNTQDCLAYSRKLKNLGIGIIFEKENINTLDSTGELLFTILSSLAQDESRNISENCKWGIRTKFKNGEMHLNTFKFLGYDKDENGKLVINKEQAKTVRRIYRDFLIGINPAQIAKELTEEKVPGCNGQTKWYPSTIVGILKQEKHMGDALLQKTYTADFLTKRQVKNNGEIAQVYVKDSHKGIIDKETWNAVQEEFERRERFMKDHGTDRYSYGADCIPFCEKVFCGECKSLFTRHSWRSRGIVQWQCKNHRKDGKVACTNAYVDNADLEKGFVKAFNRLVTDRDKHMERWQQMKSDGTPLEKIRAGQMMEAVGNEPLTRFVPEIAQLVLCEVTVLGAKKYEFFFQEGSRVRVSV

SEQ ID NO: 24635 - protein, 498 aa, synthetic construct
MEIQIREGSREQKRKLKVCAYCRVSTDADEQENSLENQVRHYETVIKANPDYEYAGVYSDFAISGFKEKRPGLQKMLADAEKGKIDLILTKSVSRFARNTSIVLEATRKLKELNVGVFFELQNINTLSGEGELMLTILAAFAQAESESGSTGAKMVYQRKYEAGIPVQYLERSFGYTKDERGVFVADEAEAVWVRKIYEMAAEGYTPASIKRYLNENGIKTVGGVQWVDSTVFRLLENEIYKGDYIMHKHFVNEERKLVRNRGEVDAWYIEDDHEAIVSPELWQKAQDALAAKRDYLAEGSVIEEFTEDNYPYMNRIFCAKCGHPLYKRIYSNGNRLNWGCSGTKRYGKTFCEGINIPDGVLRKAWHFDGNMYIDEKPSVKGTKEFTYLKESSWKRRHKKKVPEAIPENTEEAYPYRKKVFCGRCGSRLVRHVNPKSHKVIWICNGAKRKGVTFCRGTRIPDSVIRGWGEIKKDIYIQRKDDKNGKKRYSYTSKKPTA

SEQ ID NO: 24636 - protein, 527 aa, synthetic construct
MNTAVRTVTVIPPSINPMTHLTDTPLYKLRVAAYARVSTDSDEQFTSYEAQIDYYTQYIQRNPEWTFVKVYTDEGISGTNTKHRAGFNEMIEDALAGKIDLIVTKSVSRFARNTVDSLVTIRKLKEKGVQVYFEKENIYTFDGKGELLLTIMSSLAQEESRSISENVTWGQRKRFADGKVNLPYKQFLGYRKGADGFPEVVPEEAVIVRRIYTRFMEGVTPGAIAKELTADGIPTPSGKQRWQTSTVESILQNEKYKGAALLQKCFTVDFLTKKRKVNEGEVPQYYVEHSHEPIITPEEFDKVQTELARRKRISRQYSGKSIFSSRIVCGDCGSYFGSKVWNSTSKYRRVIWQCNGKFKGEHKCETPHLDEETIKARFVAAINAIIDSKDNILEDCRLMQTTLTDCTGIDAEIESLLEEIDVVAELTKRCIAENSQTAQNQNEYAARYNGFVERYEKAKAQLEQLRATKVAREAQAEAIGAFMFEVQELDALTNFDDKLWLTVIDTVTVHADGRMTFKFQGGTEIEA

SEQ ID NO: 24637 - protein, 427 aa, synthetic construct
MDRIIKRVDFPKIMQPQFLKVCAYTRVSSGKDAMLHSLSAQVSHYSEMIQSHTGWVYCGVYSDEALTGTKSDRDGFQQMLADCRAGKIDMVITKSISRFARNTVTLLETVRELKSLGVDVFFEEQNIHTMSADGELMLTILASYAQEESRSVSENQKWRVKRNFEAGIPWNGRMLGYRMQDGKYYIIPEEAELVRRIYREFLDGMGRNRIAAKLNDEGIQPTRYGEEWHPQTIAKILRNYAYTGNLLLQRFYCESYITKKTVPNNGQKTMYHAERTHEAIIPLEEWKAVQAEIERRAEQHKSKPPAQPSFFYTGRIQCAKCGKNFRRKTTAARVVWICATLNTKGKKHCASKQIPEATLDELVRQVTDDPFSVKKIIADDGNTLHFHFSDGSVVTRTWTDRSRAESWTPEMKEKARQQSLARRRQKS

SEQ ID NO: 24638 - protein, 519 aa, synthetic construct
MKKVTKINKIQPAKNAENKLRVAAYCRVSTATDAQLESLEAQKSHYEHYINSRDDWCFAGVYYDEGITGTKASERPELMRLLADCKAKKIDFVITKSISRFSRNTMDCLEIVRTLLNLNIPVYFEKENINTGSMESELFLSVLSTMAEGESASISSNNKWSIKKRFENGTYRLSSAPYGYKLESGGLQVVSEQADIVKRIFRELLSGKGMYSIAKELNAEQVPTQKGGRWTSTSVHNILTNEKYTGDRIFQKTYADSNFNRHINNGELNRYLIQNHHEAIISHEDFKAAAALIEQRAAEKGIESGSDKYQQRYAFSEKIICGECGNTFRRRIHKGKYNSYVAWVCNTHLSDTNRCSMLFVRDEALKFAFTTMLNKLIFSYRLLLKPYLAAMQSNTADEALLRIQHLEKQLEQNVEQRSTLHKLMAQGYIDQILYTQESNELLLQARDFRSEIEVLNNTVAGDTTKVYETERLINYCKRGEMLTDFNESLFELFVDHILIYSRQKIGFVLRCGLTFEEMI

SEQ ID NO: 24639 - protein, 521 aa, synthetic construct
MGNVMIIPAKRQVGNTSRQQEDKPKLRVAAYCRVSTDSDEQTTSYETQVEHYTEYIKKNHEWKFAGIYADDGISGTNTKKREEFNRMIEACKAGEIDMIITKSISRFARNTLDCLKYIRMLKDKNIPVFFEKESINTMDAKGEVLITIMASLAQQESQSLSQNVKMGLQFRYQNGQVQVNHNHFLGYTKDREGNLVIDPEQAEVVKRIYREYLEGSSMDKIAKGLEKDGILTGAGKKKWWTSTINKILRNEKYIGDALLQKTYTTDFLNKTRVKNNGIVPQYYVENNHEAIIPKDIFLRVQEELVRRRVVKTSANGKKRSYSCNHCFAQLVICGECGEMFRRIHWNNRGCKSIVWRCLSRLEATGLECHARTVNEKVLESVVLEAINRLLGDKAAYQAQLQQNIAQVIRDANKNTSEKIDEQLMALQKELLQKANNKEAYDEIAEQIFKLREQRRQNTVDTATRDAQIERITALQDFINQQNARLTEFDETLVKRWLKQITVYNDHFTVELKSGLKIDIEG

SEQ ID NO: 24640 - protein, 543 aa, synthetic construct
MRYSSHAQDDGFSIEAQEKAIKKYADEHGYDLQYYYCDKAKTGTNSKRPEFQKMIADSKKKLFQVCIVHKTDRFARSRYDSIFFKSILKKSGVELLSVTENFGNDPEGKVMEGIAEVFAEYYSNNLAREVKKGLDVIASQGLHTGGLPPLGYDVSEKRLVINESEAEIVRLIFDRYSNGYTYNDIAKELNAKGYKTKIGREFTSASLNSILNQRKYIGEYVYNRRSSKNINGSYNSHKNKPEEEIIRIPDAVPKIIDEKIFEKVQQRLEMNKRKAGHYKSKSNYLLSGLIVCGECGFHYQGNTRAAGRGSQSMYSSYRCGKKQNHKIGCGNSEIEKNRLETFVLEQMQKYLFSDNAIKTIVKQVNEYNISVSKSKNSDLALYEKQLNEINKQIKNITLAIAKGVNQELMIEQIKSIDSSKKDLEKRIEESKITAFPPIVEEDVRKALSKFKEFMKENNYIECKNFINQYIDKIIVYRDKVEVTFKVASAIFNASFPDDKSGMLKIIIEISRTELKTLPKQRRKVPANGQFGESYLKQYQITTK

SEQ ID NO: 24641 - protein, 506 aa, synthetic construct
MSKKRIAVVYARYSSHRQGEQSIEGQISEAYKYAAAHGLTIVKEYIDRAMTGRNDNREQFQKMLKDTAKKQFDTIVLWKIDRFGRNREEIAFNKYRCKKNGVKVVYVAESIPDSPEGVILESVLEGMAEYYSLQLSQNILRGQRASAEKCQSTGGNRPLGYKTDPTTKKFVVDPETAPTVRLVFDMYAKGNTITEIVTELNHRGLRTLRGGEFTKNSLHSMLKNEKYIGIYTYKDEVRIEGGVPAIIDAKTFAKVQEMLKVNKRAPARTWSRADYILTDKLFCGHCGSNMVGESGTSKTGAKHNYYICTKRKRERNCHKKAVRQEWIEGIVLNAVTGLLKDEELLDFIADGVFSYYKEQNEDNDFAESLKHKLAEVDKSTANIIKAIEAGIFNDATKKRMDELDARRAEIEAELSHLDLVRSWRLTRDHILFFLYEMRDKNIKDSECQKQLVQTFVNAVFVYDDKITITFNYSGDKRTITLSDVDSLWSEGSEFVCRALCSTISPP

SEQ ID NO: 24642 - protein, 517 aa, synthetic construct
MPSVQIIKATKNHTAILENKTRKLKVAAYARVSTEKDEQENSYETQIRYFTDLIRSNPNYIFVDMYADEGLTGTMLKNRDSFNQMINDALEGKIDIIYVKSVSRFARNTVDSLCICRELKNKGVNVIFEKENLELLSASGELMLTIFASLAQEESRSISENVKWTIHKNYEKGIYHMPYSSFLGYKKGDNGKMVIDEEQAVIVRKIYKMFLYGYSINSIAKELTETGVLTPRGKNEWSQSTIRSILTNEKYCGDARLQKKFTANFLDHKAVKNEGQVASYYVTDDHEGIVSHEVYETVQEMIKNSTEKKNCGDMYSRKLYCECGKLYGRKVHHSNDKYRTTIYRCNDEYSRDHIKCARLKEKQIQETYIQAVNELIQTDNIVSDIFEIAQLFKPTETIDDEISVLIDKRNIIEHEIQNLVEESSKATDIDKYRNRYDNLVKEYENTSLKVAKVIEEKDKRKAKYQNILRYANHLKELTEPIKQFDDELWFSLLEKATVKEKSIIYQFKDGREVEIEL

SEQ ID NO: 24643 - protein, 430 aa, synthetic construct
MQIEPVVFENKSIAKKKNVCAYARVSMNDDGMLHSLNNQILFYKEEILSHPDWNFVGVFHDKPTTGTKEDRPEFSKMLKLCEEGKIDMIITKTISRFARNTVTTLKWSRELRQRGIDIYFESENIHTISSNSELFLSLYAAIAQAESLSVSENCKWRIQKAFQEGILTPIKILGYDFESGSLKVNEKEALIVKEIFNLYLDGKGTNYIANELNQRGIKTKLGCEFTPKAIHVILINEKYCGNALLQKWYSKDHLTKEKVANNGEKDSYFVEESHQAIIDKETFEKVQIEMSKRAMKYAHECKCREYPFTKKLKCGICGKSYRRKIVHGKPVLICTTYDRKGKSMCPSKRIPEEILMKVSANILGIDEFDTDIFNDMVSFITVYNGNRLIFNFEDGTEQETYWKDKSRSESWTDEMREKARERQYAKCSNN

SEQ ID NO: 24644 - protein, 545 aa, synthetic construct
MARKKNIAAGQNAVIYARYSSHNQREVSIEQQVRECMKHAAELGLHVVGTYEDRAISGKTDKRPNFQRMMRDAEKGKFQAVVAWKSNRIGRNMLQAMVNEAKLEDCGVKVFYAEEDFDDTAAGRFALRNMMNVNQFYSENMAEDITRGLYDNASKCMANGRQPLGYKRGEDGRVVLDEANAAVVREIFTRVAAGDLFVDIARDLNAQGIKTSKGANWNKGSFQSICQNERYRGIYIYGDVRVADGIPRIVSDDLWYRVQEAMRMKKNPVGTRHRVGAEDYLLTGKLRCGHCGSYMTGVSGTSRNGELHYYYTCQKRRTEHACDKKNIRRDVIEPAVAQAIKMYCLTDDVIAWIADRTVEYWEKHDNDLQIEALEQQLEENKKATSNMLKAIEMGIITEATRTRMVELETEQSRLSVQLNVAKEDVVKIDREQIISYLELLQQGDIHDRDFQMELFKNFLVAVYVYDDNRMKLVFSCMGDQNSVEIPLETGEDPPDGGLSPDAKMFVLTPDSSTRSERHHTLCGAFFVLHCSRKTHKNFCPLPQPA

SEQ ID NO: 24645 - protein, 408 aa, synthetic construct
MARQKVDVIPASVRSVQNGGQLKSQTNIRVAAYCRVSTGDESQQTSYTTQKAFYKDLITRKPGWIFAGIYADKAKSGTNREHREEFNRMIKDAMDGKLDYIVTKSISRFARNTIDSLTCTRELRQLKPPVGIYFEKENIDTLDAKGELILTILSALAQDESRSISDNIRWSIQKKFQSGVPHINLKRMLGYELGANKQWVIVPEQAEIIRYIFDRFVKGQTANRIAQELNQMEKFTVNGKKWSASSILIVLRNEKYVGDIEMQKTITKDFLTHRSSINKGEAPRYYVKNHHVGIIDRVTWDKVQTMLFEKPRADMTKGPGKKKVKSIKGSPFGNLRCGAILENGPDAGKPCGEGFFRTTYTGVANGYSDERSLKATGEDTGEYLEKYTYSYPVWRCKRKVGERDGEPP

SEQ ID NO: 24646 - protein, 573 aa, synthetic construct
MAKVKLPDKPRVAIYTRVSTLHQIDKDSLPMQRQDLINYARLILNTEDYVVYEDAGYSGKNTDRPKFQEMMQQVRLGMFTHILVWKIDRISRNLLDFATMYSELKQLGVVFVSKNEQFDTSSAMGEAMLKIILIFAELERNMTSERVTAAMLSRAANGQWNGGRVPLGYDYDPETKTFTINESEAAVVKIIHDKYEQERSLVSLARYLNGHGYRTRTGCTYSPSTLLIILRNVFYCGDYRYNVLKDGDRQKRKKESEWITVKDHHPAIISREQKEEIARILKENRRLECERRGIYSKKKNVHVFGGLVICGNCGHAMTSTIRPADQDGIRWSVYVCPTKRRSEYLCKGRATSEVVLGEFVFNYILNMLNVQKNFDSISSLEDMEKMLLSGSTFRDVDGIERAGLDDLYNMLASGLTEKAPFDSSVEVRKKPVVSDIELENLNMEKTKIERAAERLQNLYLYSDDSISQKDYIVQREKLMSQLAEVNEQIGMVMSNADEKDVSDEEFVHAASKFILTQKLEGRTYIYYKRLATTVSREVLRSFVMSIIENITIYDGRVQTIVFKNGLSHTFILK

SEQ ID NO: 24647 - protein, 499 aa, synthetic construct
MNVVLYMRYSSDRQTEQSIEGQKRVCMDFCERQGYNVVGEYIDRATSAYKETAKRTNFCRMIRDSSNGLWQGVVVYKLDRFARNRYDSATYKVRLKKNGVKVISATENISDSPEGVILESVLEGMAEFYSKELSQKVSRGLNESAHKCNSTGGAIPLGYKTVDKKLTVDEPSAQIVKEAFDLYAGGATISEICEKFNSQGYRTKKGTEFNKNSFKSMFRNEKYIGTYTYKDIRIEGGIPAIIDKETFETVQKRLSANAQAPARGKARVNYLLSQKLFCGHCGANMIGESGRSKTGETYNYYSCSTRKRFHSCKKRTIRKDLIERIVAENAMRLITPEMINTIADMAIKCNREDIESDAIIPALTADLKEINTSIKNLLKMVERGVESETLDLRLKELEKRKKDTELRLDAAKSEYLTLDKTVIVGWLSQFLSGDIEDEDFRRHLIDTLINSVTVWDEPDGGYKITTVYNLKGNTQTYRVNADGSSDMKRNSPPKKRQFS

SEQ ID NO: 24648 - protein, 532 aa, synthetic construct
MTTERKKKTTEEKVKRNTTKKASNTTRNTQPKKNSKKKTNNLPLALPDFQTFLESDKPLDEFLKITACYVRVSTDAQAEQGYSIPDQTAKLQAFCTVKGWENVKFYTDPGFSGSNLNRPAMQELIADAMAGRLKAVIVFKLDRLSRSQKDTLYLIEDVFLPNEVDFVSISESLDTSTPFGRAMIGILSVFAQLERENIYLRTRIGMKGRISSGFWRGGGNIPFGYDYDKDKKTLVPNADAPKVQQIFNLYIKGYSCQKIADMLGLCNDMMVRNILKRRTYCGYVNYKEEEYPGVHEPLISEETFDIAAAEYDRRSRAGLNACGTNTYYLLAGLVYCGDCEARMRYMKWGKYFKIICYSHTSKASMVKNPDCPNMGFLASDIEELVINKLFGIGSGVPLEEFEVKWRSPNTREIIEKRISDATTKLKRLYGLYSESGDSVIHERIFAVRNQIHTLQQELDNEDKHSIRDSHVSYVRDRIKNVGDIWPHLTPMERQTLIRDCVDKIIIHHDGSVEIFFSFSTFAEDKQCIEDEN

SEQ ID NO: 24649 - protein, 583 aa, synthetic construct
MEVEIIKANPVIPGDDSGIDRSSRMRVAAYCRVSTDEEDQIKSYNSMVRYYTDLIKSNKEWVMAGVYADKAITGTKVDKRENFQRLIDDCLDGKIDMVIAKSIPRFARNTLDTLKYVRMLKERNIDVYFEVEKIHSLKDGEFLLTILSSVAQQEVENTSAYVRKGLKMKMERGEMVGFQGCLGYDYDPVTKTLSINEDGAEDVRYIFDRYVAGAGGCMIARELNEMGKRTIKGNRWSVSSVMGIVKNEKYKGDLLMGKTYTVDAISKRRLQNMGQEDRYYIKNHHPAIVSEEIFDKAQEIRNRRGGNRCKPAAESGARIKYSRQYAFSSMIECGYCGKIASRRSWHSNTNHTKTIWQCSNSTKNGKQNCPESKGVPEEVLEKAFLESYRMLCDNNNDVIDEFIKRVDKALSEDSVESKLAKAKTTDTNLRSKRSILLEKYLDGSVAQDIYETKDLELVRKLAANDAAIENLKNSVNIEKVHRIRLKEFRKVLEENRYLERFDRDVFESLIEKVILGGYDEEGNSDPYKVTFIYRTGYKDDLYGCKTCYSNTSTNKKCSNSSDEVKPVCSNCSDDTCRNHRENA

SEQ ID NO: 24650 - protein, 464 aa, synthetic construct
MARSVTVIPARSQKVRTGHKAVQEKKIRMAAYCRVSTDQEDQLHSFEAQVEYYTKYINDHENYEMAGIYADEGISGTNTKKREQFKRMIADCEKGKIDLVITKSISRFARNTQDCLMYSRKLKNLGIGIIFEKENINTLDSTGELLFTILSSLAQDESRNISENCKWGIRTKFKNGEMHLNTFKFLGYDKDENGKLVINKEQAKTVRRIYRDFLIGINPAQIAKELTEEKVPGCNGQTKWYPSTIVGILKQEKHMGDALLQKTYTADFLTKRQVKNNGEIAQVYVKDSHKGIIDKQTWNAVQEEFERRERFMKDHGTDRYSYGADCIPFCEKVFCGECKSLFTRHSWRSRGIVQWQCKNHRKDGKVACTNAYVDNADLEKGFVKAFNRLVTDRDKHMERWQQMKSDGTPLEKIRAGQMMEAVGNEPLTRFVPEIAQLVLCEVTVLGAKKYEFFFQEGSRVKVSV

SEQ ID NO: 24651 - protein, 502 aa, synthetic construct
MEIQIREGSREQKRKLKVCAYCRVSTDADEQENSLENQVRHYETVIKANPDYEYAGVYSDFAISGFKEKRPGLQKMLADAEKGKIDLILTKSVSRFARNTSIVLEATRKLKELNVGVFFELQNINTLSGEGELMLTILAAFAQAESESGSVGAKMVYQRKYEAGIPVQYLERSFGYTKDERGIFVADEAEAVWVRKIYEMAADGYTPAAIKRYLNENGVKTVGGAEWIDSTVFRLIENEIYKGDYIMHKHFVNEERKLVRNRGEVDAWYIEDDHESIVSPELWQRAQDALEAKRDYLAEGSVIEEFTEENYPYMNKIYCAKCGYPLYKRIYSKGNRLNWGCSGMKRYGKSFCDGINIPDGVLRSAWHFEENTYIDEKASDKGVKEFSYLKERSWKRRHKKKQPPSIPENTEAEYPYREKIFCGLCGSRLVRHVNTKNHKVIWVCNGRKRKGKDFCDGTRVPDTIIKGWGEIKKDIYIQRKDDKNGKKRYSYTSKKPKGADRA

SEQ ID NO: 24652 - protein, 486 aa, synthetic construct
MRRVVIYVRVSTQEQATEGYSIGEQLERLRLYCQAHGWILVEEYVDPGYSGANLDRPAISKLISDIGSGTFDTVLVYKLDRLSRSQKDTMHLIEDVFMANNIDFISMSENFDTSTPLGRAMIGILSVFAQLERDQIKERMGMGKEARAKEGKWQGGSTVPVGYEYDVSTGELIVNEYEAMQVREVFNLVLSGMPYKTIANKLTAKGYTYNAISGHVGIWDANRIKYVLTNKLYIGYIRYKDTWFPGTHEPIIDTETFEKAQLLFKERSASNVMHIKKRQGQISYLGGLLYCKKCGARYARNSGRKWKNNEPPLYYSCYSRSHKVPKMIKDPNCKNKTWRMAELDNIVFAEIKKLALEPEYITTIKEREKTKQDTSNKADILRKEIRKIEEQVSRFLDLYGLGAFTIEQVTAKVQPLNQRKQDIEQELTELVTDETILSEDETREIVRNFEEVLERSDFNEIRMTIDSLVRYIELNDDTVYIHWKFT

SEQ ID NO: 24653 - protein, 468 aa, synthetic construct
MARQILHIPAQQRSVMVGGARMPQKKLRVAAYCRVSTAEEEQLNSFENQVAYYTAYINNNPEYELVDIYADEGISGTSTKRRDEFNRMIADCQAGKIDLVITKSISRFARNTQDCLNYSRKLKDMGIGIRFEKEGINTMDGSGELLFTILASLAQDESRSISENTTWGIRSLYKKGILHMNTNRFYGYDKDENGHLIINPEQAKIVKWVFESYMDGTSPDVLARTLNERQVPGCMGKPKWTVDTIMGILQNEKHMGDTILQKTFTADFMTKKMVKNEGQVAQYYISDDHEPIVSKELWQATQQEIRRRKEYMKVHGLRTMGRYTDAQPFTNRVFCGACGELYWRRRMQRLGYVKYQWKCKQKCLGKESKGCINVDIWETDLHQTFVMAWNSLLEQRKTLLENWNAQLASDDPLVRFRAKQFMELTKGNPLDEVDFTLVGKVLDHADILPTGLVRYTFLDGTTIEVTFP

SEQ ID NO: 24654 - protein, 602 aa, synthetic construct
MYITVTLDPNGIYDAYLRKSRADMELEKLKKFDTLKQHEKFLKDRANQLGIKIRKIYREVVSGESIQERPEMQEVLKNVETGTIDGILVVEVERLTRGDAKDQGTVTQTFKYSNTKIITLNKIYDPNSDEDEEYFEFGLFMSRREYKTINRRMQRARIANVLDGKYCASEPPFGYKKVRVKYGKGYTLEPVSEEAEIVKEMYQKRADGMGYDIICNWLNTLDFKPKKSDVWTPATIKGMLSNPIYIGKIRWNSNKQKKILINGQIIKKRKKGNNEDLILVEGLHPAIISNELFDIVQGIKPNKASTKHNTELQNPLATLVKCADCGRSMQRRPYYDNKKQEPKLRRKYDIDKEKLRLCLREHKGEYSLRDIATALKVRKHCVDHWFASNQSKFTMPYADKWEELKKLLNINTTEFDKAITTYESNLIEPHEDTLICPKAHCTNIGSNLAFVEQETIKALQEYISSQKELLATYNPAEEDDNVMFVSLSKELDKYNKQLDKAYELVEQGIYTPQEFTKRTKTIKDKITNTEKELNKYQIKLNKDRIEKLLPKIEKVIDSYYKVTSAEKKNKLLKSVISYIEYKKEKGGRGYESNFSIVIHPKF

SEQ ID NO: 24655 - protein, 523 aa, synthetic construct
MASQKYKKKSDNLIITGVIYARYSSHSQKEESIEQQIEECTAFAVTTGISVVGIYADKAISGRTDRRNEFQRLMRDAEKRKFDVVIAYKSNRISRNMLNALQYESRLDSFGIKTLYAKEEFGNTAAGRFALRTMMNVNQFYSENMAEDIRRGLKDNAAECKVNGSLPYGYKKGEDGKYAIDEPRAAIVREIFSKVVDDVPYADIIRSLNDRGILTKTRKPFNKNSFNRMLRNERYIGIYEHSGVRVVGGVPAIISEEVFYAVQRKLQEGLNSEGAKRKSNSDYLLTGKLYCGECGSPMVGYAGTSRNGTLHYYYTCKSRGNDGCTKHNVRRDFIEQFVVDLTRACLSRADVTDWLVSGYIELKKQAQETSDVPVMEEELSSRKKALDNIMKAIEAGIFNETTSARMQELETEIHDLERSIALGKAMFEEPVDGERMRFYLEKLRNGTPDNQAYRKELLRTMVKAIRLWDDRIEIEYNFTGTDGDGNNYRVVTEFLKGDSGSASGVHTEPPQPHQLKKLHFSRN

SEQ ID NO: 24656 - protein, 558 aa, synthetic construct
MNKLRAAAYCRVSTDRAEQSGSLASQRSFFDDYIRNSDSMTLVGVFYDEGTSGTTTLNRYGFNKMISLAVSGGIDIILTKEVSRFARNTVDTLNITRMLRAKGVGIIFINDNIDTRDSDGELRLSIMATIAQEESRKISERVKWGQQRKMEQGVVFGRSCLGYDVKDGKITVNADSAEIVKRIFTEYTVLLKGAESIADRLNAEQIRTVNGGRWSGAFIRKVLRNVKYVGDLEQKKTCTPDFLTHKKRLNSSEHIYIRNHHEPIISRELWEQTQAEISRRKPTDTSRHSDRYVFSGKVYCGVCGSVMVSRVKTLKNGKIYHALRCSGRIGGKSCNNETLNVTALKACIKRIFTDMPIDKTAVINAVIKGLSRTDKPDIPALRRKIETLNAKKRRAVDLMLDGLITQQELIEQKSYYDSIIEKLSQEISSDRSVFETDKIRKSAEKFLDFTSDPIWLLVIRADYIHGTLTVYLNGIEKGFTTCFTATGRRDSYRVITGNTVRSQGIIPGTMQVQKNWFHHDVNDKSIKKSAPDTFQVHFVLICRLFCFLFVAGYLAPTL

SEQ ID NO: 24657 - protein, 522 aa, synthetic construct
MGNVMLIPARRQVGSNARKQEEEKPKLRVAAYCRVSTDSDEQATSYEAQVEHYTEYIQKNPDWEFAGIYADDGISGTNTKKREEFNRMIDDCKAGNIDMIITKSISRFARNTLDCLKYIRQLKDMNIPVLFEKESINTMDAKGEVLITIMASLAQQESQSLSQNVKMGLQYRYQQGKVQINHNRFLGYTKDADGNLVIDPEQAETVKRIYREYLEGLSMDKIAAGLEHDGILTGAGGKKWHTSTVNKILRNEKYIGDALLQKTYTTDFLNKTRVKNNGLVPQYYVEGDHEAIIPKDIYLQVQEELVRRRVVKTSANGKKRSYSCNHCFSQIVICGECGEMFRRLHWNNRGVKSIVWRCISRLESTGLECHARTINELVLQDAVVKALNQMLSDKSSYQAQLQLNIAAVIRASQATAIDSIDEKLMALQQELIQKANSKEDYDEIADEIFRLRELRQQTTVDTATRDEQIKRINDLQDYISQQTTYLTEFDEALVRRWIKQITIWDDRITVELKSGVSIDVDA

SEQ ID NO: 24658 - protein, 521 aa, synthetic construct
MKKVTKIDGVQKNTAINNKLRVAAYCRVSTGSDAQLESLEAQKSHYEQYINSREDWQFAGLYFDEGITGTKAEKRPELLRLITDCEARRIDFVITKSISRFSRNTTDCLALVRKLQSLEIPIYFEKENINTGSMESELFLAILSSMAEGESASISENAKWSVKRRFQNGTYKLGYTPYGYDWNGKTMIINPEQAAVVKRIFADVLSGKSTNAIADKLNEEQVPTKKNTNWTSSTIRGILANEKYTGDVIFQKTYTDENFNRHTNYGEVDQYMAPDHHEAIISHTDFDAANALVNQRAAEKGIKKGSDKYQQRYAFSGKIICGECGDTFKRRIHSCTTYKYVAWACNTHLKDKESCHIKYVRDDEIKAAFITMLNKLIYGYRLILTPYLKVLENSSGDEAIQRIQHLEQLIAQNSEQREALTKLMAQGYIDQILYNQETNALLLQAETYRSDIEAITIGMTGDAAKVTETNLLLHFVSHTDMLTTYSEELFENYADHIEVISRNEIRFVMKCGLTFTERIGN

SEQ ID NO: 24659 - protein, 578 aa, synthetic construct
MRKVSKIEPISPSLPPRKKVAAYARVSMETERLNHSLSAQVSYYSNLIQSNPEWEYAGVYADNAVTGTKSSSREEFQRMLEDCEAGKIDIILTKSISRFARNTVDLLEAVRHLKELGIEVRFEKEHINSLSGDGEVMLTLLASFAQEEVRSLSENVKWGTRKRFEQGIPNGRFLIYGYRWEGDHLVVEPEEAKIVRLIYDNFLKGLSAEATEKQLEEMGVKSMKGMHFPNSSIRAILKNITYTGNLLFQKEYTLDPISKKTRKNHGELPQYFVENTHEAIIPMETYQAVQAEIARRQELGALANWSINTSCFTSKIKCGLCGASFVRNTRKNRAKTSQLGERYTFYGCGTNKRKGAHCFSGTIREDVLKEECAKALGLPEFDEDTFSGRVAKVTIPATGTMVFELTDGTSFEHHWSRNAKKESWTAERRKAVSEYRRSRETGWKCYHTFTHFIKCGRCGANYRCQTHKRVDGTVVRSWYCSSPTAVDCSKVGIREDTLKALIADVMGLPEFDEELFNQQLAYATVPADNEIAFHFRDGHEVSRTFAQKRQMPRHTEERKKHMSEVMKAKWRERHAEND

SEQ ID NO: 24660 - protein, 528 aa, synthetic construct
MPKTTKKITTIPATLTRFTATPITEQKKRQVAGYARVSTDHDDQFTSYEAQIDYYTNYIKSRDDWEFVDVYTDAGITGTSTKHREGFKRMVADALAGKIDLIVTKSVSRFARNTVDSLTTIRQLKENGIECYFEKENIWTFDGKGELLLTIMSSLAQEESRSISENCTWGQRKRFADGKVSVPFQRFLGYDRGPDGNLVVNREQAVIVKRIYSLFLQGMTYHGIADTLTKDGIPTPGGKKKWSISTVKSILSNEKYKGDALLQKSYTVDFLTKKTKVNEGEIPQYYVEDNHEAIIDPEVFEMVQREMAKRGKGKKYHSGVHAFSTKIKCGECGSWYGSKVWHSNSKYRKTIWQCNHKFDGDCRCQTPHLTDEEIQLHFLSAANKLLATKAAVIANGREMQALLFDTTELEAEQAQLLEETQVVSDMVQQAIQENARTALNQTEYQKRYDSLVQRFDRVKTRLEEVTAEIQERQTARANTGTFLNAFEQMPDALAEFSLESWHSMVDYATVYSADDIRFTFKNGQEIQA

SEQ ID NO: 24661 - protein, 546 aa, synthetic construct
MEETIKAVGYARFSSSMQREESITAQKRYMMMYAKRNNMEVIDWYCDEAKSAKTVNRPAFQKMINDAKNNPEFKAVLVHKTDRFSRNLSDSIQYKKILEEYGVQVIFVNERFEDNPESHLLYHIMGSVNQFYNENLAREVMKGLKENAYQCKFTGGRPPLGYDVDKDLKLVINEKEAEAVRLIFEMSAEGYGYGETIDKLNILGYKTKKGLPFVKNSLYEILRNEKYKGTYIFNRSCSANALNKRNNHRRKPEEEIIRIENGCPAIVSSGLWHRANAVKKATRSSYTNAKNTYLLTGLIHCGECGGKFHGNIRYNKNNTNLVYRCSAKKNKRKCESKEIRCEYLDSFVIDKFVEFFFNGDNIKVITKQLNEQYSKSCISDLEYNEAKSTLKILEKSRNNLVEAIAKTGINDIISDKIKEYEEQIKKTAEFIQKYEKQKIDRVITEDEIREQINHLKDYFYNPKNLIRTKYVLSQYIGRIDISNENVQVQFKVSMSPSDNTDGDCFCVHTEMIKRKYLFDYVCEKVDFEQWNIEKLNKSESEHRKGA

SEQ ID NO: 24662 - protein, 681 aa, synthetic construct
MNSETSTNKILRAVLYERLSKEDGDKLTKEEKSESIKNQDLMLRSYAIEHGYEIVGVYNDEDWSGADSSRPQFNEMIKACEAGEIDVVIAKTQSRFARDMELIERYLHNKFLEWNVQFKSVVDHIDNTRRETKKTSQILGLTDEWYLEDTSINIKETLRAKRASGEFTGSFAPYGYDRDPENKNHLIIDPVASETVKQIFENYINGMGLKTIARYLNDNFVASPYEYKMSKGSNLKLAYLDNYLVYDYIEKAGLYKADISYINESREILHNLISYNIFSKDKKNFDNKCKLYLKNYSEKKMKIYYTTDNDIDYNNFDVKKWTLLRKDDLIPFDTTCIATVVEMLDRKHTINYQFDILLENNIEHEKYYFDIIQITNDEKKIIDYEKNIRKKCKWCDQMIKKILTDEVYIGNLVQSKTTNVSYKNKKKVKKDKEDWIRVENTHERIVSLEQWLKVQERLKQRVRANKDGYYNPFVHKLYCKCCGKVYCRTGDSNHVYFRCKDQQEKYKSCDNRSNISKDELNNFALGKINELLNRFYNEEQLKEFKEKDTDSDLFKSRINSLNKELIDVNKELQNKKTYFQHLYEDKINGLLDTDEYVILKSKYKDDSEKLENRAAKIKEELKLINDKKAILKTKETVYSKYKHIECIDIDIVSDFIDRIYIGKYDKETNTRDMKIVWNFES

SEQ ID NO: 24663 - protein, 528 aa, synthetic construct
MSRTAARSVTVIPPTVNPVTHLSKATMQKRRVAGYARVSTESDEQFTSYEAQVDYYTRHIKSNPEWEFVEVYTDEGITGTNTKKRDGFNRMIEDAVNGKIDLILTKSVSRFARNTVDSLVTIRQLKEKGVEVYFEKENIYTFDGKGELLLTIMSSLAQEESRSISENVTWGQRKRFADGKVNLPYKQFLGYRKGADGFPEIVPEEAVIVRRIYSRFMEGLTPCAIANELTADGILTPAKKQTWQTSTVESILHNEKYKGAALLQKCFTVDFLTKKKKQNEGEVPQYYVEHSHEPIITPEEFDKVQAEFERRKRISRQYSGKSIFSSRIICGDCGSYFGSKVWNSTSKYRRVIWQCNGKFKGEHKCETPHLDEENIKAGFVAALNTIIDSKDNILEDCRLMQTTLTDCMGIDAEIESLLEEIDVVTELTKRCIAENSQMAQNQEEYAARYNGFVERYEKATARLEQFRTTKAERESQAEAIGAFMFEVQELDTLTEFDEKLWLTVIDTVAVHADGRMTFKFQGGTKTER

SEQ ID NO: 24664 - protein, 521 aa, synthetic construct
MGNVMVIPAKRKIGNTNRKKDTKPKLRVAAYCRVSTDSDLQATSYEAQVEHYTEYIKRNPDWEFAGIYADDGISGTNTKNREEFNRLIKDCEAGTIDMVITKSISRFARNTLDCLKYIRRLKEKNIPVFFEKESINTMDAKGEVLITIMASLAQQESQSLSQNVKLGLQFRYQNGQVQINHNRFLGYTKDENGNLVIDPEQAEVVKRIYREYLNGYSMDKIASGLEADGILTGAGKKKWRTSTINKILRNKKYMGDALLQKTYTTDFLNKTRVKNNGIVPQYYVEDDHEAIIPKEIFMMVQEELARRRVVKTSANGKKRSYSSNHCLSQKIICGECDEMYRRIHWYSHGRKTVVWRCISRLESTGVECHARTIHEKDLQEIVVIALNELLGNKSKYQKLLQQNIATVIRASAEKTTEEIDKKLIELQKELVKKANDKNSYDEIAEQIFELRDKRQQFTMDTAQRDEQLKRITELQDFIKDQTTDLKEFDETLVVRWLKQITVYPDHCIVELKSGLKVDVER

SEQ ID NO: 24665 - protein, 529 aa, synthetic construct
MKKVTKIDKVQNAPSQKEKIRVATYCRVSTSNEAQLESLETQKSHYESYINSRSDWELAGIYFDEGITGTKKDKRPELLRLIKDCEANRIDFIITKSISRFSRSTTDCLALVRKLLNLNIPIYFEKENINTGSMESELFLTILSSMAEDESASISENKKWSNRKQFRDGTFKTMCPPYGYCYNDGTMWIFPEQAEVVKRIFSDVLSGKGTTAIAKELNNDGIPSKQGKKWNQTTVKKILSNEAYIGDAIFQKTYTDEYFNRHINNGEKEMYYIQNHHEAIISKEDFKLASAIISQHATEKNISSNDNKYRNRYAFSGKIICSECGNTFKRRLHTNTYSKYCAWCCNTHLADKSKCSMLYLRDDDLKIAFATVLNKLIYGHNLILKPYVEALKNISGNKDFARIQHLEQLIKQNKEQQEVLTKLLCQGYIDQVLFTNETNSLLAQSSKYKKDIDVINSTINSDNSRHYEAEKLLYFTEHNTMIKEYSENLFERFVDHIIVYSRHSVGFVMKCGLTFKEVIWWVIHHLVIK

SEQ ID NO: 24666 - protein, 503 aa, synthetic construct
MLRAALYARFSSENQREESILAQFRDSTEYCKKHNYAIVAKYADEAKSGTTTIGREQYKLMLKDAQKGKFDIVVFHKIDRNARNELDYYITKHKLEEAGVKYAYSRQDIDSTSPEGQMMESMLVGMAAYYSRNLSNEIKKGLRENAIQGKCTGGRPPYGFSVDADKKLIINENEAPAVRMIFDLYAAGVHYGVIRKRLFNAGYRNRAGKEFTLASIYEILRNRKYVGDLYLGKTLFRKGKRNTHQVSDNVQYFENVIPAIVSREIFEEVQVKLDQNKRRSGAGNAKAIYALSGLIHCGQCGSAMVAHSTKNSRGIKNYYYRCPKGRLIGEEKCPQKFINRDDIENTVYQLIRKLFTAPDAHNQIKRIIAKNNIGVKVPDYTEQIKRLKKQESDASKRLDKLYDLYMTDREDEFTSAKMAQIKEEILRLRTQIKEAEDRQAIAQSTTFDIDKIIDTFQKQLKQKQSPEFIKTLFELAVKNVTVYPDKIKVALLVTQERFELPTP

SEQ ID NO: 24667 - protein, 612 aa, synthetic construct
MRAAFLIRCSTKKQDYERQVNDLTRLAKKFGYTSSDNMIFGEHITGKDDASKRDRQSIQRLKDAAINKEFDVVLVSEVSRMSRDPMSGRLYVRQLINMDIPVYFRDIDTWTIDPVTGKKVRDAETIIGAAFDAAWKYIKSMKTQIASGRRDELDNNQMSIGQPFFGYKRYGGRDKGKKNSWVINDDAAKVVVDVFEEYVKDGATLKSTALAITAKYGEQFNKKFSIGTIEHILTFEPYCTGIKVVSLTDPDTEDVDEFEVEIPTIITRAMFDKATTKRATNRTARTPYPKQATYILSKLLKCPICEHSLTPQKRGGDKGDKYRLMNGKVAIRWSCMSGINNATDCSSRITISNEKLEAIIWGLVKQELIGFANLNDEDRVAKVEELTDKITNLEMNIANFTSHISNMDRLIERAYSAYMDAPDSVMDIAKDKYYKTLTKCENERAECKDKIEALSAEKLRLENMRTFFNQPTLPKDAIEKAESDPIKMRNLVMELIDKIYPYRITTYVSSATNRIMRNGIVLLEVYTINGIYNVLYDGNQRNNKVAYYISGVYATFQNGRNKFDAYDTGEYFVISHATLVTETEDVDMLVTFNELIKICMQNGWEIDYTYKM

SEQ ID NO: 24668 - protein, 684 aa, synthetic construct
MSILQTIKTIIRVVLYLRLSDEDKNKLSKEELSQSIKNQEIMLRDYAEEQGWEVVGVYNDDDWSGSDATRPDFNRMIEECKNGNVDIVLCKTQARFARDMELVEKYVHNLFHEWNVRFITVVDRIDNARKETKKTSQILGLTDQWYLEDTSLNIRETLKSKRKDGQLTSSFATYGYMKDPENKNHLIIDPISAEVIKRIYDEYLSGTGLDKIARRLNEDKILSPYEYKLLNGCKLKIPVIKDYVNYGYIEKTGTYMLDVSFTNKEEYILKDLVSFNYITTDMKSFNNKCDIVLKKYTNNRTKIYYSENDNIDINNFNIDDCILLNENDVIPKTAKVIISHTKELDRTHTINYQFEITLKENREHEDYYINICGKATDEIKKSDFIHNIRKKFKWSSSTIRTLLTDEVYIGNMVQFKSTTVSYKNHTVVWNDDETRIRKDNTHEPIIAKDIWYTVQERLENTARSCKGGTVHPLCNKVYCSNCNQIFTKTGARRTDGTGYLCCKDKKTNWSNCDNKASIREDQLHQFILEKMNEMLKKFYEEDDLKEMQNEVIEQDLYKDKLNSLEKELQSINKELQGKSTYFQKLYEDRTNGILPEKEFLILMNKYKDDNEKLEERQKIVKKEISSTLAKKETVKTKKNIFKKYRHIEELSIEIVEDFIDKILIGSYDETTNSRDIKIIWNFTI

SEQ ID NO: 24669 - protein, 577 aa, synthetic construct
MEVKTMEVKKIQKIEGRIDRVTGARITERLRVAPYCRVSTDSEEQKNSYNSQLKYYQELITRRPEWVFVDIYADEAISGTLDYKRTDFMRMINDALNGKIDLIITKSISRFARNTLDTLKYVRMLKEKNIAVLFEEENINTLEMSGELLLTILSSVAQQESENISEHVKLGIKMKRERGELVGFNRCLGYKANYETNTLEIVEEEAEVVRYIFDRYIQGAGSTVIARELNELGKKPIKGNKFQESSIRGIIRNEKYKGDVLMGKTFTIDAISHKRVKNYGEEDMYYIENHHEPIVSVETYNKAHEILEKRAENRRLGHGKGFERYSRKYAFSSMIYCGCCGKYYTRRNWNSGTHNSKRVWQCTNLVKKGKDLCPKSKGIPEEILEECFLEAYKLLVNNNSEIIEAFISNMETTLNEIGKDGILEKIDKEIEKLNYKMNNLVDMKLEETITNDQFEAKRIKIAKSLEKKQKQRAEIEDEIQNEEAINLRLEKFKNIFANRTILEEFDREVFECLIEKIIIGEEKEDGTYDPYTIKFICRGDSNSQSMFLSSNQGNSSMSLSDQPAMWSAYQCYSIYSK

SEQ ID NO: 24670 - protein, 413 aa, synthetic construct
MPAQPKAKRVAAYARVSSGKDAMLHSLSEQISYYSKMIQGHPGWLYAGVYSDEALTGTKDNRSGFQLLLADCRAGKIDMVLVKSISRLARNTVTLLETVRELKSLGVDVYFEEQNIHTLSNEGELMLTILASYAQEESLSVSENQKWRIQKNFKEGKPWNGTMLGYRNVNGTLTIMPEEAEIVKRIFDMYLSGMGIQSIANTLNREGIPTRLGAKFKRSAISKMLRNEAYAGNLLLQKTFKDNHITKRTIINRGELLMYYVEKAHEAIIPSETFQKVQEMITQRAEKYAPPSLEKPAVYPFTSLITCAKCGKHFRRKTVRGKPIWICPVFNNEGKDACAAKQIPEEILEEITADMDMENIAGITADDGNRLLFHFTDGTVTERTWRDRSRSESWTDEMRQKARERTKARNQKK

SEQ ID NO: 24671 - protein, 529 aa, synthetic construct
MTERIVTVIPATKAPIHRIAGSSAKKRRVAGYARVSTEKDEQYTSYEAQVDYYTQFIQSHARWEFVKVYTDEGISGLGTRKRDGFNEMIDDAMSGSIDLIITKSVSRFARNTVDSLVTIRKLKEKGVEVYFEKENIYSLDGKGELLLTIMSSLAQEESRSISENVTWGQRKRFSDGKVSLPYKQFLGYECGENKNDPPVVNPEQAVIVRRIYRTFMEGKTAGAIAKELTEEGIPTPAGKNKWWASTINSILQNEKYRGSALLQKCFTTDFLTKKQKVNEGEVPQYYIEHSHEAIIDPLEWDAVQDEIRRRKEIGRTYSGTSVFSAKLVCGDCGGRYGHKTWHSTDKYRSAIWRCNQKYSGGKCRCGTPVVTEEEIKDRFISAFNRIISSQKPYIKACKTAKQALTDTTSIDAEMADLLREIEVVSELTRKCIEKNSAVAQDQKEFNSRYNSYVEKYETLKERYDSLTVERERKTEKAKAIDRFIHTVESRDGLLTEFDPHLWLTTVEKVTITSDGKMLFRFFDGTEVSG

SEQ ID NO: 24672 - protein, 535 aa, synthetic construct
MAKKKKPAGGNAIIYARYSSHNQRDVSIEQQIEACRKHAAELGLTVVATYEDRAISGRTDNRPAFQRMMRDAEDGKFSYVLAWKSNRMGRNMMQAMVNESRLMDCGVKVFYAEEDFDDSAAGRFALRSMMNVNQFYSDNLAEDVRRGLMDNASKCMANGKQPLGYKRGEDGKIVVDEPAAAIVREIYARVASGEMFMDIARDLNRRGVKTQSGSEWNKSSFNVLCRNERYRGIYIYGETRIEGGIPPIVDDVLWYKVQEVIKVKKSKNRHRRPSDEDYLLTGKLRCGKCGGYMIGMSGRSKTGDVHHYYACQNRRVGRTCDKKNIRRDVIEPAVAQAIKQYCLTDDAIEWITDQTIAYWEDEDRKLQIDSIENDLAAVQSSISNVMKAIEMGVVTETTRDRLIELEKQQTDLKSKLALAKEEIVHVDRKDLISSLLAFRHGNVHDRAYQEKLFNAFLIAVYVYDDDHLKLVFNSFGKDDTVNIAIGLEESNDSSGLLDVSKSSPILSNGQPEQSHLRKLRWLFCLYDSARKNYYR

SEQ ID NO: 24673 - protein, 537 aa, synthetic construct
MQIKVIHPSVERELERKKVCAYVRVSTDSDEQEDSYENQIRYYKDKIESNPDWKFVGIYSDLGISGYKEKRPGFMNMIKDARNGGIDLILVKSVSRFARNTETVLKYSRELKRLGVGIYFELQKINTLSGEGELLLTILAAFAQAESESNSGNVSLSIRRKFEKGELNFPISKIYGYTEDADGNPILDEEKAKIVRLIFDLAEKGIWVTKIAEYLNKKQIPGIAAEKWNFGQIGKMLRQEAYMGDRILQKTYRDSRRRTRKNKGQVDQWYVKDTHPAIVTREQWYRVQDILLERNEELYDDTPISEEKNLNTHSTYPLSGKLYCPYCGRVLMHRWEGKKRYENWVCGLHRKISKDACPGICIPNRIASSWGEIKEPMTVLKYTDEYGMDRFTAIPKVEYEASEDCPYEVVKPEPKPERPKKPSYKKAPKPEKPRYTRNVYPLSGKLFCPNCGKVLTHKWNKGMEYWVCSTNRNKHRSENFVRCKGMYFPAEAAKDWGEITEPVTVIAYKNEYGHRLYTAMPKEEYERSADCPYRKED

SEQ ID NO: 24674 - protein, 465 aa, synthetic construct
MAREVVHIPARPQVVGTRTTPEKKIRLAAYCRVSSEQDEQLNSFENQVTYYKEYISSHPDYELAGIYADEGISGTSTKRREEFNRMIADCEAGLIDMVITKSISRFARNTQDCLMYSRRLKDLGIGIRFEKENINTMDSTGELLFTILSSLAQDESRSISENCQWGIRSLFKRGIHHLNTNRFYGYDSDENGKLVINPEQAKVVKWIYESFIEGINPDVIVKILNEKEIPTCMGKSKWTCNQIKSILRNEKHMGDAVLQKTYTPDYLTHKSVKNEGQLPQYYIKEDHPPIVSQQLWEAVQLELDRREAFMKKHFLKSMGQYTDENPLSHRIICGICGHTFNRRTITRLEGRIKVWQCGQHYAKKGEHLCDGRMIREEELYKAFQLAWDHLVEERDNKAKDWKKKMAEGNALEAYRAEQFLRLTADGGRIKEGKPLVSTVLDHIAFERNGDLTIYFLDGSQVCVEP

SEQ ID NO: 24675 - protein, 562 aa, synthetic construct
MKNKKAYVYTRVSTSMQIDGYSLDAQEERIKQYAKAYGIEIIETYKDAGKSGTSISGRNEFIAMLNDIEAEKDKVDYVMVFKLSRFGRNAADVLQSLQVMENHNVNLICVDDSLDSSKDSGKLVITILSAVAEMERENILSQTMEGRKQKAREGKWNGGFAPIGYSLDNGELVVNEDEAKAVRMIFDLYANSDMGANGVSKYLVSLGINKPIRQNGKNPYFSASLIRQILDNPVYNGKIAYGRRKTIKDKTTGKIKLEKSDHYIIAQGNHEALIDDELWNTVQEKRKSQAKKYEKINRGKDERVHILSNLIKCPYCGAGLYGNKSRKRNKNKEGEHYKDYYYYGCKHRQMMNGHKCTFNKQIRAELIEKEVETIITQVVSNPTFAKKIEEKINIQIDTKEIDEVINKHLAKIRQLTGTKASLINQIDSLNFEDKHYDRKYTDLNLRLDAIYDQLEYAEMQLNDSRKRKEAILEEKITSDNIYKILVNFNSLYTVLSDIDKKRLLNEMIEEIQIYDEKTEKDTWIKSVVFKLPLIDNEIDFGLDNKDNVECVVLMSRDSVSRR

SEQ ID NO: 24676 - protein, 525 aa, synthetic construct
MSANVTIIPPRKIAGNTVDKHKDKPKLRVVAYCRVSTDSEEQATSYDTQVQHYTDYISRNPLWEFAGIYADDGISGTSTKKRVGFNDMIHDCMSGKVDMVITKSISRFARNTIDCLKFVRQLKDKNIPIIFEKENINTMEASGELLLTIMASLAQQESASLSQNVKLGLKFRYQEGKVQINHNWFLGYTKDDEGNLVILEQEAKVVRRIYREYLEGASLRDIAEGLEKDGVKNGAGHLKWHLSNIKTILQNEKYIGDALLQKTITTDFINHVRIKNDGTEPQYYVKDSHASIIPRDIFFKVQEEMVRRANMFSGEENKKRRVYSSKYALSSLCVCAKCGDVYRRIAWNNRGVRSVVWRCCTRWENGPSACDAPTVKENELQAATVKAINKVFSIPDEVLDTLNNNIREIIAGNNLSELETVDKKIADKQAILLTLLKAKKDYTKIADEIDELKVKKQQLLIEKAGQEDAKRRIREMEDFLKSECHDISEYDEKLVRKYIKKIKVYEDRFSVTFKSEISVNIERAS

SEQ ID NO: 24677 - protein, 530 aa, synthetic construct
MKMITKLEAKQPDNSLRKIRVAAYARVSTDSDEQLLSLEVQKEHYENYIKSNPCWEYAGLYFDEGISGTKIDKRESLKQLLKDCQSGQIDRIITKSISRLARNTVDCLEIVRKLTGLGIYLYFEKENIDTEHMSSELMLSILSSIAQSESRSISENSMWSIQKRFENGSYVISSPSYGYKNENGKMIIVPKEAEVIKDIFSMALLGKGGHVIANELTAKKIPAKKGAKWSSTTVNAILNNKTYTGDVIFQKTFTDDNFNRHKNRGEKKQYVIENHHEAIISHETFNLVHELRQKRKLKLNITGGSNKYLARYVFSGKLYCGNCHSRLKKHDRHKKDGAYVVWCCTKHIHDTKCCPMKAVKEEYVKSAFLQMLNKLKATSAQILTPFIKSLRNVNNKDGLNKVIELEEKIAKLQEQEQVLSKLLAGGYIEMDSYYLESNQLKTEIDTCLKEKLKLSNSLNGNLTHLNEAQKLQRFVSVTEVFSEFKDEDFLDFVDNVVVKSRKEFIFHLKCGLELEEEVKETWHTSHMVTE

SEQ ID NO: 24678 - protein, 538 aa, synthetic construct
MRTLIYARYSSHLQSSRSIDQQVEVCQERALREGWTVVDIFTDYAIGGGAGTGDAQRPGLAAMLARVEEGDIEQVLVDTTSRIARNQGDSHHIRDRLNFWGARLFTLGDGEIDRFKGAIKGLLDEQQRVELRHNIKRGQRDTVAQGRSPAGIAYGYRTANRIDANGRPVRGLREIDEEQAEVVRRIFSDYAAGISPVAIAQRLNAENIPGPRGDRWRATTLRPDRTRGNGLLQNQLYIGRIIHNRTSKVEEPVTRTKRIRPNPPEQWIIEEVPHLRIIGQELWEDVQRGLQRLEGVPAHKARRARHMLSGLGFCGECGSAYVVRTREYWACTGRREGNNCSNNRTVKTSDYEARVLEGLQRHMLDPRLVAIWVKEFHEERTRRTAEMTRERRTLERKLNESAAKVQRLVEAIAGGAGEFQEIRDALTSAKADRDSAAAQLAELEALPVITLHPAVADEYRRQIQELTAAIADPSARDGAVPAIRQLIDRIVLRPAKGERGIEIEVEGRLAAIVALATGKKVTGDVTVKLERVAGIEPA

SEQ ID NO: 24679 - protein, 490 aa, synthetic construct
MKRIAIYIRKSVKGDENSISLEAQTEVIKHYFKDKNEFIIYKDDGFSGGNTNRPAFQRLMADAMEGKFDTVACYKLDRIARNTLDFLTTFNTLKEYGIDLICVEDKYDPSTPAGRLMMTLLASLAEMERENIKQRVSDSMLNLAKQGRWTGGTPPFGYKVVTIDGGKYLELEDEKNIKYIFNEFINGKGIIKLGNEFNCDKKKISRILHNITYLQSSKDANIYLKQVLGYEVIGQPDGYGYLPYGKYKVVNGKKIKNTDGLKIACISRHEAVIDLDTFIKAQERLKTFEGKKAPRISTKTFLAQMVKCGICGANMLVTLGQKRKDGTRKLYFSCPNKCGNTFKDVSELENDILTTLKDVNFFDEIKKNNNIINKDNSKIKKSMLKELEEKKKILDGLIDKLALVDSNLANIIIEKMNSVNIDINDLQNKIDLLEKEEIASSYNKEDFKLKEENRKHFIEDFENMDMEEKQNSIRGVINKVVWDGKNIIIS

SEQ ID NO: 24680 - protein, 502 aa, synthetic construct
MKKVAIYSRKSVLVEGSVSIETQINMCKDYINNKFPNAKFKVFEDEGFSGGNTNRPAFQKMLRMAQLNEINIVVCYKVDRIARNTLDFLKILELFKENNVELISISEGFDPNTQMGKVMLTLLASFAEMERTNIQQRVKDNLLSIAKKGKWTGGSPPTGFKNGLNGGLEWDKKDMILDVFNMKCEKEKNSNIIKYIKEKYNHNFLGGTLATTLRKPIYVKSSPSVSLYLKTKGYIVQGDEDNIHSYLTYTDKETKYAIVSDIVGLIEPSIWISINKDMDKNISREGNRFSEKFWLTKTVRCKYCGQTFCGQTKTTKTKYYNKYGEEKIYISTYSYYSCRDAVRGKLKTCKNTKRVKQEILESKVSELIHLLKDKKTFNSSYFSNKIDNSSKIDTIKKQIKNIDKTINNLTDKIALLSNEASLIFISKLEELVKEKSILKDNSLQLELQELNSNNKKDSLLVYNNILAFNDNLSVDDKRKIAMSLFKEIIYDPETDLLDVTFM

SEQ ID NO: 24681 - protein, 525 aa, synthetic construct
MYQEISNPMDYHVALYIRLSKEDESEGPSQSVTNQKSLLDEFVQKHRLQVYDTYIDDGWSGINFDRPDFQRMIGDIEAKKVNMVITKDLSRLGRDYIMTGHYMERYFPEHRVRYISLLDGIDTGVESSANDITPFRAIMNDMYAKDISKKIKSVKRDKQRKGQFIGGKPVYGYKMHPTEKNKIIIDEEVAPIVRRIFAMALDGVSCRQIAATLNEEGVPTPAAYCGWNMGRKGPYAGLWSSERISNMLQNETYIGNMVQGRQVKISYKSKKCLHQDRNNWVVVEDTHEPLIDAESFRKVRMLVNSRKRTRSRTYDFLLKGLIFCHECGYPLGVLNRPNAKGEETLYFVCRTYQRFTKNSACTTHYIKEKTVTDAVIAKVREACEDYLTAEALLPAAEKAVKEASQESKTAAEISALQNKSANLTEHLDRMYTDRLSSLLPEEDFQRIFTRIKDERAQLEERIKELQQQQKNPISQTERAKDLVQRYLDTACANRELLVSLIERIELTADREIIVKFRFAELQQTG

SEQ ID NO: 24682 - protein, 571 aa, synthetic construct
MKTTDQPQVKQYVIYSRKSKFTGKGESIENQIELCRQYIAMHFGEDEAEHALVYEDEGFSGGNLERPQFKQMMKDSQKIEFAAIVVYRLDRISRNIGDFAKLIEDLGDRHIDFISIREQFDTSSPMGRAMMYIASVFSQLERETIAERIRDNMHELSKTGRWLGGTTPTGYASESLSSVTVDGKVKKACKLKPIPEEIQLVKTIFSVFTESGSLSKTDQYLLEHRCVTKRGKQFTRFAIRGILTNPVYMIADDTAYQYLKENNVDLFAEPSEFDGEHGIMAYNRTLQRPGKATQIRPMEDWIVAVGKHPGIISGANWVRVQSMLDVNKSKSYRKPRSNVALLSGLLRCGECGDYMRPKLTGRTNANGELIYTYMCSTKERSHGTVCSMKNCNGNTLDAKIVEEIRKVATDKKDFGQLLSKTKKVINDNKASYEAELTLLVKNHAETEARIKRLVESLSVASETSAKYVMEQIDELHRQSEQEQTRIAELEKLARQSNALSQNLFFYRDMIESFADTVDSTTIEERRRLLRTIVKKVVWDGKNVYVYLFAEDGELNLPPIGQLMCPSGEDSE

SEQ ID NO: 24683 - protein, 556 aa, synthetic construct
MDILKTREQLRSCSIYDLPLRVTFYARVSTEKDAQLNSLDNQISFYSNMIKKNPNWEYVEGYIDEGLSAISTEKRENFHRMVTDGENGEFDMIITKEISRFARNTLDSIRFTRELLHFGVAVFFQNDNINTLDEDSELRLTIMSSIAQDELRKLSSRIKFGHQQAIKDHVVLGNSRIFGYRKENKRLVIDEDEAKMVRELFELYATNEYSMKQIENIFWEKGYRNHNGNKIAHTTMSGMISNPKYKGYYVGNKVKVVDMFTKKQKFLPPEDWVMFKDETGEIVPAIVSEELWDKANDVLERRSKDVKNRQGKCNHGNLLTGKLFCTDCGATYYRRDAKDRQGNKNSKWICSGKIKNGADSCKSFPIYESDVVPILLEVFKETSCDVEELINQYVEMYKSLSQPEEVGRRLDELKKKMDLEQKKKSKLLGYNVSGQISDRDFISLTKQCSNEIALCEKEISALENEMQTRNDFKKRIEEMRRTLKRASEDANSGVINHSFVEKYIDKIYVTPIDETHMEMKIKLFTNETTTKYLENLRVRTGHTFKKMIESYENSMK

SEQ ID NO: 24684 - protein, 460 aa, synthetic construct
MRIRVLEPVQNKIPKKKRVCAYARVSTDSRKQGESLENQISSYERSLKSNPEYEFVGVFADQGISGFSRNRPEFQRMVQMAKDGQIDLIITKSISRFARNTAVLLETVRELRLIGVAVYFEKENIDTLDAKGEVLLTILSSLAQDESRNISENSTWGIRKRFEIGQHKMSTKRFLGYDADENGKLVVNKQQAKIVKRIFMEFLWGKTTDYIKRIFEREGVINWDGGTKWQSTTIGSMLENEKFKGDTLLQKSYTVDFLTKKRVQNEGEIQQYYIEDDHEAIIEPWIWECVQLEMKRRERYLEEHNITRFSQNTEANPFSSKIICGECNRAFARKGWRTPSGDRKVWQCSERYKVKGVLGCGNRHIYEETLIKIYLMAWNRLLECREMLMPEWEEKIQGVDLLAKFRAMDFMEITKDAEPIKELDIDLMLRTVENIKVYESGIVVTVFLDGTEIEYNTEEK

SEQ ID NO: 24685 - protein, 572 aa, synthetic construct
MASRIAEKLAAKKAAIYIRVSTHWQVDKDSLKVQRRELIAYVTLVLGITDYVVFEDPGYSAKNTDRPEYQAMMDRIRTGEFTHLVVWKIDRISRNLIDFAAMHDELQSLGVTFVSKNEQFDTSSAIGEAMMRIILIFAELERKTTAERVTAVMLSRASDGQWNGGRVPFGYSWSKETKTFSIVPEEAKAIRRMAELYEQYQSLLYVAKYLNDAGIVTKTGGQWTPTTVRTILTNPWYIGQYVYNVHSDGKGIEKRDSDEWITVENHHEPILNEDVFCRMRFLLTRNKRGGVPSHKTYVRKNIHIFAGLLRCGQCGSNMTANLDRRRANGFRPSQYACGSRRRKGTSCTNKYISDTTLGPFVLNYVANIIRASKNSSEATTPEVLERKLLRGEAFEDVASVSTDALGQLLDAFRSAGDAVEYRPQIAFSGDDNSIHEIDTLRARRRKLDNALARLNALYLYDDEAMPEKDFVMQRGQITKQLEEVNARIEELQNQESSEELGDGFIGKASYYIMANKLIEDRYIDYEKYIRAIDPSIPHSFLQQIIDHIVVNDGRVTSITFKNGATHTFTYKT

SEQ ID NO: 24686 - protein, 523 aa, synthetic construct
MFFGIYGRKSVYSDKSDSVDNQHRMCNDYIKAHFKADDITLVTSYSDEDYTGANTKRPDLQRLLEDVKSGAINVLVVYQLDRISRDVRDFSNIYAMLEEYHVMFISIKENIDTTTPIGRAMMYVTVVFAQMERETIATRVRDNMIGLAKKGFWTGGNPPYGYVRKNILINGKKHVTIEPDPDGVAYNIWIYDSFLKNHCSLQSMETNFRKEGIKTRNGAFFSTTQLYKILTMPYCVEATPEIYDYFAAKGCQMDPDSPREKWDGSVGVMIYGRSTGVNKKHQLQPPEKWLVCLGLHKPFMPAAKWLAVQNQFSENKFDKTQKYDIPLLKGILRCSCGSIMAVSRKKKINSEVSSWYYCLRRMKNGVEACDRKQIKVDIIDQKLLNTLHSIEIDPSMIYRFVQKSELPLPDIKTINNKISSIELRIGRLASSLALADGSAASKYIVAEIERLDSDLQFLKRERAVINVEIKKRGELNESAEGKAQHIQNVMKGLNGFTAEEKNRIMRDILKECVWDGSELSIVL

SEQ ID NO: 24687 - protein, 484 aa, synthetic construct
MNAVIYARYSCDRQTEQSIEGQLRECKAFAASEGINIIGEYIDRAISGTTANRPEFQRMIADSRYKTFQAVIVYKLDRFARNRYDSAMYKSKLKANGVRVLSAKEHITDSPEGIILEGLLEAMNEYYSAELSQKIKRGMRENAIKGKTTGGNVALGYRIGADKQMEIDPAGASLVRRIFTGYDSGMTFTEICDDLNHAGYTTSRGKQFRIDTISRILANQRYTGTFQCAGEEAHCPQIIAPELFQSVQERLTEAKHKNRHTKSPHEYVLTGKAICGTCGRRLNGRAGTSKTDKRYYYYCCPNKCCGWLPAAELEHAVLDAIAQYTTPEACEQIANATYALYQQSTHETADLTAAQRRLQETEKKLENAVNAVLNGITSAALQATMQQLEQQKAALETEVRLLQTDAPELKLEHFQYFAHRLLEVQAEGTEKILQLLVNQVIVYKEQITVLVNLTDKTKTPPLEQVTAALRESSCSVACGGGDEN

SEQ ID NO: 24688 - protein, 517 aa, synthetic construct
MPRKKKLQEVGGLRLVAYYRYSGGSGQTEQSIEGQRRDCEAYAKLHGMTIQHEYIDRHISGKTDDRVSFQQMIRDSDKGAFDMVICWKTDRFARNRYDSAVYKKRLRDNGVEIIYAAESNISGAEGIIIEGLMESLAEYYSAELAEKMRRGMRESALKCQAINRCRPLGFTTDAGKKFIIDERTAPAVRFIFEHYAAGESAAYIVEQLNEKGYRTSQGNEFNKSSINRIIQNEMYRGVYISKAYDVRIEGGVPAIVDDELWRRAQAMAKLNKQKRAKYSAKADYFLSGKLYCGECGCLMKGISGHSSTNGEVYRYYACSNPKCKKHNVPKEELEGKVIQAIIDNLLQPEAMEALAEAMVAVQETDADKPNAEREAIQQELADVRRRSKNILDAIENGTANPHLTARLDELTERENTLRFQLSTLTDEKPLRFTKEEYLFLLEQFLIDPAERNEDYGRRVVHTFVTSMEVSDSKLLIYFNISEENADKNKNASPSELQKESSTVKRLVRVARIELTAS

SEQ ID NO: 24689 - protein, 492 aa, synthetic construct
MAAIDFNNVVDLYIRVSTSEQAEEGYSVAEQEERLRSYCAAFNYIINAIHIDPGFSGASLDRPGIKKVMYDVEHGRCKKVIVWKLDRLSRSQKDTLILLEDVFLANDCNFISLMESFDTSTPFGRCIVGILAAFAQMERENIKIRTMMGRQARIRDGHFHGSRCPLGYKFQYAPDGTLLSNDLVVDPYTSKLVQEVFRLFLSGSSLSSISAHMASTYGCSMYDWSNSTAIRRILSNPIYMGKVRVGNELYPGIHEPLVSETDWYMVAAMLKHNKEQQKRTYAYQISGGAYADNLLTGLLFCGDCGARMYARRVSQNKKKYICHSVAKTSPAMIKSDHCTNRLHPFTVHQLDEMVINEILKLSLDRPGFDMLCDQPDESSKSEDKEIYEERLAEVNRQLDRLVKLYQTGLIDLDNISARLGDLNQEKNFLEGNIATINEVTPADLRETAWKSIQSLQSVLDNGDMDEVHRIIHTLIDKVVVLNADVTIYWSFC

SEQ ID NO: 24690 - protein, 668 aa, synthetic construct
MAYAKAKKHLKIWTKKKAALYVRVSTRYQVDKDSLPFQRKKLKEYCKFLGLEDHVIFEDDGYSAKNTERPHFQEMMSRVRSGEFSHLIVWKVDRVSRNLLDFAAMYQELKDHKVTFISMNEQFDTSTAIGEAMLKIILIFAELERNMTSERVTGIMLDRAEQGLWNGARMPVGYRWNDETKFPEPDPEEVKIVQLIFDKYEEWKSSIKIARYLNNNNFKSKRGGQWTSKLIHDIIRNPFYIGTYRYNLRESGRGPLKPESEWIVRENNHPAIIDKAQFDRCNKIMDQNGSSRDTSDLRARKYVHTFSGHLVCGKCGANMIASKDRARANGWRPSMYRCAQRSRMLDCDNSRTINESYIGPFIFNYIANLARVQKNFKNIATPEKLERELLKGETFDGVAGILPEGLNLTFQALSFRQVGNGTYIPDIDFLGDSDGASDRDQIELLKSEIEKSKNAVTRLTDVYLFDPDSMTKEEFATKKKELAKKIEGMERQLVDLLDDSGNDDLADMSFIKKASAFLVAQRIVSKSFVDYVGMAQELDSEILKDFIDQIVDQIVVLDGRVQSITFINGLKHEFRYTAPAELPVCKKCGGRIGSTCGCRTRTFDFSGKRYQRIKVGDPRDMLHGKKNPVCPECFAQEGRWHHWNCKIETCPICGERLAECEHGPNGKN

SEQ ID NO: 24691 - protein, 461 aa, synthetic construct
MNNDVEAGKIKAVVCYKIDRISRSIRDLVNLIEDYHELGVHFVSFADNINTAAPGGLMMATLFGSLAQMEREAIIARVTDNYYYRCELGYWGGGPAPYGFNLKKIVENGQKHTVLEINEREAAVVKQFFKWYLEPDGTIYEILKKADKAGITTRKGGAWTSRVISELLSKPMYAPNSMDIYNFYAAQGVRVRVTPEQCDGKLSLNVFGRRDRGSKHPKRSRPVNEMTLAICKNPPIIDSDTFLKTQFKKKAKLQVSPRTGTAKTTMLSGLVKCAVCGRAMSPSGSSRGVRYFTCSGKRNYAAGTCTSKSIKVSALEKIVIDDILRYATNPKVIDMFHAMQGSKLTAEQSHEVNLLQQEAAKLDIEIDNLLDACSAGNTTAIEYLNKRIEKIDTRKHEILTRINEIKRDTENVINLFSGIEIENVPYILAHGSIDEKKNVCQFLLSSVLFTNADDVKVYYKM

SEQ ID NO: 24692 - protein, 579 aa, synthetic construct
MLLRKIFEKMEVFNLEKNLKCALYIRVSTFHQIDKDSLPLQREDLINYAKYILGIDDYVIFEDAGYSGKDTDRPSYQNMMTRIRMGEFSHLLVWKIDRISRNLRDFSDMYDELKKYNVTFISKNEQFDTSTAMGEAMLKIILVFAELERKLTAERVFAVMMSRAEKGLWNGATVPLGFIWDEETKFPKIYEPEAKIVQYIFDLYEKKRSTTKVAEQLNQENVKTKRDGTWTPRTVGAILTNPFYIGTYRYNTKTQKTRRWKDKSEWIVIEDHHPAIISKEQFERVAKILKDNYRGDYNRQRASKNVHILSSIIKCFKCGSNMNAGNDRARKNGFTPSRYTCYQIHKTYTCNNYASDLTVLPFIINYIGNYMTLQDRITKNHSYRDMESILLRGKYFTDIEHINKDDIKCTYKLLVNNLPVINYKLQENQEDKKTTFKDRYDIYKNEKEKQENALKRLDDLFLYAEDSMPKKDFILKRQEITNKIEEINSKIQELRAEENNFVDNKEFSLNAKASFYLITQLIGNSKNIDVRYLLENVDKSIIKDFLSTILNEVSVDHQKVQYITFKNGLTHHFEYKENQ

SEQ ID NO: 24693 - protein, 590 aa, synthetic construct
MKTVEKIERKLPVLKTRKRVAAYARVSMESERMQHSLSAQVSYYSALIQKNPEWEYAGVFADYGISGTGTKKRDEFNRMLAECEAGNIDIILTKSIQRFARNTVDLLNTVRHLKDLGIEVRFEKENINSLSGDGELMLSILASFAQEESRSISENVKWGTIKRFKQGIPNGKFSIFGYEWQDDKLVIVPEEAEIIRWMYAEYMKGASRIEIGRALMDRGIYTRQGKPWMDSNVKVILTNITYTGNMLFQKEYCEDPITKHRRKNYGELPQYFVEDTHEAIIPMDEWQAVQAEFKRRRDLGPFGNKSLKLSAFSTKITCGCCGKHYRHSGKRNTAGEVYYIWTCQTKSQKGASACPSKNIPEKMLQNTTAEVLGLAEYDEDAFSQQIEEVIVIGDDTLTFRFYDGHEVTTKWQSTAKTDWWTDERRKLWGERHKRKDTNPNRHLFYEFTGFIKCGCCGANYRCQSGKRKDGTPTRSWYCTGPKAQCHNPGIRDETMKRLVSDVLGLDEFDEAAMDAQIENATILDHTVTFHFRDGHTESRDFLDKRHGTPWTEERREKARASMKAAWTDERREAMSERIKKIRSEKKWPNP

SEQ ID NO: 24694 - protein, 523 aa, synthetic construct
MAKSVTTIPATLSRFTAAPINSTKKRRVAAYARVSTDNEEQLTSYEAQVDYYTNYIQGRDDWEFAGVYTDEGITGTNTKKREGFKSMVADALAGKIDLIITKSVSRFARNTVDSLTTIRSLKEHNVECYFEKENIWTFDGKGELLLTIMSSLAQEESRSISENCTWGQRKRFADGKVTVPFKRFLGYDMGPDHNLVVNPEQAKLVKRIYGMFLQGQSPFQIARTLTEEGIPSPGGKDHWNPSNIKSILTNEKYKGDALLQKSFTVDFLTKKKKANEGEIPQYYVKDNHEAIIDPETFEMVQTLMATRKKGRNRKSSVSIFSSKVKCGDCGSWYGPKVWHSNDAYRKVIWQCNHKFDGQKCATPTLTEDEIKELFLRAANQVIDQKEQFIAIYEQVLSRSLDTTALEGELTELEAEINIAAELIEECIKENAHIALDQAEYQKRYDGLVARFNKAKARHAEVTDLIAERTARRHQIETYLKELRSREPLMEFRETDWLAMVDYITVYSKDDIRVTFKDGTEIKA

SEQ ID NO: 24695 - protein, 489 aa, synthetic construct
MLKNIPAVVYARYSSSNQREESIEDQLRECYKFADREGYNVIGQYCDHAISGRTDDRPEFLRMICDAEKQLFKAVIVYRLDRFARNRFDSVLYKSRLAQYKVNVVSATECIPEGSDGVLIEALHEALAQKYSDDLSQIIRRGLYGNAEHCKSNGPLPFGYKANPTTRLVEIDEETAPIVKQIFTMIAEGSNYNQALAYCTRMGYPKTKNALYHILRNERYKGIYIYANKRTEGGIPCIVSEELFAAANATRQKHINKPNAGSYKYLLTGKLYCKDCENLYSGGYGTSRWGKKSYYYVCSGKKRKHICSAANINAPKIESMVVDALYMFILNEDIISAIIDAALECQERNSPHKNNIMVINRRIAEIEKKLNNLLKAIEAGVLTETTMSRMQELEEKKKSLQRSLMKEKLKAPKISRSQLEFFFEKLRGEDPHARKFQKCLIDTFVNRIYPDGNTIKMVVNLGAPDDETLTYSKLSPCFAGFDKRNFWWR

SEQ ID NO: 24696 - protein, 536 aa, synthetic construct
MFKNTKIAVYCRVSSDEQAERGTIDNQITFAQQYADLHHLDIYDVYKDDGITGTIPLQDRPEGHRLLQDAADERFTLVVFYKMDRLGRSTRVILNAVEALSQYGVGVQSMSEPFDTATPSGRFMLTMFAGVAELDRANILDRMYQGTLRHARLGKWCGGPAPFGYRLQDGYLVISEEPMPGQQLSEADIIRMLYSKTIEGWSALRLAQHLNALGVPNKYTLRGNVAAGSGKWHQSKILYILHNTLYYGERSFGKLSKNNNKNIIPQQVPAIVSKETWDAAQAAIEQHSIMPKFIKRRSYLLRGLIRCGICGHTYVGTYYKRKAGNSIYYVCNAKNTRGVTPEPCKGQTLRGEWIESLVWDDCLRYIKQPDVIAVDEDCRYLQSSDDIKKEIDAATAQLKQLDQERQTVISLCRQGIITAADLDGQLSEITEKQNALQQTLEGLNSKNIVTKEDAEKRAKEIAGILDGFRQQLQSGGELSFDAKQGIIRTLVKQITVHTELQPGAERDIPTVRVCIDYNFTLLSAKTAMLDPYRQGF

SEQ ID NO: 24697 - protein, 459 aa, synthetic construct
MSTTHFYSHYPTIEYKTCALYVRCSKEEQAKFGDTIEAQIEDLKAFAKLHHLKIYAIYVDEGHTARKKYNKRKEFMRMLQDVELHKFEYIIFTKLDRWFRNIADFYKIQEILDNNGVTWLTALERYEMETTNGKLNVNIRLSVAQDEADRDSDRIKDVFRLKVKKGEAITGSLPIGLMVGENGKVDIDPDTVQIAYDMFDYFEVHNSKRGTLLYLIDKYNRYFCYETIARALRNPLYKGEYRGNPDYCPKIIDPARFDRIQVLGKRNVKVRKNNRYYVFSGLAQCKECGHALVANTTVQKRYNREYTQYRCNYYSNSHLCTHSHGMNEKVIEKYLLDNIKPELEKYVTAYEVKQNAPTKKADPSKIKTKMQRLKDLYVNELIDLDDYRIEYEQYKQELDRLTSTASPEAKDLSAIRSFLALDLQSIYDSLTPQEKRTLWSSIIDKIIISDGGDIEIVFL

SEQ ID NO: 24698 - protein, 571 aa, synthetic construct
MKQSNNNKKSRDVTAFLYERLSRDDNMDGESYSIGNQKKLLTKVAKEKGYTNLVHFFDDGISGVTMDRPGFADMIQQLEQGKAAAVFVKDLSRLGRNYIEVGRLTEEFFPNHDIRLVAVSDNIDTDEGENELAPIRNLFNEWYARDISKKRRISNKIKGNAGEPMGQPPYGYIKDPENPKRWIVDEEAAQVVRRIYRMTLEGVGTEQIAAKLEEDGVLTPRAYWHSKGINRPGKVKDLPPTHWNSSSVIKMLSVQEYCGDILNFKTYSKSYKNKKRLENDRENWAIFKDVHEPIIERAVFEQVQQKRGKMRKRQAKDGERSMFSGLLVCADCGSNLHFHFNQGNPEIKYFNCSNYKGNRGTCGSTHYVRVDFLEQVVLGEIRRLTKYAGLYEDDFLKEVIGHSRQAEETERRLKEKELKSLLARDDELDGLFERIYEDNVSGKLSDDRFAKMSRRYEEEQKELSEKIKKLRSEIEKQSSRATSTDMFVSIVRKYTRARKLTPRMLNELVEKIEVYNAERIDGEWVQRLRIHYNCVGEMNIPNEPALPIPAVTVNTRKGVFVSYTTDDRPAV

SEQ ID NO: 24699 - protein, 667 aa, synthetic construct
MAYAKNKVVKLWTQKKAALYVRVSTRYQVDKDSLPFQRKKLKEYCKFLEIDKYVIFEDDGYSAKNTDRPHFQEMMSRIRTGEFSHVIVWKVDRVSRNLLDFAAMYQELKDHKVTFISMNEQFDTSTAIGEAMLKIILIFAELERNMTSERVTGIMLDRAEQGLWNGARMPVGYRWNEQTKFPEPDPEEVKIVQLIFDRYEEWRSSIKVARFLNNKNFKSKRGGEWTSRLIYDIIRNPFYIGTYRYNMRESGRGPLKPESEWIVRENNHPGIISKDQFDRCNKIMDENASRRDTSEMRARKFVHTFSGHLVCSNCGSNMIACKDHARANGWRPSIYRCAKRSRMMTCDNSKTVNETYLGTFVFNYIANLARVQKNFTKITSTEKLESELLKGEAFEAVFGIIPDSLNSTFQALLYSNLGNGTYVPDIALLSKFDEVQDHNQIDLLNTEIEKSKNAITRLTDVYLYDPASMTKEEFAAKKKELIKKIEEMEHQLAELLDNSEDNDLTDLSFIKKASAFLVTQRIVSKSFIDYVQMAQELDNEILKNFVDQIVDRIVIKDGRIQSITFVNGLTHEFFYSRPAELPVCKKCGGRIGSTCGCRTRTFSFNGKRYQRIKVGDPRDALYGQKNPVCPECYAKEGRWHHWLCGIELCPICGKPLQTCEHGPNGKE

SEQ ID NO: 24700 - protein, 674 aa, synthetic construct
MAYAKNKVVKLWTQKKAALYVRVSTRYQVDKDSLPFQRKKLKEYCKFLEIDKYVIFEDDGYSAKNTDRPHFQEMMSRIRTGEFSHVIVWKVDRVSRNLLDFAAMYQELKDHKVTFISMNEQFDTSTAIGEAMLKIILIFAELERNMTSERVTGIMLDRAEQGLWNGARMPVGYRWNEQTKFPEPDPEEVKIVQLIFDRYEEWRSSIKVARFLNNKNFKSKRGGEWTSRLIYDIIRNPFYVGTYRYNMRESGRGPLKPESEWIVRENNHPGIISKDQFDRCNKIMDENASRRDTSEMRARKFVHTFSGHLVCSNCGSNMIACKDHARTNGWRPSIYRCAKRSRMMTCDNSKTVNETYLGTFVFNYIANLARVQKNFTKITSTEKLESELLKGEAFEAVSGIIPDSLNSTFQALLYSNLGNGTYVPDIALLSKFDEVQDHNQIDLLNTEIEKSKNAITRLTDVYLYDPASMTKEEFAAKKKELIKKIEEMEHQLAELLDNSEDNDLTDLSFIKKASAFLVTQRIVSKSFIDYVQMAQELDNEILKNFVDQIVDRIVIKDGRIQSITFVNGLTHEFFYSRPAELPVCKKCGGRIGSTCGCRTRTFSFNGKRYQRIKVGDPRDALYGQKNPVCPECYAKEGRWHHWLCGIELCPICGKPLQTCEHGPNGKSNFTFNQL

SEQ ID NO: 24701 - protein, 541 aa, synthetic construct
MARKKESTQPRLVAYYRYSGGSRQTEQSIEGQRRDCEAYARTHGMTILREYVDRHISGKTDDRAQFRQMIDDSAKRTFDLVICWKTDRFARNRYDSAVYKKQLRDNGVSVIYAAESNIEGAEGIIIEGLMEALAEYYSAELAEKARRGMRESALKGQTLGRTPPLGLTVDSAKHYVIDPAGADTVRLIFELYASGLSIASIIRRLNGMGLRTVRGNPFDKSSISRIIRDERYRGVYVSKKFDVRIEGAIPPIIDDDLWERTQKMIKLNRQSRAPHSAKADYILSGKLYCGECGCLMKGICGHNPSGRVYHYYSCPGRSLGRPCTRKNMPKDVLEKLVVESTSNLLLRPENIQQLADAIVSLQQAEASRPDPERAALEQALAEIRRKIGNILSAIENGTASAALTSRLSDLEQQESALDHQLASLSTPEPFTLSRDEVIFLLEQFRVSPSERTNAYCRRLVDTFVDKVELTNRELIIHFNISKSTENKNSQSNYGCSTGKRLVGDERIELPQVESESTALPLCKSPISCCVSRHRAGQRVLL

SEQ ID NO: 24702 - protein, 483 aa, synthetic construct
MRMAAYCRVSTEKEEQLSSLENQREFFEQYADKEGDTLVKIYADEGISGKSMNKREAFTQLLEDSQTGAFDYVAVKDISRFARNTSDFLYGIRTLRSNGVDVRFLSNNQTVIGESEFVLTVFAALAQEESSNLSKRVIFGKRQNAKKGRVPNVVYGYNKIDTYTLEINEQESYIVQLMFKWYIEGEGTRRIAIKLNEMAIPTKKQAKWVPKTIRRILQNPIYIGKIINNKSVTKDFLSGTREAIPPEEWYIHERPELRIISDDDFELVQQKIKERQEQYKNDNPGNRFSNRHLFSNLIKCGECGKSFTAKVYQWKNRYVRYRCCVHNNNGNAHCTNSVTVDEQELLNEVKSYLLTAIEDKKAFADKLMKQYQAQTTNIDVSKLTDTRQSLEKRRSKFKEMFAADIITMDELKKEMSAIDEGMRSIDEELKAYDEIQKKATHIDDIHKDIEQILMQNEYTNDDMRRIIEKIVVYPDKSVEIFMK

SEQ ID NO: 24703 - protein, 522 aa, synthetic construct
MNSIQKVALYMRLSKEDLDKGNAESESIQNQRMILDEYASSHGWEIYDHYIDEDFSGSDRSRPDFNRMIEDAKNGKFNIVLVKTQSRFARDIKVVEDYIHNLFKEKKIRFVSALEGIDTMRSDSELSSHIHAVFDETQLTLLSQNIRRSFDEKAKRGQFFGSMPPFGYKKDPNNKNHLIVDEDAAPVVRTIFEMAAAGSTYMQIAQHLNSCGYLIPSEYKKQKGYKVNGMYDRHMKIGKWTRDMVRTFIANEVYIGTVVNHKSTVLNFRTKKKGNIPKSEHIKIPNMHEPIIDINLWNTVQKLRQTRRKASSGKDGKKHPLSGKVYCEKCGSKMYKCKSGGISYFRCYRASSTGECDNHKRIRLDILEKTIIDKINETISQYVNQDELSENIVIINRLDKKLESLKNQRFNIEKSLETTRKNLLNLLKSYNDGVVIREIYEQAQNDYMEEQNATRTKLKNIDVEINDVQTKIENQEDKEEILKKYTHIDKLTIPIVQEFIDSIFISEVTKDGQRNITINMAI

SEQ ID NO: 24704 - protein, 472 aa, synthetic construct
MKDKIVKKVEHLPQLTDVKRTDKLIQRVAAYARVSTEKEEQQTSIEAQKDYYSTYIKTHVGWEFVGVYADEGISGCSTKRRVQFNQLMNDCRDGKIDMVLTKSISRFGRNTVDTLNAIRELKSNGIGVYFEKEQIWTLDSKGEFIITLMSSLAQEESRSMSENILWAVRKRYAQGKGSFAYSRVLGFDRGKEKFEIVINPKEAVQVCKIFRMFLQGLTPHTIGIAMTAAGIPSPGGKDKWNSATVRRMLSNEKYKGDMLLQKEFTVDFLSKKKKKNEGELPQYYVSNNHEPIIDPWLFDYVQEQLQKRTRTKEHRYSGIGYLNSKIFCTKCGAAFGPRPWHSTSYNNIVWQCRNRYSDVKCKTVNIYDNLLFYVLHDVARKKIVAKDIRTAIVEFAVDEVSPKKLKAIEQYLTDFETMSPLEMLSDADDLSFVIQRIMVKPDRQLEVKWLDGSMDRYEIPKYTPRRGIEKPV

SEQ ID NO: 24705 - protein, 526 aa, synthetic construct
MPKVTIIPATVNPLTHLPKAAVQKRRVAGYARVSTDSDEQFTSYEAQVDYYTRYIQSKPEWEFVKVYTDEGISGTNTKHRDGFKEMISDALAGKIDLIVTKSVSRFARNTVDSLVTIRKLKENGVECYFEKEGIYTFDGKGELLITIMSSLAQEESRSISENITWGQRKSFADGKIHLAYKHFLGYKKGEDGRPAIVEEEASVVRLIYRLFLDGKTQAGICRYLEDLEIPSPSGKAKWSKTTVTSILTNEKYKGDALLQKSFTVDFLQKKTKQNEGEVPQYYVESSHPAIIEPDEWDHVQAEFARRKALGNAYSGKSIFSAKLVCEDCGGFFGSKVWHSTDCYRRTVWQCNNKFKGGERCLTPTVDTETLQQLFIKAYNQMMGNRKQIIEDCEIMRKKLTDFKSLDADIERQFEETQIVAELVKAAVKDNAVTAQSQEAYLKKYEALTKRYETAAAELERLQNLRTLRSQKDKAMALYIRTLKKQPTVLSEWNDTLWTVMVEKAIVHRNSEITFEFYNGTKVKVRQ

SEQ ID NO: 24706 - protein, 433 aa, synthetic construct
MSKKITIVSKPPKLERKKRVAAYARVSSGKDAMLHSLSAQVSYYSDLIQSHGEWLYAGVYADEAKTGTKDSRAGFQNLVAECRASKIDMVITKSISRFARNTVTLLQTVREFKALGVDIYFEEQNIHTMSGDGELMMTILASYAQEESRSASENQKWRVKRNFEAGIPWDRTLLGYRMENDHYIIVPKEAEIVRRIYNEYLSGSGYNSIAKMLNDEGILSRFGGKWNQSAVSRVLSNYTYTGNLLLQKTFSENHITKRKMFNTGELPKYHAEDAHEAIIDMETFQAVQKEKERRASQFIKKPSTKKIYPFTGLLVCDNCGKNYRRKVTKTGAAWVCGTFNSLGKAVCASKQIPEFTLQQVTADVLGQNDFTHEWLCDRIQHIRVCNDNALIFCFNDGSEITRIWKDRSRSQSWTDEMKEAARQKTLERSKHNA

SEQ ID NO: 24707 - protein, 588 aa, synthetic construct
MKRAALLLRCSTDAQDYERQKLDLLDTIKGMGYTTSDDLVFGQYITGKDDVRKKDRESVAECKQAVREGKVDAIFINEVSRLSRDSIAGRLFIREFNDEYKIPVYFRDLGMWTINPTTRIVDRSFETMLGFHFDMAQNELKSMKTRFASGKRKNAREGKTIGGAVPFGFYKDEDGKLQVDEEQAQVVRLVYNKYLEDGGSIPSVCRYLLSCGYDKKFNKKFGTGSVRNLLRERRYIGEQRYNLVNPDEPDEAKKQEVYIYKVDAIIDTTIYNKVQIKLDKNRTTETKKVNKDKKIHLLAKLITCPICGDSYTSKTASANKSGERYRIWNYCCVSKYNFSECTSDITLNADNIESIIWQLTKREILALQELSLEERQSKIDEAEQKLASYKDELDVIAKSIDKLNVKKKKLVALFLDIEDDDTAIFNEQREAINKEIDSYNNRIQFLNTEITICEGNIARFKESDFTDEVLDKIEQDLLKKKELIKEYIKVIRPYRLTKARLILEVESKQTNYCILFEPRNSKRRCWYIQSSLAQWQNGLLKTSTAPLGNFFYIPMASLLLDEPDDLDAIASFEDMKEICRINNYVIEY

SEQ ID NO: 24708 - protein, 517 aa, synthetic construct
MPRKKKLQEVGGLRLVAYYRYSGGSGQTEQSIEGQRRDCEAYAKLHGMTIQHEYIDRHISGKTDDRASFQQMIRDSDKGAFDMVICWKTDRFARNRYDSAVYKKRLRDNGVEIIYAAESNISGAEGIIIEGLMESLAEYYSAELAEKMRRGMRESALKCQAINRCRPLGFTTDAGKKFIIDERTAPAVRFIFEHYAAGESATYIVDQLNEKGYRTSQGNEFNKSSINRIIQNEMYRGVYISKAYDVRIEGGVPAIVDDDLWRRAQAMAKLNKQKRAKYSSKADYFLSGKLYCGECGCLMKGISGHSSTNGEVYRYYACSNPKCKKHNIPKEELEGKVIQAIIDNLLQPEAMEALAEAMVAVQEADADKPNAEREAIQQELADVRRRSKNILDAIENGTANPHLTARLDELTERENTLRFQLSTLTDEKPLRFTKEEYLFLLEQFLIDPAERNEDYGRRVVHTFVTSMEVSDSKLLIYFNISEENADKNKNASPSELQKESSTVKRLVRVARIELTAS

SEQ ID NO: 24709 - protein, 512 aa, synthetic construct
MERAVIYARYSSDQQREESIDAQVRACREYCQRKGYLVTKIYADEAKSGKSIAKREQYKKMLSDSQKNLFDVVVFHKIDRNSRNELDYYLTKNQLISSGIKYEYAAQNIDTSPAGQMVEGILVAVAANYSRNLAEETKKGLKENALKALFNGGRPPLGFEINQENKYIINDYEAGAIRIIFDLYLKGKGYHYIISQLNSLGYKTREGRKFGKNSLYDILRNPKYCGTYTFNKVNKDPSGKRNSHKISENTIIVEDAIPAIISKEDFRKVQEKMNQNRYRSAAYKSKETYLLTGKVFCGICGAAMNGHRASSNGKKYVYYTCSGRDRLGTSACQNKVVPRDDLEELVLLTIEQELLSENSLKKLKDTIEMEYQAVANEYADEASSLSEQKAIAERKLNNLYTVIEQGTADEYDLERLAAVKQELSQIKEKLAKCAGANSIATINPAHIEKVLKVCRKMLFKNITNESLRMLFDDLVNKITIDAKKITLQLKLECSGTYGAEGRTRTGTWGNHA

SEQ ID NO: 24710 - protein, 463 aa, synthetic construct
MRRKTTAPVEKILLRVAIYIRVSTDKQVKDGDSMRDQLATGQKYIDSHENMILIDTYIDDGISGQKLKRDDFQRLIDDVRAGRIDLIIFTRLDRWFRNLRHYLNTQDILDKHGVSWTAIEQPYFDTSTPHGRAFVNNSMIWAELEAQNDSDRILGVFDDKVDNGEVLSGSTPLGYRIVNKHLVPDDDAPTAVAIFQYYRKTGNLSMTLRYMESEFGLVRSAASLKNMLTNTKYIGEFRDNKNYCPAIIDRDLFFDVQRLLKINIKSGKKHDYIFSGLVVCDDCDHIMSGCQQRARGRVRADGTRIIYKYSVYRCRQGVNLHRCPNRKLVFETTLEKMLLERIRPELENYIAEYEVANLPALRTDAKRRSVEGKMQKLKDLYLNDLITMDEFKLDREKLLMQLEKINAEDSRPVKDLSYLKNFLKMDFESVYDSLSIPERRELWRSIVKEIRVDHDKNIHIIFL

SEQ ID NO: 24711 - protein, 560 aa, synthetic construct
MNKKIKCDIYTRVSTTMQVDGYSLDAQKEKLKRYAEFQDMEIVNEYSDEGKSGKSVEGRPEFQRMLDNIENGTDKVQFVLVFKLSRFGRNAADVLNSLQRMQDFGVNLICVEDGIDSSKDSGKLMISVLSAVAEIERENILVQTMEGRNQKAREGKWNGGFAPYGYELVNGELQIAEDEAEIIRLIYDKFIHTNMGISAIAAWLNQHGYKKKKRQNNTLDAFASSFIKGVLDNPVYCGKLAYGRRKNEKVSGTRNEYRIVKQENYMLHDGIHEGIISETDWELAHQKREKTGVKYEKTHSLDHEHILSGILRCPLCGSGMYGNVNRKKKKDGTLYKDYFYYACKHRRLVDGHKCGYRKQWSEEKINNAVEEVIRKLVKNPKFEEAILNKIGSRIDTEEIEKEIEGLEKQHRQLTGAKARLGQQMDSLDIMDKFYEKKYQDMETRLYRLYDEIEGVENSIEEVKNRLLNIRQQKISEENVYQFLLYFDKLYDKFTDLEKKEFLNSFVEQVDIYEQEQPDGRFLKHIKFRFPVYFGDRETQELCWENESTVETIVALHRINM

SEQ ID NO: 24712 - protein, 503 aa, synthetic construct
MSKLAVIYARFSSDKQREESIEGQIRECTAFADANDIKIIGTYIDRAMSARTDKRPDFLRMIADSAKGVFEYVLVYQLDRFSRNRYDSAVYKNKLKKNGVRVLSAKENIRDDPSGIILESVIEGYAEYYSAELSQKVTRGMTDNLLEKKWTGGLVPLGYRTKKDGTLTIDPAGAAAVTSSYKQFIAGRTVPQIIDYLNEHNYRTTMGTRFNRNSLSRVLKNKIYTGTFSWGGTEYPDFAPRIISDGTYNAAQAIFNARKKNSGKEVVLRRRPDAYALTGKIYCGICGMAMTGMAGRSRSGEMYHYYRCSSKNNSKEKARREKIVCSSRSVNRDKLESLILDTTVQILSSPEALHCIAEQAVKAQENAPQAEEVKRLELLISDTEKRLQNSIRAVESGIISDTIARNIRQYEDELAELKTQLEAAKLDTGFKITAEAVEYFLKEMVKKNDRYKLDTFQAFIRRIVITGDKVEIYYNYHSVPNILKNPVNKMLAGCSSSIAMVTR

SEQ ID NO: 24713 - protein, 565 aa, synthetic construct
MPEKEKIVALYVRVSTGYQVDKDSLPFQKKELKAYCEHVLHIDKKRIEIFEDAGKSGKNTKRPAFERMMEKVKSGQVSHVIVYKIDRISRNLVDFSLMYDDFKYNNVTFISLNEQFDTSSAIGEAILKIILVFAELERKLTSERVTDVMIGRAQNGQWNGARVPYGWDWNEEKQMPVHSKKEAQYGIDMYHRYLEGYSTLRIARYNNEHNIPTKRGGEWSSKTVGDFLRNPINKGDYRYNYRNSARGKKKAKEEVVYIKNVFPPLIDPPIFDEVNRRLDENYKKQNTNYMFPIRKQCNIFSGLIICGKCGAHYQVCRKDERRLDGFRPSNYVCTRKRQKAICDSLNVSEVKIGPFMINYIAAMVDISQKRKKLKDKKELEQLILSHMQFTDLAGIADNSLQETMDLLYGRSTNIWSPSPIAKESQDNENKKSKLKENLQKTDRALERLKKAYLFDDDGMDEKEFLEMKSKLEIDRVKIENEIKDIDNDAIANNVNQIDFIKTASQFLIIHKINSGEFIDYRSLAILDEESMKAFMNSVIDHIVVLNRQITEIVFKNGLSHKLLYR

SEQ ID NO: 24714 - protein, 537 aa, synthetic construct
MARKKKVSPGNRLVAYYRYSGGSQQTEQSIEGQRRDCEAYARQHGLTIVHEYIDRHISGRGVESRLAFQQMIADSSKHLFDLVICWKTDRFARNRYDSAVYKKKLRDNGVRILYAAESSVEGPEGIILEGLMESLAEYYSAELAQKMRRGMRESALKGKAINPNRPLGLTTDEHKRFIIDEKNAPTIRFIFEHYAAGESSASIVDQLNAAGLRTSKGNSFNKCSIPRIIQNEAYHGVYICKAYDVRIDGAIPAIIDDDLWKRAQKMLTLNKQHRAPHSSHADYLLSGKLFCGCCHSLMRGISGHNCRNDVYYYYACGNKADGGTCKKKNIPKDVAENLVVNAICENILRPDTLEDLADAIAAAQQADVNQPDPERAMLEQNLADVHRKINNIIESIENGTASSRLSARLADLEQQESALNYQLESLKEVHPPVLDRERILFLLEQFLISPNERTEDYNRRIIDTFVNRIEITDTEMLIYFNLSEASASEKQKNSQPNSCSTGNHLVQQSWTNPNFFPPPNQRSKCPQNGRFGCHPCS

SEQ ID NO: 24715 - protein, 523 aa, synthetic construct
MRFFSYGRKSVFSDKSDSIDNQFRMNREYCESKFSGQVDSWQQFSDEDFTGANTSRPDLQRMLSFIKGGFCDVLVVYQLDRLSRDVRDFANIYALLEEHGVMFISIKENIDTTTPIGRAMMYVTVVFAQMERETIAARVTDNMLGLAKKGYWTGGNPPVGYVRKHIVVNGKKHCSIEVDPEGARYVTQIFDTFLAYNCSLQGMETRFKNQGIRTQNGKFFSTAQLHKMLTMPYCVEATPEVYDFYAAKGCIMDPGSPREMWDGSVGVIIYGRSTEKNKKHQLQPPEKWTVCLGKHKPFMPAEKWLAVQSRFTQNKCIKDAKWPVPLLKGVLRCKCGNLMQVSRKKKVDGTCSSWYYCRKRMRQGVDACDMGQIKCDLLDEEVLELFRGITADPALIQKFVKAEAPADVPDLKAAQARVSACERKIGRLAASLALAEDSAASKYIIAEMERLDVELGALKREASLAEMESHRAAASAKDAKATAAEIAKLIHGLEGFDDKEKNAIARAVIQECTWDGERLFITL

SEQ ID NO: 24716 - protein, 548 aa, synthetic construct
MSTGTELRAVFYARVSTEEEKQLNALEKQIQENKDVIRDHGWRLVGEYIDEGKTGTTTKRRNDYKRLLKDMTENKFDIVVCKDQDRLQRNTLDWYLFVDNLVTNNLKLFMYLDNKFFKPSEDALITGVKAIIAEEYSRNLSKKLNNSNKRRIERALNGEEVSAMGNGKSLAFKIVNGKWVKDEEEAKLGKKIFELYLEYDSIRKVRDWVNEHGYTNSVGKPFTSESISRILKNEKAKGVIVMGKYHHDFDKKKIVRRSEEELVRIPAPELAYVSEEVFDKVQERLRAKTGKGRGVNAYSDPLSGKIYCGSCGRKLWKHASNGYVNWMCASQVAKGDVECNGTRITTVAIRNIYKKITDNLEVNKGVVKQDIVKWLNELKATLSDTSVNEKIQKDLDKLERKRTKLLEAYLEDFISKDDYKAKYEAIEGQIEEKKKILVPVEENEDIKVIESVLQNIDDEIDAYVKTLDMEESKVDFLIEHTKRITVLENRDIIIELDLVAGAIIAGKDFLLYVHDTMPQHHGPKYLHPSGPQTAPRCCFRDRFSCDQP

SEQ ID NO: 24717 - protein, 519 aa, synthetic construct
MKKVTKIDKIQPAKNAEDKLRVAAYCRVSTATDAQLESLEAQKNHYENYINSRDDWCFAGVYYDEGITGTKASKRPELMRLLADCKAKKIDFVITKSISRFSRNTMDCLKIVRTLLNLNIPVYFEKENINTGSMESELFLSVLSTMAEGESASISSNNKWSIKKRFENGTYRLSSAPYGYELESGGLQVVSEQADIVKRIFRELLSGKGMYSIAKKLNAEQVPTQKGGRWTSTSVHNILTNEKYTGDCIFQKTYADSNFNRHINNGELNRYLIQNHHEAIISHEDFKAATALIEQRATERRIESGSDKYQQRYAFSEKIICGECGNTFRRRIHKGKYNSYVAWVCNTHLSDTNRCSMLFVRDEALKLAFATMLNKLIFSYRLLLKPYLAAMQSNTADEALLRIQYLENQLDQNAEQRSTLHKLMAQGYIDQILYTQECNELLLQARDFRSEIEALNNTVAGDTTKVYETEHLINYCKRGEMLTDFNESLFELFVDHILIYSRQKIGFVLRCDLTFEEMI

SEQ ID NO: 24718 - protein, 521 aa, synthetic construct
MGNVMIIPAKRQVGNTSRQQEDKPKLRVAAYCRVSTDSDEQATSYETQVEHYTEYIKKNPEWEFAGIYADDGISGTNTKKREEFNRMIEACKTGEIDMIITKSISRFARNTLDCLKYIRMLKDKNIPVFFEKESINTMDAKGEVLLTIMASLAQQESQSLSQNVKMGLQFRYQNGQVQVNHNHFLGYTKDREGNLVIDPEQAEVVKRIYREYLEGSSMDKIAKGLEKDDILTGAGKKKWWTSTINKILRNEKYIGDALLQKTYTTDFLNKTRVKNNGIVPQYYVENNHEAIIPKDIFLRVQEELVRRRVVKTSANGKKRSYSCNHCFAQLVICGGCGEMFRRIHWNNRGCKSIVWRCLSRLEATGMECHARTVNETVLENVVVQAINTLLGDKSTYQAQLQQNIAKVIREAQKNNTDGIDEQLMELQKELLKKANNKKAYDEIADQIFKLREQRENCTVDTAARDTQIARITDLQDFIKQQSATLEVFDETLVKRWLKQITIWNDHCTVELKSGLKVDVER

SEQ ID NO: 24719 - protein, 546 aa, synthetic construct
MKAAIYSRKSKFTGKGDSIENQIQLCMDYSKSIGIKEFLVYEDEGFSGGNIDRPQFKKMMQDAKDKKFDCLVCYRLDRISRNVSDFSTLIEKLNKLEISFISIKEQFDTSTPMGRAMMFISSVFAQLERETIAERIKDNMYELARSGRWLGGKTPHGFTSKKISFLDENLKERSMYQLEVNDEQMEIVKLIFNKYLELRSLSQLYKYVYHNGIKGPRGGKFDPSSLSGILRNPAYVKANEDILDYLRSLGMEVVGVPDGQCGILTYAKNTSNSIAAIAKHHGVIEPDIWLEVQSILNENKDKIPRISTGKTALLSGLLKCGKCGANMRIMYKGKRNDEDLKYYYVCGTKRSLGVEGCNCKNLNGPLVENLVIDKIKNCNIESVINAFNSNKAKVDTVFSDVRSKINLLKNSISEKEKLISNLVMELAKNTGSVASEYIISQIEGLNGEIDSLKSKVSELESSSVDINSASLNLDIIVSNLKKFNYEVDDASLDDKRLLLFTIVDSIVWDDASGNLSIVYMGAKMDDLVSLSDGSHFCSDGRSYIYE

SEQ ID NO: 24720 - protein, 517 aa, synthetic construct
MRKITRLEPKKTALPTRKKVAAYARVSKDTERLLHSASAQVSYYSELIQKNPEWEYAGVYVDCGITGTLTYKRDEFKRMLTDCEAGKIDIILTKSISRFARNTVDLLETVRHLKSIGVEVRFEKEGIHSFSEDGELMLSLLASFAQEESRSISENVKWGIHKRFKSGEIGVANKHILGYQYDEEQKKYIIIPEEAESVRWMFQMYIDGVTLRDIADNLNNAGICTILGNDFQEASVRQLIFNEVYAGDIRRQKCYVSDPIKKDKVPNCGELPQYYMADCHEAIIDRDTYAKVKAEMERRASLLNPTYCFTKKIRCGTCGAQFTRKKGKVRGKTYVHWICRSKKETGMTCSSVNFSEEELKNICADVLETDSFDEEIFESRVKDIIVLKNGDIEFHLVGGETRRWKNLHLNPPRHKVTLTDAFQGKIRCAKCGNTYHRVNSANKWVYWYCMGKKKKGMTCDNINYTDFQLRQITAHILGLEDFDEQVFSEQIEGITVLEDGNLKYHFYKGRTERWQRV

SEQ ID NO: 24721 - protein, 463 aa, synthetic construct
MARSVTVIPARNRQASGHRAAPQKKIRVAAYCRVSTDQEDQLHSFEAQVDYYTKYINDHENYEMAGIYADEGISGTNTKKREQFKRMIADCEKGKIDLVITKSISRFARNTQDCLMYSRKLKNLGIGIIFEKENINTLDSTGELLFTILSSLAQDESRNISENCKWGIRTKFKNGEMHLNTFKFLGYDKDENGKLIINREQAKTVRRIYRDFLWGLNPAQIAKELEEEQVSGCLGQTKWYASTVVGILKQEKHMGDALLQKTYTADFLTKRQVKNNGEVAQVYVKDSHKGIIDKETWNAVQEEFDRREKFMQKHGTDRYSYGSECNPFCEKIFCGECGSLFTRHSWKSRGIIQWQCKNHRKDGKVACTNAYVDNANLEKGFVKAFNRLVNEREKNMERWNAMKAEGTPLEKIRAVQMMEATESGQLQKYVPEAAQLVLEEITIFGVKKYEFAFLEGSRVKVSV

SEQ ID NO: 24722 - protein, 501 aa, synthetic construct
MEIQIREGSREQKRKLKVCAYCRVSTDADEQENSLENQVRHYETVIKANPDYEYAGVYSDFAISGFKEKRPGLQKMLADAEKGKIDLILTKSVSRFARNTSIVLEATRKLKELNVGVFFELQNINTLSGEGELMLTILAAFAQAESESGSAGAKMVYQRKYEAGIPVQYLERSFGYTKDERGIFVADEDEAVWIRKIYEMAADGYTPAAIKRYLNENGVKTVGGAEWIDSTVFRLIENEIYKGDYIMHKHFVNEERKLVRNRGEVDAWYIEDDHEAIVSPELWQRAQDALEAKRDYLAEGSVIEEFTEENYPYMNKIYCSKCGYPLYKRIYSKGNRLNWGCSGMKRYGKSFCDGINIPDGVLRSAWHFEENTYIDEKASDKGVKEFSYLKERSWKRRHKKKQPPSIPENTEAEYPYREKIYCALCGSRLVRHVYTKSHKVTWVCNGRKRKGKDFCDGTRIPDTILKGWGEIKKDIYIQRKDDKNGKKRYSYTSKKPSGIGA

SEQ ID NO: 24723 - protein, 523 aa, synthetic construct
MQTMNKLRAAAYCRVSTDRAEQSGSLASQRSFFDDYIRNSVSMTLVGVFYDEGTSGTTTLNRYGFNKMISLAVSGGIDIILTKEVSRFARNTVDTLNITRMLRAKGVGIIFINDNIDTRDSDGELRLSIMATIAQEESRKISERVKWGQQRKMEQGVVFGRSCLGYDVKDGKITVNADSAEIVKRIFTEYTVLLKGAESIADGLNSEQIRTVNGGRWSGAFIRKVLRNVKYVGDLEQKKTCTPDFLTHKKRLNRSEHIYIRNHHEPIISRELWEQTQAEISRRKPTDTSRHSDRYVFSGKVYCGVCGSVMVSRVKTLKNGKIYHALRCSGRIGGKSCNNETLNVTALKACVKRIFTDIPIDKTSVINAVIKGLSRTDKPDIPALRRKIETLNAKKRRAVDLMLDGLITQQELIEQKSYYDSIIEKLSQEISSDRSVFETDKIRKNAERFLDFTSDPLWLLVIRADYIHDTLTVYLKGIEKGFTTCFTATGRGDSYRVITGNTVRSQGIIPGTMQVQKNYPILK

SEQ ID NO: 24724 - protein, 525 aa, synthetic construct
MAKSVTTIPATRNRFTANPISSEKKRRVAGYARVSTDMEDQQTSYAAQCDYYTQYIQSRDDWEFVGLYSDEGITACNTFKREGFNRMIADALAGRIDLIITKSVSRFARNTVDSLSTIRKLKDNGCECYFQKENIWTFDSKGELLITIMSSLAQEESRSISENCTWGWRKRCADGKVTVPFGRFLGYDRGEDGNLVVNEEQAKIVRKIYGHFLQGRSPHCIAKLLTEEGIPTPGGKKVWGKAVVQSILTNEKYKGDALLQKVYTTDFLTKKKKKNEGEVPQYYVEGNHEAIIEPEIFDRVQILMQARLPGKNRRSSVSIFSGKIRCGDCGGWYGSKIWHSNDKYRRVIWQCNHKYDGDSKCSTPHLEEDTIKQIFITALSILEKERDTVIAGFEEIRDTAFSTDALEAETEVLTQEVNTVAELIEKCIDENAHIAQNQTEYEKRYNALVRRFDAARAALDETQAALAKRRAQRLMMEHFLETLRSLPGQVEIFDEDAWLALCDHITVYGKNDIRVTFQNGMEIAV

SEQ ID NO: 24725 - protein, 499 aa, synthetic construct
MSKAVIYARYSSTNQREESIEGQIRECTDFAKRQDITIVGSYIDRALTGKTDARPQFQKMISDSGKQLFDIVIVYTLDRFARNRYDSATYKAKLKKNGVKVISAKENITDDPSGIILESVLEGMAEYYSVELAQKVLRGMTENALECKWLSGIIPLGYKLDDDKHLIIDDHAAPIVRKIFEMYAAGDRIVAIAKYANSTHLKTAKGNNFSRCSFTHMLKNETYIGTYKWRDIVKTKVIPQFIPDGLFHSVQKRIKSRKETNVRGKSENFLLSSKLKCGKCGQFMTGVSGTSKQKRRYYYYQCYASKSKKCDMPLFPREKLEDIILAETIKLLSEPHTIEFIANTVANLPIDENTQISILETEITEIKNKLKNCIKAIESGLISDTISKNISEYEKKLSVLEKDLSIEKVLNEPFKITPDHVKFFLYNILQIKNADERQDMIISTFVRDIVLTKDDIGYTVKITYNYNENPSTSLDNSVQKGSQKSSLVAPTRIELVISP

SEQ ID NO: 24726 - protein, 407 aa, synthetic construct
MAKISRIGPITQAPAKRKKVAAYARVSKNTERLLHSVSAQVSYYSKLIQGNPEWEYAGVYADCGISGTGIRERDEFRHLLADCEAGKIDIVLTKSISRFARNTVDLLAAVRRLKELGVEVRFEKEHISSFTGDGELMLTILASFAQEESRSISENCKWGIRKRFRSGEIGTANKHLIGYRYDEEKKRYLVVPEEAEMIRRMFRMYLDGLSLRIIAGTMNEAGYRSVNGKLFQEASVRQLLQNDVYAGIIRRQKSYIADPITGKKVINDGVLPQYVIRDAHEAILDREAYEQVLAEHQRRKTMQNPTYPFTRKLRCGICGRLFSRKKCMVKGKTYVHWICRSKKEVGTTCCSVNFSEAELERISAQIMDLAEFDAAEFEKAVKQITVERDGSLMYDFYEGRTEMWQRA

SEQ ID NO: 24727 - protein, 543 aa, synthetic construct
MPVAVYCRVSSEEQAERGTIEIQKEFAAKYVDLYQLEVFDYYCDDGISGTIPVEARPEGSRLFRDAKEKKFDTILFYKIDRLGRKVRVILNAVHDLEELGVSIRSMTEPLETETPTGRFMLTSLAGISELERDTILSRMWAGSQRAARLGNWLGGIVPFGYHVVDKQLQISDDIMPGCNLSEADVIQLIFDLSGNQKMSAIKISDYLNALNIPTRYDLNGINGKRKKNASSIWYPSRVLSIIKSTTYKGTHKYGKRATNKNSKIILRPVPAIVSDELWEKANEALKTNQITAMRNAVREYLLRGIIKCGNCGRTYMGTAYSGSGREKIPYYVCNAKNSYLAHNTEKCISKNVRADWLEHLVLEDCIKILKSPNKILNMDPEKEQQSLADEVKKEHDQIKASLKKLSEERASIIELYRKKIISETDLSCQLEKLSTEEATLQERLKMKIDSRKSAATKQNKEKAISLLKKFTDKCQNLDPEKLSFETKRAIIELIVEKITVTTESAPEKYYPEISVDIEYRFATTPNHIAYVEDCTVTGSALCT

SEQ ID NO: 24728 - protein, 528 aa, synthetic construct
MTKRKWGELMKTITKIEEIESVGPAKKIRVAAYCRVSSSSDDQLISLETQKAHYETYIRANPEWEFAGLYYDEGISGTKTSKREGLLSMLKDCGRGKIDYIVTKSISRFARNTADCLTMVRKLIDLGVHIYFEKENINTGLMESELMLSILSGLAESESISISENTKWAIQRRFQNGTFKISYPPYGYQNIDGQMIVNLKQAEVVKYIFAEVLSGKGTQKVANDLNQKGIPSKRGGRWTATTIRGILTNEKYTGDVILQKTYTDSHFNRHTNYGEKNMYLVENHHEAIISHEDFEAVDAVLNQRAKEKGIEKRNSKYLNRYAFSSKIICSECGSTFKRRVHSSRRKYIAWCCSKHISNITECSMQFIRDEDIKTAFATMMNKLIFGHKFILRPLLDELRSKNNAKSFRRIEELETKIVNNMEQSQVLTGLMAKGYLEPALFNKEKNALEAERERFLAEKDQLTRSVNGNIAKVDEVDRLLKFATKSKMLTAYEDELFENYVEKIMVFSREEVGFELKCGITLKERLVN

SEQ ID NO: 24729 - protein, 527 aa, synthetic construct
MTTAKNVMVIPARRRLGNTVQAEERPKLRVAAYCRVSTDSDEQATSYEAQVEHYTAFIKQNSEWEFAGIFADDGISGTNTKKREEFNRMIGECMAGNIDLIVTKSISRFARNTLDCLKYIRELKEKNIPVFFEKENINTMDSKGEVLLTIMASLAQQESQSLSQNVKLGLQYRYQNGEVQVNHNRFLGYTKDEDGHLIIEPVEAEVVKRIYREYLEGASLLQICRSLKADSILTAANKPHWRPETVKKILQNEKYIGDALLQKTYTVDFLTKKRVKNNGIVPQYYVENSHEAIIPRDLYMQVQEEMVRRANLHSGANRKKRVYSSRYALSSHVYCPKCGDIYRRIAWNNRGKRSTVWRCVSRVEHGPKCCDAPTVQESALQDAVMQAINKAYHSRDTVIEQLKQNIETVLSKAEQPAEDIDGRLEELQKELLKLASRKADYTEVADEIDRLRELKQNALTEAAERDSYKKRIDEMMKYLKEQDEDIENYDEALVRKMIEKVMVYEDKFTVEFKAGISLDVVRWEVII

SEQ ID NO: 24730 - protein, 464 aa, synthetic construct
MARSVTVIPARNRQRETGRRAVQEKKIRVAAYCRVSTDQEDQLHSFEAQVDYYTKYINDHENYEMAGIYADEGISGTNTKKREQFKRMIADCEGGKIDLVITKSISRFARNTQDCLAYSRKLKNLGIGIIFEKENINTLDSTGELLFTILSSLAQDESRNISENCKWGIRTKFKNGEMHLNTFKFLGYDKDENGKLVINKEQAKTVRRIYRDFLIGINPAQIAKELTEEKVPGCNGQTKWYPSTIVGILKQEKHMGDALLQKTYTADFLTKRQVKNNGEIAQVYVKDSHKGIIDKETWNAVQEEFERRERFMKDHGTDRYSYGADCMPFCEKVFCGECKSLFTRHSWKSRGIVQWQCKNHRTDGRVTCSNAYVDNSNLEKGFVKAFNKLVADREKFMERWNQMKTDGSPLEKIRAEQMMEATENEPLGRFVPEIAQLVLAEVTVLGAKKYEFFFLEGSRIKVPV

SEQ ID NO: 24731 - protein, 498 aa, synthetic construct
MEIQIREGNSRQKRKLKVCAYCRVSTDADEQENSLENQIRHYEEAITSNPDYEYAGVYSDFAISGFKEKRPGLQKMLADARKGKIDLILTKSVSRFARNTSIVLEATRKLKELNVGVFFELQNINTLSGEGELMLTILAAFAQAESESGSAGAKMVYQRKYEAGIPVQYLERSFGYMKDERGVYIADESEAVWVRKIYEMAADGYTPAAIKRYLNENGVKTVGGTKWIDSTVFRLIENEIYKGDYIMHKHFVNEERKLVRNRGEVDAWYIEDDHEAIVSPELWQKAQDAIEAKRDYLAEGSVIEDFTEENYPYMNRIFCAKCGHPLYRRIYSNGNRLNWGCSGTKRHGKSFCEGINIPDGVIRKAWHFDGNMYIDEKPSVKGTKEFTYLKESSWKRRHKKKVPEAIPENTEEAYPYRKKIFCGLCGSRLVRHVNPKSHKVIWICNGAKRKGVAFCRGTRIPDSVIRGWGEIKKDIYIQRKDDKNGKKRYSYTSKKPTA

SEQ ID NO: 24732 - protein, 590 aa, synthetic construct
MKFKYPAMGTTKNAVIYARYSSHSQREESIEGQLRICHEYAKAEGLAIVGEYIDRAISGTTDARPDFQRMIDDAKKKQFSYVIVYRLDRFARNRYDSVLYKHELKQCGVKVVSATEGIGTGDESILLEALIEASAEYYSMELSRKIKRGRQDSAMKGNFLGGSVPLGYKVVDSKFIIDDETAPIVRYIFERYAAGTGKKQIIDELTAKGYMRRNGKPFTYRSFDSVLRNRKYTGEFTQTGITVEGGCPAIVDTEMFEKVQARLEINRRAPAKAKAKTEYLLSGKMFCGYCGEPMIGISGTGRHGKTFYYYSCVGRRGKSGCKKQHEKKDFIEWYVCEQTVQYMQDPERLSHVAKRIIEINDAEFDGGKVKELERAVENCDNDIRKLVDALTTIPDAGRAALYDKIERIGAAKADMEIDLAKLRVLSEVRYKQEDVEAWIRSMCRGDLMDFEFRRQLIDVFINSVYLFDDRVVIIYNIKNGKQVSAIDVLNAVEELDGVELSSDSTEDGNAGGSGSFLVADAPPYMKNPNLFPIGNGFGFLIFIKDIIDCAWVPGFALRKTGGFVHSTKHSSFCIIAVSTKRGIAYGSSVH

SEQ ID NO: 24733 - protein, 467 aa, synthetic construct
MIRMARSVTVIPARNRQCETGRRAVQEKKIRVAAYCRVSTDQEDQLHSFEAQVDYYTKYINDHENYEMAGIYADEGISGTNTKKREQFKRMIADCEGGKIDLVITKSISRFARNTQDCLAYSRKLKNLGIGIIFEKENINTLDSTGELLFTILSSLAQDESRNISENCKWGIRTKFKNGEMHLNTFKFLGYDKDENGKLVINKEQAKTVRRIYRDFLIGINPAQIAKELTEEKVPGCNGQTKWYPSTIVGILKQEKHMGDALLQKTYTADFLTKRQVKNNGEIAQVYVKDSHKGIIDKETWNAVQEEFERRERFMKDHGTDRYSYGADCMPFCEKVFCGECKSLFTRHSWKSRGIVQWQCKNHRTDGRVTCSNAYVDNSNLEKGFVKAFNKLVADREKFMERWNQMKTDGSPLEKIRAEQMMEATENEPLGRFVPEIAQLVLAEVTVLGAKKYEFFFLEGSRIKVSV

SEQ ID NO: 24734 - protein, 542 aa, synthetic construct
MYPFLSCTGATRIYFKERMVNMAEFENVIIYLRKSRSDDPMQTVEDVLAKHESILQDYSIKQWGKPVPENRIFREVVSGETIQDRPVMQQIMKLLETGFISGVLIIEPQRLSRGDLQDCGRIINSFRYTNTVVITPPKTYNLSDEYDRKFFEMELTRGNDYLEYTKKILNRGRIASIKSGNYIGNIAPYGYRKVVIGTGKDKYHTLDIEPKEAEAVRIMFNLYVNKDYGFTNIAHFLDNAGYKPRNSDNWSPAAISSMLNNEIYIGRVVWNRRQTVKKMQDGMIVRTRPRHNDYISVPGKHPAIISEELFYAAKKKRGRTPKVKKFTELTNPLAGLLFCGRCGFAISMKKYTDKRSKTGHETITMLCNNQSNCHTKSVMYSLIIAKVKLSLQQAINDFEVHINNNDDSEQILQQNIINNLTEELEHLKEKDIRQKDAYEDGIYSKEEFLKRNAKLTEQISIAQEKLNNALLEEPRVCDYEEKIVRFRDCLNTLDDDNVSATVKNTLLKACIDKILYYNDSPSLPGIGRYVDNPFRLEIFLKL

SEQ ID NO: 24735 - protein, 605 aa, synthetic construct
MGKKQKTNGGDAVIYARYSSHNQRDVSIEQQVEACRKHAAELGLTVTATYEDRAISGKTDKRPSFQRMMRDAEQHKFAYVLAWKSNRIGRNMMQALVNESRLVDCGVKVFYAEEDFDDNAAGRFALRSMMNVNQFYIENMAEDVKRGLYDNAKKGLVNGSLPLGYKRGADGKPEIDEPKAAIVREIYTRVAAGELFASIAADLNARGIRTARGREWNKGSFHVLCHNDRYRGIYMYGDIRIPGGMPRIISDELFYDAQEAYGMKKDNRYGRARHGAENYLLTGKLYCGHCGSYMVGISGTSKTGEMHYYYACQKHRLEHTCEKKAIRRDVIENAVARVIMMYCLDDETIDFIVDSTIAYFKQKDHELHIEAMENELAAVQQAISNLMKAIEAGIITPTTRTRLLDLEEQQAKLSGKINTAKAERVEIDRDDLIAGLQLFRTGDIKNKKFLAKLFNTFLLAVYLYDDNRLKIVFSFTGNHNNIEIPLELDNDCPDSESGSYETEVRMSHLECRKNSGTPPSSGGAEKGDGCSGGRFVRTAPLPPHKKRLHRTVSRLVEPFYVCLCSCFLPLFYHFLTTLGASEAVKTAGIRSYLHIPKQTKTRMSA

SEQ ID NO: 24736 - protein, 498 aa, synthetic construct
MEIQIREGNREQKRKLRVCAYCRVSTDADEQENSLENQIRHYETVIKANPSYEYAGVYSDFAISGFKEKRPGLQKMLADAQKGKIHLILTKSVSRFARNTSIVLEATRKLKELNVGVFFELQNINTLSGEGELMLTILAAFAQAESESGSAGAKMVYQRKYEAGIPVQYLERSFGYTKDERGVYIADESEAVWVRKIYEMAADGYTPAAIKRYLNENGVKTVGGTKWIDSTVFRLIENEIYKGDYIMHKHFVNEERKLVRNRGEVDAWYIEDDHEAIVSPELWQKAQDAIEAKREYLAEGSVIEDFTEENYPYMNRMFCAKCGHALYRRIYSNGNRLNWGCSGTKRHGKSFCEGINIPDGVLRKAWHFDGNMYIDEKPSVKGTKEFTYLKESSWKRRHKKKVPEAIPENTEEAYPYRKNIFCGLCGSRLVRHVNPKSHKVIWICNGAKRKGVAFCRGTRIPDSVIRGWGEIKKDIYIQRKDDKNGKKRYSYTSKKPTA

SEQ ID NO: 24737 - protein, 464 aa, synthetic construct
MARSVTVIPARNRQRETGRRAVQEKKIRVAAYCRVSTDQEDQLHSFEAQVDYYTKYINDHENYEMAGIYADEGISGTNTKKREQFKRMIADCEGGKIDLVITKSISRFARNTQDCLAYSRKLKNLGIGIIFEKENINTLDSTGELLFTILSSLAQDESRNISENCKWGIRTKFKNGEMHLNTFKFLGYDKDENGKLVINKEQAKTVRRIYRDFLIGINPAQIAKELTEEKVPGCNGQTKWYPSTIVGILKQEKHMGDALLQKTYTADFLTKRQVKNNGEIAQVYVKDSHKGIIDKQTWHAVQEEFERRERFMEAHGTDRYSYGADCMPFCEKVFCGECKSLFTRHSWKSREIVQWQCKNHRTDGRVTCSNAYVDNSDLEKGFVKAFNKLVADREKFMERWNQIKTDGSPLEKIRAEQMMEATENELLGRFVPEIAQLVLAEVTVLGAKKYEFFFQEGSRVKVSV

SEQ ID NO: 24738 - protein, 421 aa, synthetic construct
MKLRKIEPLKPKQKKLRVCAYARVSTDCLKQGESFENQVSTYERVIKSNPEYEFVSVYADQGMTGRSENRPEFQRMIADCKAGKIDLIITKSISRFARNTTTVLKYTRELKELDVGVLFEENNINTLSSEGELMMTVLASFAQEESRSISENNKWTLKKKFERGEGMVNTARFMGYDKDETGDLVINKEEAKVVRRIFEMYLSGIGCHRIAKALNEEGIPTVAGTSWHASTIKGMLKNEKYKGDFHIQKTYIPEGSHQSVINNGQEQSYYVTEDHPAIINAEEWQQAQEMLEYHRKERNIGKGTKYKNRYPMSGMLVCPYCGKSLRRRYVYNRKVEWLCATYIHKGKEACKGIRIKDTELAGLSFSEPMVVEEVMIDGEKHYGYTSKRAYDAGERAADRIQEESSSVLPRVNGPRRTVIKL

SEQ ID NO: 24739 - protein, 504 aa, synthetic construct
MNGVIYARYSSENQREESIDGQLRECTAFAQHNDIQIVGEYIDRAFSAKTDNRPSFQKMIKDSAKGEFDVIIVWKLDRFARNRYDSAHYKNILKKNGVKVVSATEAISSGAEGIILESVLEGMAEYYSAELAEKVSRGMKENALKCKYNGGSVPLGYYIDESKHFQIDSSVAPFVVECFEHYADGMTMKQLRDELNMKGVKNSRGGKLSIDVISRMLTNRKYLGEYTFQDITIKDGIPAIVSTSLFEKVQDRLTKTKKAPSSHKADDDYILTTKLFCGKCKSFMVGESGTNAQGKKYRYYKCVNHKKHQGCDMKSIRKDLIENMTIKYIREFLNDEDLINTLIDLAYDAQHKENEQLPLLRKQLAQTEKGIKNIVDAIEQGISTKSTRERLLDLEQRKNDIEMSISKESIENPMLTKKQFKFWFDQLKKLDISKSEQRQKLVDLFVNSIIIYDDHIKFFFNYKEHTETITFDELNNCSDLPDSPRPKKEIPNERYLFLFSMHKT

SEQ ID NO: 24740 - protein, 550 aa, synthetic construct
MNRQPNIDAALVEKITALYCRLSRDDELQGDSNSIKNQKAILQKYAEDNGFRNLRFFVDDGYSGTNFDRPDFQRMIAEMGDGNVATIIVKDMSRLGRDYLKVGYYTEVAFPEADVRFIAINNGVDSANQQDSDFTPFLNIINEWYAKDTSKKIRAVFKAKGESGKPLCTNPPYGYVKDPQDKLHWIIDEDAATVVKEIFHLCMKGLGPTQIATELTKRKIENPAAHGKRNGINVSAQQERDDLFIWRTSTIARILTRQEYLGHTVNFKTKRKSYKQKKQLKNNPSEWQIFRNTHDAIIDEETFKTVQRIRDGRRKVSRLGDMGILSGMMFCADCDNKLYQVRGKGWEHDKEYFVCATYRKVKGGCSSHQIRNVVVEQLLLQNLQRVTAFARGHEDEFLQLITNNFEKELNKELRDCRKEFDQAKARISKLDTIIQRLYEDNVEGKISDERFMKMSTTYESEQKELNARVTALRYFIDHAKEKSLNAEHFLSLVRKYTDIKELDAEIIREFVEKIIVFKAEKIDGHRVQRIQIIYNCIGAVELPSKHEKTA

SEQ ID NO: 24741 - protein, 477 aa, synthetic construct
MGTTKNAVIYARYSSHSQREESIEGQLRICHEYAKAEGLAIVGEYIDRAISGTTDARPDFQRMIDDAKKKQFSYVIVYRLDRFARNRYDSVLYKHELKQCGVKVVSATEGIGTGDESILLEALIEASAEYYSMELSRKIKRGRQDSAMKGNFLGGSVPLGYKVVDSKFIIDDETAPIVRYIFERYAAGTGKKQIIDELTAKGYMRRNGKPFTYRSFDSVLRNRKYTGEFTQTGITVEGGCPAIVDTEMFEKVQARLEINRRAPAKAKAKTEYLLSGKMFCGYCGEPMIGISGTGRHGKTFYYYSCVGRRGKSGCKKQHEKKDFIEWYVCEQTVQYMQDPERLSHVAKRIIEINDAEFDGGKVKELERAVENCDNDIRKLVDALTTIPDAGRAALYDKIERIGAAKADMEIDLAKLRVLSEVRYKQEDVEAWIRSMCRGDLMDFEFRRQLIFSSTLCICLTIELLLFIISRTASRCLP

SEQ ID NO: 24742 - protein, 519 aa, synthetic construct
MKRITKIEEKKLEVRKIRVAAYCRVSTASEEQLISLDAQKAHYEEYIKVNDSWEYAGLYYDEGVSGTKKEHRDGLLKLIADCEKGLIDMIITKSISRFSRNTTDCLELVRKLIDLNVMVFFEKENLNTGQMESELMLSVLSGLAENESVSISENNKWSVQKRFQNGTYIIGYPPYGYRNENGEMVVVPEQAEIVRKIFADTLSGKSSHTIAKELNEQGAVSKRGGKWTSGTIVSILHNEKYTGDAIFQKTYTDSRFNRHINHGECDRYLFQGHHEAIISHEIYEKANEVMNQRGREKGNGENTHRYQNRYGFSGKIQCGECGSVFKRRIHYKPSGDYVAWSCKNHIENKDACSMKYITDDALKLAFLTMINKLIFACKKMLTPMFRNLQGYYDKEYLLQIQEYEMKLEKNIEKRQVLMSLMSGGLLESALFNKENNALILEEQRLREEKNKVIYSVSGDRTKVETLQELIKCISGREFLTEYDDELFIAHVDHITVVSRTEVIFSLKCGLNLKERLREQ

SEQ ID NO: 24743 - protein, 521 aa, synthetic construct
MNKSITVIPARKRVGNTINREEKPKLRVVAYCRVSTDSDEQATSYETQMEHYTSYIQRNPEWEFAGIFADDGISGTNTKKREEFNRMIEECMAGHIDMIITKSISRFARNTLDCLKYIRLLKEKNIPVFFEKENINTMDSKGEVLLTIMASLAQQESESLSKNVKLGLQFRYQNGEVQVNHNRFMGYTKDENGHLIIVPSEAEVIKRIYLEYLQGASLKQIGESLEADGILTAAGKAKWRPETIKKILKNEKYIGDALLQKTYTIDVLTKKRIQNNGIVPKYYVENDHEPIIPRNLYMQVQEEMLRRANMHSGEKMKKRVYSGKYALSSIVYCSKCGDIYRRIAWNNRGKHSVVWRCVSRVEHGPDCCDAKTVKEEELQNVIVKAINQIIGDRSEMFDVLQENIESVIIMEDKNSLESINVRLEETQKELLKRANAKQNYDDVADEIERLREMKQVALAKNAECESRKQRIYEMKQYLKEQTEQIQEYDDSLVRRMIEKITVYDDRFTIKFKSGTSVDIVM

SEQ ID NO: 24744 - protein, 628 aa, synthetic construct
MKAAFLIRCSTKNQDLNRQTRDLTRLAKSMGYEYDLENLVYGEKITGKDDVTKKNRDSIDRLLRAAKEQRFDVVLVSEVSRMSRDPASGRIYVRLLINMNIPVYFKDIDLWTINPETGKKVRDAELVIGAAFDAAWKYLKSMKTQIASARRNELDNNRISIGQPYFGYKRYEGTDKSKKNQIVVNEEEAEVVQAVYNEYLKEGATLKSTALAITDKYGEKLNRKFSLGTIEHILTYESYATGIKKVNLKDPDTDEVEVFDVNTPIIIDKELYEAATNKRKKNRVKDEPYPNQQVYLLSKLIKCPDCGYTLTPRRKAGEFGQTYRLVNGKPAVSWFCMSGINNITNCTNRTSIANEKLEPIIWELVKKELIGYANMNDEKREEQIRECEEKIEYQNYSIQNFTKEIDKLKKRLSTAYQFSINAAEMAGDDEDMRTMAMEEFNRTAKGVRQEMKNFEKSIEQAKGELEKLRDLKTFYSQPTLPKDYLEQIEGNFTEKRNLVKQLITKIVPYRITTFKKKERESGVKTCNKMITVKNGAVLLEVYTIGGVYNVFYNANSKFQVKTAYYVHGEYATFQNGIRKFPAYDEGEYFVINNANMVMETDDIDEVVTVNEFVDIAIANNWVIEYQYI

SEQ ID NO: 24745 - protein, 558 aa, synthetic construct
MKNKKIKCDIYTRVSTTMQVDGYSLDAQKEKLKRYAEFQNMEIVNEYSDEGKSGKSVEGRPEFQRMLDNIENGTDEVQFVLVFKLSRFGRNAADVLNSLQRMQDFGVNLICVEDGIDSSKDSGKLMISVLSAVAEIERENILVQTMEGRKQKAREGKWNGGFAPYGYELVNGELQIAEDEAEIIRLIYDKFIHTNMGISAIAAWLNQHGYKKKKRQNNTLDAFAASFIKGVLDNPVYCGKLAYGRRKNEKVSGTRNEYRIVKQENYMLHDGIHEGIVSETDWELAHQKREKTGVKYEKTHSLDHEHILSGILRCPLCGSGMYGNVNRKKKKDGTLYKDYFYYACKHRRLVDGHKCGYRKQWSEEKINNAVEEVIRKLVKNPKFEEAILNKIGSRIDTEEIEKEIERLEKQHRQLTGAKGRLGQQMDSLDIMDKFYEKKYQDMETRLYRLYDEIEGVENSIEEVKNRLLNIRQQKISEENVYQFLLYFDKLYDKFTDLEKKEFLNSFVEQVDIYEQEQPDGRFLKHIKFRFPVYFGDRETQELCWDNESTVETVVKLSR

SEQ ID NO: 24746 - protein, 517 aa, synthetic construct
MTKNKKTDTVSEKCKAVIYARFSSDKQREESIEGQIRECTQFAKSQNLEIIGTYIDRALSARSDNRPDFLRMIADSSKGLFQYVVVYQLDRFSRSRYDSAVYKHKLKKNGVRVLSAKERIGDDPSSIILESMLEGYAEYYSAELSQKVKRGMTENVLEHKWTGGYVPLGYCLAPDKTLQIDPVGAEAVKIIYDKWIAGCRIMEIIRYLNDHNYVTSRKAKFRYSSLNRILTNPIYTGLYQWGSIEVADYAPAIITQKQFALAQEKIHHIKAHPRAKRRSANYALTGMIYCGVCGSPMTGQSGHSKSSALYHYYRCSTKNNYHDRGKKLNIKCTNRNISRDKLEDLVLQTTINILMNPEAVRMIAKQAVAAQEKDPAATEIDRIKEDKKLIQKKLNNSIKAVEAGIISTTLAANISQYEKEIADLDIKMEKIKLLSTPVKIDEIAVEFFLKSLLLNKKEHDKYRLDMFQTFIRRVVVYPDKVEIQYNYTATPHILENPVTKMMTGFSGCSRCERLVTR

SEQ ID NO: 24747 - protein, 531 aa, synthetic construct
MNDSEKITGSLALKPKPRIITIPATGQDLTRPLRVAAYARVSSDSNDQLHSYAAQTAYFAKLINSNPNWIFADIYADQGITGTSVEKRDDFLRMMEDSRSGRIDRILVKSTSRFARNTKESLEAVRELKSLGVSVYFEEQNIDTAQATGEALTAVFSALAQKESEAISERMRHSYQMRMQRGVFSTRCAPYGYRLVDNQLEVIEDEAVVIRQIFDRYLSGISMEDIAKEITALGIPTKQNTPFWQVRSIQYILRNEKYIGNSLVQKTYATVTLPHRKKENKGEEDQYLIEETHPPIVNQGVFDKVQQLLSRKSASIPPRAGIPHSLSCKIVCGHCGAICKRKVCRGTAYWVCQTHEKSAGSCLTMQTPELEITEAFLRVYFRLKRYGEEILTQLIQALQTAKTGRLLWSEDIISLNKRIADIASQERLLAQLKQQTIVDPDIFISRSNQLAEQRREAKLKKSRILRAEDDQTIQRTQELLDILEEGPDLLMAFDGALFSELVEKITIQNNSTAIFRLINGLELPEHFERRK

SEQ ID NO: 24748 - protein, 551 aa, synthetic construct
MAEPRPKRKIIIIPAKKESPQEQAKKRNLRVAAYCRVSTGDEEQLTSYENQKAFYTEKIMKNPDWTMVDIFADEGITGTSTCRRKQFLRMIRQCRQGKIDMILAKSVSRFARNTLDTISYTRELRSLGIAVIFEEQNINSIHPESEFLIALHAAFAQSESESISANVRWGKRQSIKDGKVTFQYKTMLGYKKGVDGNPEIIPEEAETVRRIFERYLAGKSIQNIRQALEASGVRNAAGTTEWTTSNLRSILTNEKYCGDALLQKTFIKDCISKKAILNTGQLPKVLIQDNHEAIVSREMFDAVQLEIARRRAQDGRTRKSAPTGCGKFSGKYALSGLLFCAECGTAYRRVVWTQHGEKRAVWRCTSRLDYGKRYCLHSPTLDEGPLQQAILSAVNSAMSDHGTLTAQLIDAMEQEFAPIPGESMSLGDIDRAMEGLGQQFNELLRKAADANNADSYTAQFQSISTAMAELKRRKAKILQIRQEQEQTNRRVQAVASVLKTASSELMEWDDNVIYQLLEKVTVLSRERIRVTLRDGLEIEQAVEQPKRRKFT

SEQ ID NO: 24749 - protein, 506 aa, synthetic construct
MPKKEANQPIKAVLYARYSSDRQREESIEGQIRVCEDYAKKNNMVIVHTYADRAMTGRSDQRPEFQMMIQAAATQAFDVVLVYKLNRFARNRYDSAKYKHKLKKYGVHVVSAMENIADDPSGILLESVIEGMAEYYSAELAENVMRGMTENALECKWSGGLVPLGYKLDADHHLVIDEAGAQIVRRIYQMVLDGRTPTGIINELNAANCRTSTGRPFGKSSLTTILRNEKYIGTYTWNHIRKENAIPAIIDRKTFEAVQKTLQYRKNNHVKVCSENFLLTGKLFCGQCGSNMVGTSGTSKYKNTYYYYACTKHLKKDGCTARNIRADKLEELVCSVTTRILSSKEAVRAIARQAVEAQKKQKESLTVQSLKNQAAEINKKLKNCVQAVESGLISVTITNHIKEYEKRLTELNEAISREELLSGKSKLTEKHIEFFFYSIAQKIKTADKYKSILLSLLVRCVIVYDDYIEIQYNYKNELPLMQNPVRVKSSNLNGMVTQERFELPTP

SEQ ID NO: 24750 - protein, 519 aa, synthetic construct
MKTITEITRQKPTPPQIRLAAYCRVSSDSSDQLHSFAAQIKYYSEYCKRHPEYKFVDIYADEGITGTSMEKRDDFRRMLRDCKKGLIDRIIVKSMSRFARNTEEMLTALRALEQMEVSVYFEEQGLDTKSMNSEMFATFPGMVAQQESVSISQNMRWSYKKRMESGEFNCCAPAYGFDLINGKLVINETEAAVIRRIFDLYLQGVGMQTIANILNDEGVRRQYGRKKWHHTTVNYVLNNERYKGDALLQKQITTQTLPFKKQLNHGEQPMYYVENSNPAIVSRETYEAVQALIKSRQPSCKRKAKTYPLTRTLLCPDCGHTFRRQVVNGTAYWLCAAKATNKTDCAWRRVKEDEVYATFSLMIRKVQANREYLLGTLIRQLEELQYRTTGSQQRVKEIDREIADLTAQNLVLSRLHGKGVLNAADYTAQSDVLENKITELRIERRTKITDSDENEMLEELKMLNDILKGVEIGIGFDAELFEQTVDSITVESSELLTFHLAGGISLPEKIREKGRCYQA

SEQ ID NO: 24751 - protein, 545 aa, synthetic construct
MMQATSVQPPKTVRIIPATIDTKAAITQSYRQLRVAAYCRVSTKQDEQLNSYEVQRTHYEERIRTEPKWSLVGIFADKGITGTSMKKRDEFNKMLRLCYKGKIDMIIVKSISRFARNTLDVIKITRKLREINVDVFFEEQGIHSIDPASEFYITIYGSIAQSESENISANVKWGKAQSAKQGNVPFQCKHFLGYTKNADGEIEIVPEEAEIIREIYEQYLSGESLYGIKCYLEAKEIPTPAGCSVWRQETIRSILTNEKYKGDAIINKTYVSDCISKRVKANNGERNKYYIENNHPAIIDAGTFARVQEEIARRSGKPKVKQKGTKTELSRYSSKYALSELLICGECRTPYRRCTWTAKGKRKIVWRCINRLDYGKKYCHHSPSIEESLLQDAVMRAIMQTAKQNIEVLKTLKIHIGMGLTDEVTEDKTLDIQIRIAEIDAEFQKMLKAVSADNADGIDEERITELMNEKQRLTVQLEQYASVRQKRESAKSRLDEIYAILDGLQNHPMEYDDKLVRQIIECIVVESKEKIKVVFIGGTEIEMVL

SEQ ID NO: 24752 - protein, 524 aa, synthetic construct
MLMNVTEITAKSKEENKIIRLAAYCRVSSDSADQLHSFAAQIRYYKDYEQKHPEYKLVDIYADEGLTGTSMEKRDELNRLIRDCKKGKIDRIVVKSVSRFARNTQELLVCIRLLKELGISVYFEEQGIDTDKLNMEMIVTFPGMAAQQESESISGNMRWSYKKRMESGEFNCCNPAYGYILKDGQLMINEPQAAIIRRIFDLYLSGVGKQSIANILNDEGVSRRYGKDKWYESTVHYILNNERYMGDALLQKSYTTETLPFKRKMNHGELPKYYVENSNPPIVSREIYQAVQTLQNSRKNVYSNSKGKYLLSKVMRCPDCGMTFRRQIVKGTAYWLCSNKAASMTDCRPLRLKETAVYETFTMLVQKLTDNRKTLLGDLIRQVEAMQNRTSDNIDVIRRIDKKIADLAAQNLVIARLHTNGVINSAEFSAQSSEINNKISTLRTKRRKKLSDDENDAWFDTLNSLNEILEAYDPSNNFDEELFEKIVVGITVNSNADLTFKLIGDIELTEEIPLKGRCRRRENS

SEQ ID NO: 24753 - protein, 592 aa, synthetic construct
MTAVIYARYSSDSQREASIEGQLRDCKDYAEKNGITVVGTYIDRAYSAKTDDRPDFQRMIKDSGKKIFDVVLVWKLDRFARNRFDAVNYKYQLEKNGVHLVSAMEPISQGPEGIMVESMLIGMAEYYSAELALKVARGERENALQCKYNGGVVPLGFTIGKEDRLYHIDPETAPIVQEIFSRYANGEPAEKIAASLNERGLRTRTGKPFVKNSFFQIFRNRRYIGEYRYKDIVTPGGIPAIVDQDLFDRVQQRFEQNRIAHGRPAKEDVSYLLTTKLFCGKCGTLMGGESGTSHMGNTYYYYKCGKAKRHGKAHCDLKAIRKEPLERFVVDTAIKVIFSDEIIERLIDLIMEAQQQENTRLPVLKEQLRDTEKRLANLLEAIEQGILTPTTKQRLDELEAQKEALNTSILEEELKKPVLTREWIRFWLEKFRKGDVGSTEHQRQIIDTFVNSVYVFDDRVVLNFNFTDDAKMVTREEVLGSSAVENAPPQKSLDFRLRIFCLVAVQDSNRAALTTPVGRVSNQPSGLLLSPRVPTRRNVYQGCTHFVPVSFCAREQTSNNTIYYIKESAMNSENSSRFFSYAGSGGRTTKND

SEQ ID NO: 24754 - protein, 534 aa, synthetic construct
MARKKNIAAGLDAVIYARYSSHNQREVSIEQQIAECTKHAAALGLRIVGTYEDRAISGKTDNRPRFQQMMRDAEKGKFQAVVAWKSNRIGRNMLQAMVNEAKLDDYGVKVFYAEEDFDDTAAGRFALRNMMNVNQFYSENMAEDITRGLYDNASKCMANGRQPLGYKRGEDGRVVLDEANAAVVREIFTRVAAGDLFVDIARDLNAQGIKTSKGANWNKGSFQSICQNERYRGIYIYGDVRVADGIPRIVSDDLWYRVQEAMRMKKNPVGTRHRVGAEDYLLTGKLRCGHCGSYMTGVSGTSRNGELHYYYTCQKRRTEHACDKKNIRRDVIEPAVAQAIKMYCLTDDVIAWIADRTVEYWEKHDNDLQIEALEQQLEENKKATSNMLKAIEMGIITEATRTRMVELETEQSRLSVQLNAAKEDVVKIDREQIISYLELLQQGDIHDRDFQMELFKNFLVAVYVYDDNRMKLVFSCMGDQNSVEIPLETGEDPPDGGLSPDAKMFVLTPDSSTKSERHHTLCGAFFVVAKRVRA

SEQ ID NO: 24755 - protein, 489 aa, synthetic construct
MLKNIPAVVYARYSSSNQREESIEDQLRECYKFADREGYNVIGQYCDHAISGRTDDRPEFLRMICDAEKQLFKAVIVYRLDRFARNRFDSVLYKSRLAQYKVNVVSATECIPEGSDGVLIEALHEALAQKYSDDLSQIIRRGLYGNAEHCKSNGPLPFGYKANPTTRLVEIDEETAPIVKQIFTMIAEGSNYNQALAYCTRMGYPKTKNALYHILRNERYKGIYIYANKRTEGGIPCIVSEELFAAANATRQKHINKPNAGSYKYLLTGKLYCKDCENLYSGGYGTSRWGKKSYYYVCSGKKRKHICAAANINAPKIESMVVDALYMFILNEDIISAIIDAALECQERNSPHKNNIMVINRRIAEIEKKLNNLLKAIEAGVLTETTMSRMQELEEKKKSLQRSLMKEKLKAPKISRSQLEFFFEKLRGEDPHARKFQKCLIDTFVNRIYPDGNTVKMVVNLGAPDDETLTYSKLSPCFAGFDKRNFWWR

SEQ ID NO: 24756 - protein, 432 aa, synthetic construct
MPRAVTIVPKPPRLDQKKRVAAYARVSSGKDAMLHSLSAQVSYYSDLIQNHDEWLYVGVYTDEAKTGTKDSREDFQRLIADCRAGKIDMVITKSISRFARNTVTLLQTVREFKAMEVDIYFEEQNIHTLSGDGELMMTILASYAQEESRSASENQKWRIKRNFESGMPWNGAMLGYRLHNGRYEILEAEAQIVRRIYSEYLSGNGYATIAKGLNEDGIPSRFGGQWAQSVISKILSNYTYTCNLILQKTYRENHLTKRTIINKGQLPQYHVEESHEPIIDMDTFNAVQAEKVRRAARFNRKHQPKKTYPFTGMIVCEICGKNYRRKITATGPVWVCGTFNTKGKAYCASKQIPESTLQQITAEVLETAVFEPDSLRKVSSILVCRGNRLTFRSHNGTEITRQWKDRSRSESWTDEMKDAARQKALERRNNNA

SEQ ID NO: 24757 - protein, 556 aa, synthetic construct
MVMWMKGKSGTKKDGRKAYIKLLEDMQEDKFDIIVVKSQDRLQRNTFDWYKFADLLNKNNKRLYLYMDNKFYEPSEDALITGIKAILAEQYSRDLSKKLNNYHEHRIEKARAGEEVPAMGNGQTYGYQLINGKWVVDESQRELVRKMYELYTDLHSVCKVRDALNEQGYRNQRGNLFTDENIGRIVKNVMHKGWVILNRHHKEFDSKETIKKLEDEWVIVKNDHEAIVSEELWDAVNDEIQSHRNKGNSGTRGKRGGTDPLSGKMVCNCCGRVLWKHASQGSYKSKEGRKYTYKRYTQWYCSGKMGRGELACTDPATISGVKLQKYLVEMADMFLDYSTVEYSKNLLKRRTISWLEDLKDKLTTPNDNGKIEQDLKALEGKRGKLIDLYTDELISKEEFKSRSVDLDAEIEKKRALLVPVEENPDIKAIEDTIANIDAEIGALFEDEAMVEEKKVQFIQEHIKKVYVSKNSDVFIVLDNVAGAFLFIDKEDTRIEVVPVAEYNPEELSEEGITENDFVPFDRESMPQHHGPKHLHPSGPQTASRCCFRDRFSRDQP

SEQ ID NO: 24758 - protein, 548 aa, synthetic construct
MAETAKKISMIPAKVQYDRNVKLSEKKMKVAAYCRVSTELEEQDSSYEAQVEYYTSKISENENWKNAGIYADDGKSGTNTKKRADFNAMIQDALAGKIDMILTKSVSRFARNTVDSLVTIRKLKEKNVAVVFEKEGINTLEGTGEILITILSSLAQEESRNISENIRWGVVRKFEKGKVIVNCTKFMGYTKNEDGDLVIVPEEAEIVKLIFRLYLEGYSTGKIAKHLEEQGIKTATGQDKWHSTVIDKMLRNEKYMGDALLQKTYTVDFMTKKKVKNTGIVPQYYVEDDHEAIIPKELFYRVQEEMMRRASLCKAAVTRKKNQRSRYSSTYALTGMLICGKCGQEYRRVTWARNGKKKVVWRCSNRLTNGVKKCGESETLEENALNRAVMEAIHRITSDDMEFMENFRQNIIHVIGNYSTAKESGEYEEKIKEKIKEKQEEMVALIAENAKTGSYTPKFDERYRTIAEEINALKEAQKTARNEKRMADSYEQRIQDIDHYLSTSTCQIPEFDNDLVRRLISTIKVESSEKLLIQFQSGIVMEQEIRYE

SEQ ID NO: 24759 - protein, 538 aa, synthetic construct
MVKKVTVIKAAKEQKHTQEERRLKVCGYARVSTGNQAQATSYTAQVEYYTEKIESNPLWEFAGVYADEGISGTNVKHRDEFQMMISDCEDGNIDLILTKSITRFARNTVECIQTIRKLKEIGVGIYFEKENINTLSEKSELFITILASVAQGESENISSNNRWAIQKRFQDGTYIISTPAYGYGKDEDGNLVIIESEAETVRWIYESYLNGMGVYVIAKALNQKGIPTIRGAEKWQDGVIQDILKNPIYEGDTLQQRTYTETRFPFVRRVNNGQRNQYLIKDSHPPIVTHEEAEAVRNLMAYRVDVLHMNKSDYTKRYLFSGRIICGECGKTFRRQKIYIGKPYEKIIWTCSGHVEDKESCCMKAIREDVLHRAFTDMWNKLYTNQGTILEPLLKELTELVAARQDSEEIRQLDKEIKNISEQSQILNQVMRKGYMDSALFMESSSKLGWQLTECRRKKTLLTRKLRRTKKIVRTEQLIQLIAEQDGLREEFDEQLFRMTAEKIEVSKEHDITFCLHNGLKLTERGGGQDAVAHANRL

SEQ ID NO: 24760 - protein, 541 aa, synthetic construct
MTDEKPRVIIIPPKPELQQTAAVTKQLRVAAYCRVSTKEEEQASSYEAQCEYYTDKIMSNKEWAMAGIFADEGITGTSTKKRTEFLRMIRQCKQKKIDLILTKSIQRFARNTLDCINYTRILRQLGIGVLFEKENINSLPADSEFMITMYGAMAQSESESISGNIRRGRQMHAKVGTLKVPCYRLYGYEKDTEGKFRVIPEQAEIVRELYKRYESGASLRNLQDWLEENQIKTVLGESKWTTTAIKGILTNEKYCGDVLLQKTFRTDVISKKVIKNVGQMAQYYMPDHHEAIVSREQYNAVKAEMARRSALRSPSKTAVTGRSCYTSKYALSDRLVCGECGTLYRRCTWTSLGRKYPVWRCTSRLNYGTKYCHDSPTIKEEPLQNAILSAINAAMSDKPVLLDRIKNAVSLELLPVQGQTMSLADIERRLAQLDEQFQTLLAEAIDAEDKDACNAQFAEILTEQTSLKKQKETILQSSADANCVSTRMKQAEEAIENAASTISEWNESAVRQIVERVTVLSADEVLVRIKSGAEIKQTINR

SEQ ID NO: 24761 - protein, 530 aa, synthetic construct
MSKKQTNGNLALEQQRVIVIPAHDELVARKLRVAAYARVSSSSEDQLNSYRVQNQYYSELISGNPDWEMVDIYADEGITGTSVEKREDFQRMMQDCRKGKIDRILVKSISRFARNTKDCLAAVRELKELGVSVQFEEQGIDTSKVSSEMVTAIMASLAQKGSESISSNVRWGVQNRMQDGTYMTASVPFGYELCDKKMKINQEEAQIVHQIFDLYLSGVSIEKIVLELNAGCHENSDKKIWCKTAVSYILGNERYIGDRLLQKFYMTDTLPTKQVRNNGEKAQYYVENTHPAIIDRAQFQAVQALRECRKKRNGCAITMRQSNLRGNCFCGMCGGKLRSKEENGIIYWVCKTHSKDKKSCANSPVQEKIMEQAFCRLYYKLKHYGDPIFTQMLSNLQKIRYNRMLWSEDVISLNKKISDILSQVQFLTQLQQAGGVDPDTFISSNNKLSEQLRRLKQEKARLLDTDSNDLADRTRDLMDALEDGPDFLDGFDAELFDALVEKIIVDSNERLRFRLKNGLELTEQIERTKR

SEQ ID NO: 24762 - protein, 520 aa, synthetic construct
MNKLRAAAYCRVSTDRAEQSGSLASQRSFFDNYIRNSDSMTLVGVFYDEGTSGTTTLNRYGFNKMISLAVSGGIDIILTKEVSRFARNTVDTLNITRMLRAKGVGIIFINDNIDTRDSDGELRLSIMATIAQEESRKISERVKWGQQRKMEQGVVFGRSCLGYDVKDGKITVNADSAEIVKRIFTEYTVLLKGAESIADGLNSEQIRTVNGGRWSGAFIRKVLRNVKYVGDLEQKKTCTPDFLTHKKRLNSSEHIYIRNHHEPIISRELWEQTQAEISRRKPTDTSRHSDRYVFSGKVYCGVCGSVMVSRVKTLKNGKIYHALRCSGRIGGKSCNNETLNVTALKACVKRIFTDMPIDKTAVINAVIKGLSRTDKPDIPALRRKIETLNAKKRRAVDLMLDGLITQQELIEQKSYYDSIIEKLSQEISSDRSVLETDKIRKNAERFLDFTSDPLWLLVIRADYIHDTLTVYLKGIEKGFTTCFTATGRGDSYRVITGNTVRSQGIIPGTMQVQKNYPISK

SEQ ID NO: 24763 - protein, 649 aa, synthetic construct
MNREGKKCVLYPRVSTEMQVDGYSLEGQKNSLKRFADREEMEIVGIYEDAGKSGKSIEGRPAFKKMLSDIKNGLEIEYILVYKLSRFGRNAADILNSLEFVQSYGINLICIEEGIDSSQTSGKLLISVLSAVAEIERENIIEQTMNGRREKARQGGWNGGFAPYGYYLKDNQLLIEETEAEAIRIIFDKFGNSDIGLGGVAKYLNLQGIKKIPRQNGKLETWSSHLIRQILDNPVYCGKIAYGRRTREKVKGTKNEYKQVHTDDYILEDGQHEGIVSEELWQKVHAKRKATGVKQPSKVGKDRSHLLTGVLKCPICGSSMYTNKHAWTNKDGTYKEVYYYICGRNKQERGHHCDYKASLRKIDIEPLVVEAVKELVSDAYFAKEIEKRIGVQTDTSTVDKELANYENKLKEVDLNKARLENEIDNLPADARFRERKIHDMTLRLDALYDTMVELEERIEDAKLRKSSIEMEAITLDNVYKIMQNFGKLYAIMSDEEKKSLITYLIKEIQIYPNGESEMPLKSIEFNFPIYVDGRQVRKVLWERGNTVETVVLLSKGEVDSKKIRVEFSLEDMDMSEFQDGATYTQIKDYVLEHSGLKVSNLYISQIKRKCGIGVGKNYNLPKSEDSRQPQCPPEKEKAIREAFKYFGII

SEQ ID NO: 24764 - protein, 541 aa, synthetic construct
MQVDGYSLDAQRDKLRKYAAYEDMIIAGEYSDEGFSGKNIQGRQDFQRMLNDIQDGKDDVSYVLVFKLSRFGRNAADVLNSLQLMQDFGVNLICVEDGIDSSKDAGKLMISVLSAVAEIERENIRTQTMAGREQKAREGKWNGGFAPYGYKLENGNLVIAEDEVEVIRVIYDRYIHTNEGVAGVAKYLNRNGYVKKLRQNNTIPGFSRDFVKNVLYNPVYMGKIAYGRRRTEKKQGTRNEMHVVEQSEFPVYEGQHEAIISEEDWYLAQEKRKINSFKREKVNNPDHAHILSGILKCPCCGKSMYGNIAKAHSKDKKTRYYYYCKNTVTPTGHECSFRLNIEQTEINKFVAKIISAMVNNPRFVEAIQAKIGTAVDTEDMEKQIDVLQGQLKQAFGTKSRLERQMDTLDINDAHYDRKILDLQRRYDEQYDTIEEIEVQIGELQSQIRSIQQEKISGDNIYRLLLAFDEVYHSATEAEQKEFMKAFIERIEMFPEKRKDGSWIKKIVFNFPVPIDGEEVKELPLETETTVETVCLLSRKAQ

SEQ ID NO: 24765 - protein, 525 aa, synthetic construct
MYLEISNPMDYHVALYIRLSKEDENEGPSQSVQNQESLLREFVQQHRLSVFDTYVDDGWSGASFDRPSFQRMISDIETKKVNMVITKDLSRLGRDYIMTGHYMERYFPEHRVRYISLLDGIDTGVDSTANDITPFRAIMNDMYAKDISKKIKSVKRDKQRKGQFIGGKPMYGYKMHPTEKNKIVIDEEVAPVVRRIFALALSGMSCRKIATTLNEEGIPTPATYCGWKVGNPGPYTGLWSSERISEMLKNETYIGNMVQGRMVKISYKSKKCLRQSPENWVVVEGTHEPIIDPETFQKVQMLVNSRKHTRSRTYDFLLKGLIFCHECGYPMAVLNRKNVAGEDRLFFVCRTYQRFTKAGVCSCHSIKEETVNEAVLTKVREVCQAYLNPDRLRPIAQEAVENASNESSCEAEMQALQSKIIALTTNLDQMYMDRLNGLLSEEDFQRIYQKVKMDRTVLENRLKSLQEQAKQPVNTEEKAKALVKQFLDSALTSRELLVSLIERVELTEEKEIIIKFRFHELEAIS

SEQ ID NO: 24766 - protein, 561 aa, synthetic construct
MNVVIYARFSSHSQTEQSIEGQLKACYEYAERNSYTVIGEYIDRALTGTNDNRPEFLRMIEDSGKKTFQGILVYQLDRFARNRYDSAVYKKKLKKNGVRVLSARENISEDASGILIESVLEGMAEYYSAELSQKIRRGLDINASKCLCTGGGVALGFKVDKDRHFQVDEDTAPVVREIFEMYANGKTVTEIITMMNARNIVTSRGSAFNKNSLRKMLQNKRYIGTYTYKGTEIPNGIPRIIDDDLFMQVQEMMEKNRKAPARARAKEEYLLTTKLFCGHCKEMMTGYSGTSHTSAVHHYYICNNRKKKLCKKKNVQKDFIEKLVISECRKLLTPENIERISREVVAASQRDQDMTNVKRLSKQLADIERKRKNLMSAIMECDSDLIRKTLYEQIPLLEKEKSDTELQLTLEKAKQVKLTVSEVRFFLNALRNGDPDSIKYQKALISVLVNAVYLYDDKITLIFNSGDHAVTLDAALLEKIEQQADSVPVEDRFVYEQLASTKQGSDEHLFLQRRLRREVFALIRNRKAPSWNHFQDGASLLDALVSCYNLHKLDSAEVFSV

SEQ ID NO: 24767 - protein, 546 aa, synthetic construct
MEETIKAVGYARFSSSMQREESITAQKRYMMMYAKRNNMEVIDWYCDEAKSAKTVNRPAFQKMINDAKNNPEFKAVLVHKTDRFSRNLSDSIQYKKLLEEYGVQVIFVNERFENNPESHLLYHIMGSVNQFYNENLAREVMKGLKENAYQCKFTGGRPPLGYDVDKDLKLVINEKEAEAVRLIFEMSAEGYGYGETIDKLNILGYKTKKGLPFVKNSLYEILRNEKYKGTYIFNRSCSANSLNKRNNHRRKPEEEIIRIENGCPAIVSSGLWHRANAVKKATRSSYTNAKNTYLLTGLIHCGECGGKFHGNVRYNKNNTNLVYRCSSKKNKRKCESKEIRCEYLDSFVIDKFVEFFFNDDNIKVITKQLNEQYNKSCISDLEYNEAKSTLKILEKSRNNLVEAIAKTGINDIMSDKIKEYEEQIKKTAEFIQKYEKQKIDRVITEDEVREQINHLKDYFYNPKNLIRTKYVLSQYIDRIDISNENVQVQFKVSMSPSDNTDGDCFCVHTEMIKRKYLFDYVCEKVDFEQWNIEKLNKSESEHRKGA

SEQ ID NO: 24768 - protein, 465 aa, synthetic construct
MKGNAGDTIVKKIDLSPELVRVALYIRVSGEEQKIKGLSLEAQQERLEAYARERGWVIVGIYIDAAKTARKNIHKRTDFQRMMDSVKRDEVDILLFCRLDRWFRSVADYYKIMEVLEAHNCDWKTTDEEYDTTTANGRLYINVKLSIAQNEADIDGERIDVVFDSKIAHGTVVSGSAPFGFRVNEGKRLEVVPEDAAIVQDAFNYFETSISQRATVRYIRETYGVNWCDATFRRMLKEKLYTGVYDRGGRFNDHFCPAIISKQQFDRVQALLERNARSVPSGKVYIFTSILTCAECGHKLVGYKSSDYYYYRCNQHFQRGRCSHNHSAREDVVEKWLFEHLAEELERCQLEWEVAAAKKKASVARTDKAALKRKLTKLKELYVNDLIDIEDYKRDYQIYTAALKQIPEPSIEPPPDFAAVRRLLDNDFKTIYENLTREEKRTLWRSVIKEIRIDNDQNITGVVFG

SEQ ID NO: 24769 - protein, 541 aa, synthetic construct
MGTTKNAVIYARYSSHSQREESIEGQLRICHEYAKAEGLAIVGEYIDRAISGTTDARPDFQRMIDDAKKKQFSYVIVYRLDRFARNRYDSVLYKHELKQCGVKVVSATEGIGTGDESILLEALIEASAEYYSMELSRKIKRGRQDSAMKGNFLGGSVPLGYKVVDSKFIIDDETAPIVRYIFERYAAGIGKKQIIDELTAKGYMRRTGKPFTYRAFDSVLRNRKYTGEFTQTGITVEGGCPAIVDTEMFEKVQARLEINRRAPAKAKAKTEYLLSGKMFCGYCGEPMIGISGTGRHEKTFYYYSCVGRRGKSGCKKQHEKKDFIEWYVCEQTVQYMQDPERLSHVAKRIIEINDAEFDGGKVKELERAVENCDNDIRKLVDALTTIPDAGRAALYDKIERIGAAKADMEIDLAKLRVLSEVRYKQEDVEAWIRSMCRGDLMDFEFRRQLIDVFINSVYLFDDRVVIVYNIKHGKQVSAIDVLNAVEELDGVELFPDSAEDSSAGGSGSFLVADAPPYMKNPNLFPIGNGFGFLIFIKDIID

SEQ ID NO: 24770 - protein, 522 aa, synthetic construct
MAKTVRAIPATISKYTAAPINSRTKRKVAGYARVSTDHDDQVTSYTAQVDYYTNYIKGRDDWEFAGIYTDEGISATNTRHRDGFKRMIKDAMDGKIDLIVTKSVSRFARNTVDSLTTVRKLKDKGIEIYFEKENIWTLDAKGELLITIMSSLAQEESRSISENVTWGHRKRFADGKVSVPFAHFLGYDRGPDGNLVVNKEQAETVKLIYRLFLDGYTCHSIAKELTARGLETPGKKKIWHPGTIKSILSNEKYKGDALLQKAFTVNFLTKETKVNEGEVPQYYVENNHEAIISPRVFDWVQEELKRRRGGKCRYSGISIFSSRIKCGECGSWYGAKVWHSNDKYRRVIYQCNHKFKDQCKTPHLTEDDIKDIFVKAMNQLIENKAEILENIQLMKERFTNTTELEKERDRLSTDLNILADRVEQLIAENARVAQNQTNYDENYSEIVSRYETVKMEYDKTCETIQYRKARSRQMEGFMEDIQKQDIIKEFDIRLWGSLVDFVTVYSKDDIRVTFKDGTEIKV

SEQ ID NO: 24771 - protein, 589 aa, synthetic construct
MRRIRKIEQKLPSIRERKKVAAYARVSMESERMHHSLSAQVSFYSNFIQKNPEWEYAGVYADYGISGTGMKKRKEFQRMLQDAKDGKIDLILTKSIQRFARNTVDLLSTVRQLKDIGVEVWFEKENIRSMSGDGELMMSILASFAQEESRSISENVRWRIKKGFEKGKPNGHFRVYGYRWEGDNLVIVPEEAAIVKRIFQNFLDGKSRLETEREFAAEGIKTRGGYPWMDTNIRVILTNVVYTGNLLLQKEYISDPILKHRRKNRGELPQYYVENTHEAIIDKETFDYVQSEMARRKALGPFANKALNTTCFTGKIKCGICGKSFMHTVRKNVHRKEDYWICGSHKHKGCTCASKGVLQNKVLIKECTEVLGLTEFDEETFLNKVDKIVVPEHHVMVFHLKNGEEITRRWVSTARKDWWTPERRKEWGERHKKKSTNPNRHHFNEFTGVIKCGNCGENYRSQSHTYADGEKERHWRCGNACGNSAIKDSTMKRLVTDVLGIEAFNEEQMDELLDKEVILNNRITFFFKDGHTVEREYKEQRRGFYHEKAYRSYMSDIMIVAKSNDPYKHEKIKALKEEWRKEDNRWQKQ

SEQ ID NO: 24772 - protein, 590 aa, synthetic construct
MAQVEIITANLKCEDNTTVANKKKRVCAYGRVSTDDEEQLTSYNSQIKYYTEKIKSNPDWEFVGIYADEGISGTQVKNRTEFQRMIDDAMNGKIDIILAKSISRFARNTVDTLKYVRDLRDRKVDIYFEKENIHTLDLDSEVFLTVYSAFAQAESESTSQNVKLGLKAMMKRGEYVGSPDCYGFDWNKETKQLDINEEQAEVVRMIFNWYVSGMGCRRIANKLEEMKIPSYTGARWSTSSVSNMIHQEKYVGDLLQQKSYTVSPITHKSVLNKGEKDKYYIKDHHEAIISRDIWDKAQEIASKRSKSMTMKGYTSRETSKYAFSSKIKCAFCGTNFCRRHSSYSKKNPKYNIYWTCIKKREHSDACPDSVGLSETKLEQVFVMLYNNIVKNKHKTKEVLLQAIKEVVNDNDYQDKLNDLNNQKTTIEQRLSKIIDMELDNTDIDRKELFMKKEKELLDELNNIKNKIRYYEELLAENKGLSKQLKSIDDYFNEPRELKQFKREVFEKMIECISVGDYDEDGNKLPRVARFVLKTGKEYKFTIPPKNNSKNDKNELVTFDTGNVSFFNSTSKTYFSSFTCSFYFILWYCCK

SEQ ID NO: 24773 - protein, 529 aa, synthetic construct
MTERNVTVIPATKTSIHRMPGTAAKKRRVAGYARVSTDKDEQYTSYEAQVDYYTQFIRRHADWEFVKVYTDEGISGLGTRKRDGFNEMIEDAMSGAIDLIITKSVSRFARNTVDSLVTIRKLKDKGVEVYFEKENIYSLDGKGELLLTIMSSLAQEESRSISENVTWGQRKRFSDGKVSLPYKQFLGYERGEKKDDPPVVNPEQAVLVRRIYRTFMEGKTVGAIAKELTAEGVPTPAGKDKWRASTINSILQNEKYRGSALLQKCFTTDFLTKKQKVNEGEVPQYYIEHSHEAIIDPMEWDTVHEEIKRRKQIGRAYSGTSVFSAKLVCGDCGGWYGHKTWHSTDKYRTAIWRCNHKYSDEKSRCRTPAVTEDEIKSRFLKVFNSIISSKKPYISACLTAKKAVTDTSEIDAEMNDLLREMEVVAGLTKKCIEENSTTVQDQEKYTARYNGYVDRYETLKLRYDTLAAERENKLQKAKAIDRFIHTIKSRENLLTKFDLHLWMTTVENVTITDDGKMLFRFFDGTVLTG

SEQ ID NO: 24774 - protein, 424 aa, synthetic construct
MDRIIEKVHFDMPVQPKATRVAAYARVSSGKDAMLHSLSAQISYYSGMIQSHPGWLFAGVHSDEALTGTKENRSGFQSLLADCRKGKIDMVIVKSISRLARNTVTLLETVRELRSYGVDVYFEEQNIHTLSSEGELMLTILASYAQEESLSVSENQKWRIQKNFKEGKPWNGAMLGYRNVNGTLTVIPEEAELVKRIFDMYLSGMGIQSIANTLNREGVPTRLGAKFKYTGIHKMLRNEAYAGNLLLQKTFKDNHITKRTMINRGELPMYYVENAHEAIIPPETFKKVQEMITQRAEKYAPPATKSPLTYRFTSLITCAKCGKHFRRKLVRGKPIWICPTFNYEGKAACPAKQIPEEILEEITADMDMERLTGITADDGNRLLFHFSDGTAAEKIWRDRSRSESWTDEMRQNARARTKARNQNK

SEQ ID NO: 24775 - protein, 528 aa, synthetic construct
MNRKAARSVTVIPPTINPLTHLSQAAILKRRVAGYARVSTDSDEQYTSYEAQVDYYTQYIKRNPEWEFVKVYTDEGISGTNTKHRIGFNEMIADAMSGKVDLIVTKSVSRFARNTVDSLVTIRKLKEKGVEVYFEKENIYTFDGKGELLLTIMSSLAQEESRSISENVTWGHRKRFADGKVNLPYKQFLGYRKGADGFPEVVPEEAAIVRKIYTRFMEGMTPCGIANELMANGIPSPAGKQRWQTSTVESILQNEKYKGAALLQKCFTVDFLTKKKKLNEGEVPQYYVEHSHEPIITPEEFNKVQAEIARRKRISRHYSGKSIFSSRIICGDCGSFYGPKVWNSTDKYRRAVWQCNEKFHGEKKCATPHLDEETIKERFITALNAVLDDKDDILEDCRLMQTALTDCTGIDTEIESLLEEIDVVAELTKRCIAENSQTAQNQEEYAARYNGFVERYEKAKAQLEQLRTAKAAREAQAESIGAFMFEVRELDNITEFDKKLWLTVIDTVIVHADGQMTFKFQGGTEIDA

SEQ ID NO: 24776 - protein, 437 aa, synthetic construct
MNRTERIVERVNTLIPAQPQALRVCAYARVSAGKDAMLHSLSAQVSYYSKMIQESSGWLYCGVYSDEAVTGTKRERVGFQRMIEECRQGNIDLVITKSISRFARNTVTLLQTVRELKSLGVDVFFEEQRIHTQSSDGELMMTILASYAQEESLSASENQKWRIRKAFENGELINLRFLFGYDITPDGINVNEKDAAIVREIYTRFNSGESMCSICRDLNVRGHKGALGGTWCATRIRDTLSNEKYLGNALLQKQYRNNHIEKKLLPNRGELPMYFAEGTHEPIIDQATFDKAQERLNMLAQRTANRQKPTHSVFSGLIRCGLCGNTYRRVTYRKKHYWDCTMFHEKGKSACTAKRIPEETLEVLTCEALGTTCLAPDTVRSKITAIRIEKNNVVVFCTDDSSEIVKRWKDRSRAESWTPEMKEKARQRALQARRCKE

SEQ ID NO: 24777 - protein, 526 aa, synthetic construct
MPKVTMIPATINPMTHLPKETTQKRRVAGYARVSTDSDEQFTSYEAQVDYYTKFIQSKPEWDFVKVYTDEGISGCNTKHRDGFKEMISDALAGKIDLIVTKSVSRFARNTVDSLVTIRKLKENGVECYFEKEGIYTFDGKGELLITIMSSLAQEESRSISENITWGQRKSFADGKIHLAYKHFLGYKKGEDGRPAIVEEEAVVVRLIYRLFLDGKTQAGICRYLEDLEIPSPSGKAKWSKTTVTSILTNEKYKGDALLQKSFTVDFLQKKTKQNEGEVPQYYVEGSHPAIIEPYEWDHVQAEFARRKELGNAYSGKSVLSAKLVCEDCGGFFGSKVWHSTDCYRRTVWQCNNKFKGGERCLTPNVDTETVQQLFIKAYNQMIGNRKQIIEDCELMRKKLTDFKSLDADIERQFEETQIVAELVKAAVKDNAVTAQSQEAYLKKYEALTKRYETAAAELERLQNLRTLRSQKDKAMALYIRTLKKQPTVLSEWNDTLWTVMVEKAIVHRNSEITFAFYNGTKVKVRQ

SEQ ID NO: 24778 - protein, 535 aa, synthetic construct
MARAAKQDSNSEIIDGVIYARYSEGPNQTEASIEGQVRECKEYAKRNGIRIINVYSDSKHTGTNDNRAEFQKMLRDSRRGGFSVVVVWKIDRFGRNRAEMAQNKALLKLQGVKVVSAKEYIPDSPEGIILESVLEGMAEYYSANLSQNIKRGMKENALHCKSNGSGKSLGYIVDKDGYFEIEPNEATIVKTIFQKYDEGMKIADIWREIVASGAKTKRGKDFTQYGISRVLSNRAYIGEYRYGDIVTPGGMPRIIDDDLFNRVQERRALSKKAPASRRSNSDVDFLLTGKVFCGHCKGTMRGMSGTSKTGRKFYYYACHDKIFKHNKCTKKNVKKEWLETEVTRITRDDILNKETIEFIADRVVEIQRQEQEDKSMLHYYEQQLRDTQSAINNIMKAIEAGIITSSTKSRLFELEEQKSIIEGEIEREKIITPVIEKEQVIFSLERFFGGDINNKEYQRNIIDMFVNKVILYDDKIIITYNISSQNEISVDVVEQAAFAALDECSSKFSLAPPAGACPCTQFRFTLCKAVFYCRS

SEQ ID NO: 24779 - protein, 559 aa, synthetic construct
MNNISAHERAALYVRVSTRYQVDKDSLPFQKKKLKEYCKLLNISDYEIFEDDGYSAKNTDRPKFQEMMHKVRSGHFTKLIVYKVDRVSRNLLDFASMYKELKDNHVAFISMNEQFDTSTAIGEAMLKIILIFAELERNMTSERVTSIMLNRAEEGLWNGARMPIGYKWDDNIKFPVPDENEAKLVQYIFDEYERTHSCSKVLRNIVSQGIKGKRGGKWTSKLINDVIRNPFYIGTYRYNMRESARGRLKPQSEWIIKENNHTPIISKEQFERCNRIMDSNGSHNTAKFRHTVHVHIFSNKLKCAYCGSGFNACKDRARANGYRPSVYRCNRRAALLDCPSKTISDTVLGEFIFNYIANLITAQKNFTGDIKVFEASLLSGNQFNRLHINRVDLEKTYNIMHSTGSHMIKNIMTDNIPADDNDNSFQLDIYIQQKNKYKKAIERLTDLYIYDPESMSKSQFTVKRKELQDNIKLIDNKIAELSNTSPVTSASDMSFVKKASAFLVSRQLIGGHIDFVNLAMNIDNNILKDFINQTIDYVLVKDGHVAAIRFINGLEHNFE

SEQ ID NO: 24780 - protein, 529 aa, synthetic construct
MTETNISIARVPQVTVIDPRIPEKAKLRVAAYARVSSDSEDQVNSYIAQVDFYTKHIAGKEDWEMVDIYADEGISGLEARNRDDFNRMMADCREGKIDRVLCKSISRFARNTQEYIQFVRELLRLGISIHFEKENIDTGKMTSEQVAQIYGAFAQMESTNHSSNMRFSVRMRMEKGLFVPSSVPYGYRLAGRDLEIIPEEAEVVRRIFSAYLSGQGKDDIARELNQLGVDRGRNREKWHPSTVAYILTNISYTGDMIWQKSCATDTIPFRQVRNLGQKPRYFVEHSHPAIVSCADFQRVQELMSSRKGQFHGTHRISKGSRYDKHIYCGGCGSLCRKKITGGKTYWVCRRHDGNKADCPTPQIPEPEIAAAVLRLYHKLKLGQETVLRPVLSQLQELRERELRSNRKISDIDNEIARISEQNLVLVRLKSKGYVDSALYLSQMDEIDRKLRELRKLRRRLLEAAGEDRQIHDTERMMEYLEDGPEWLDEVPAELFGELIERIIIISPERLKFRLLNGMELAENIERTVR

SEQ ID NO: 24781 - protein, 549 aa, synthetic construct
MNIQQTASTPKLVTMIPADPQMTERDIRNKHLRIAPYCRVSTDKKEQLSSYEAQIEYYTEKINANPDWTLVRLYADEGITGTSAKKRKAFLQMIRDCERGKIDLVITKSVSRFCRNTLDGLNYVRRLKRHGVGVYFEKENVNTLFMDNEMILTFMMSQAQAESESLSGNVRWGHRKNFKDGKVYYHCKNFLGYRWGADGQPEIDPEQAAIVRRIFSRFLLGHSVRQITTDLMADGIKTATGKTVWHDSVVQKMLCNEKYIGDALLQKTYIADLFTREKRVNNGELPKYYVHDCHPAIIDRETFQKVQEEIARRSSLKKTSSKAKTQLGKYCGKYVLSELLVCGECGSPYRRVIWTQKGVKRVVWRCQNRLEHGRKICKQSPTLDEGDIHDAVISAMNELFRMQAAKDAVKAGIAAVLAGEEQTMSLPAVELQIRNLQERQLELFQLIVSAGADCTDYDEELQQVNIAKTRLMAQKAELEKEQRGAAAFESRLAELDMALEQASGTLTDFDELTVRQLVSNIKVLDKDSLLICFKDGTEITQAMQRRQTA

SEQ ID NO: 24782 - protein, 496 aa, synthetic construct
MKNAVIYARYSSDKQRDESITGQLRECRAFAEKECLVIVHEYIDRAMSARTDKRPDFLRMIADSSRHRFEFVIVYQLDRFARNRYDSAIYKRKLKLNGVRVLSAKEHITSDPSGIIMESLLEGWAEYYSAELSQKVERGMTDNLLEKKWPGGTIPYGFMLDERHHLVQDPAASQAVHSIVDMYISGCTEPEVRQWLADHGYTYRSGRKFSRGFLLKFVKNRLLIGDFTWGGKTYPDFVEPYLSPADWERLQAAIRRRHTPGYKNHRRRRCANYALVGKLFCGVCGRPMTGTCGTSRNGSRHYYYTCSSHNNQKGSGNVACACRNVQKERLENAVLVATVNMLSNPEMIHTIAAAAAAAQKKYGSARQKISDLKNQLRDVQKKLQNSVKAVEAGVVSETLAANIPRYEQKAKELRLELERTKFDVPEKIDPDFIEFYLTRILKKAESEKRRWNVFSTFISRILLCTDHVEIDYTYGQPSSAILPIPGGSDDALVVTQ

SEQ ID NO: 24783 - protein, 465 aa, synthetic construct
MARSITVIPASQPYRVGGRTQQKTRNLRVAAYCRVSTDQEEQLNSFENQVEYYTKYIQDNPLYQMAGIYADEGISGTNTKKREEFKRMIRDCEEGKIDLVITKSISRFARNTQDCLEYSRRLKNLGIGIFFEKEHINTLDASGELLFTILSSLAQDESRNISENCKWGIRSKFKKGIPQVDCTKFLGYDKDDDGKLIVNQKQAKIVKRIYQEFLNGYNPAAIAKMLMEDHIKTGTGREEWRSASVRAILKNEKYMGDALLQKTYTADFLTKKVKKNHGEVEQFYVKESHEAIIPKEQWEAAQLELERRDSYMQELGLTFYGYGSEVNPFSCRVVCGKCGAVCGKKSWKSRGVEFWQCNNRSKNHGVKGCASENLPHENLLKGFVTAWNQIVAEREQYLPKWEKKKKEGNPLEKLRAEQMIELTLQPPLTKMLPELGQMVLERVNVQGKEILFIRFLDGTEIKVRI

SEQ ID NO: 24784 - protein, 489 aa, synthetic construct
MLKTIIYARYSSDKQNEQSIEGQIHECEQFAKTHDMVIIKHYIDRALSGKTDDRPSFLQMIKDSSSGLFDAILVYKTDRFARNRYDSAVYKAKLKKNGIKIFYAKENIPDGPEGIILESMLEGFAEYYSAELSQKVKRGIKENIRKGLSFGGACPFGYKIVNKKYVIDDEQAPYVKKIFEDYAKGRRAIDIFNELNTLPNYAGKGRKWNRSSLNRMLTNKKYIGIYELEDVCVKDAIPSIIDEALFNKVQSRILFNRRHTTRAKVNYLLSGKLFCGLCEHSMTGKTGTSKTKVKYHYYVCSNRHCKQKKYRKELLEDIIIQYTVKDILNPKHFKMIAKKCLEIQQADNKINDILLMLKKQLTATKTKINNLMNAIEAGIITTSTKDRLEQLEQEKYKLELEISTQQLNSNRLLSEKQIIYMLNVFYNKRVDVSFYNQIIDCFIYKIYIYSDKICIVYNLNNSDKDVTYSDINELYKSSHLNSCGSPYDL

SEQ ID NO: 24785 - protein, 455 aa, synthetic construct
MNVSGGKYMQITKIPAKPKEYKTLRVAAYARVSADKDAAFHSLEAQTEYYEKYVSNHPDLTLVGIYSDNGISGTIVERPEFQRLLEDCRAGKIDLVITKSVTRFARNTVILLQTIRELKALGIDCYFEKEQMHSISPDGELLLTLLAMYAEEEARSASENQLWRVRKRFEQGKPWVGNMLGYRLIDGKLIIIPEEAEIVRQIYADYLSGMGKNAIANKLSRSGITTPTMKSWSYTGICKILCNEKYVGDMILQKTYTPDFRTKKAKINHGNVRQYFVEGSHEPIIDQVTFDAVQHEMERRKEKWNPDKSSKTINENMFSGLIVCGICGSLYKRKHQHCQSYSSYLWLCNKYYRRGKTACPSQKIPESILNSKTKEILNVDSFTHELLEEKLTRIIVPEHNHLIYEFKDGSSVDVFWQFPSRSLSWNSEMRQAARERTLAKSRKEKKEHETKGYNH

SEQ ID NO: 24786 - protein, 536 aa, synthetic construct
MLRQTTRNLITALYPRLSHEDELQGESNSISNQKRILETYAKQNGFSNLQWYTDDGYSGANFQRPGFQAMLADIEAGKVGTVIVKDMSRLGRNYLQVGMYTEMIFPQKGVRFIAINDGVDSAQGDNDFAPLRNIFNEWLVRDTSKKIKAVKRSKGMSGKPVTSKPVYGYFMDEDENFIIDGEAAPVVRQIYSLCLAGNGPTKIARMLTEQEIPTPGTLEYRRTGSTRRYHPGYECKWATNTVVHILENREYTGCLVNFKTEKPSYKTKHSVENPIEKQAIFENHHEPIIDTQMWERVQELRKQRKRPNRYDEVGLFSGILFCADCGSVLYQQRYQNATRKQDCYICGSYKKRTRDCTAHFIRTDLLTAGVTDNLRKVTSYAAKHEARFMKLLIEQNEDGGKRRNAARKKELEAAEKRISELSAIFKRLYEDSVTGRISDERFTELSADYEAEQKELKERAAAIRAELSKAQEATVNAEKFMNVVRKYTSFEELTPTLLREFVEKIVVHECSYDENGTRRQDIDIYYSFVGKVDLPE

SEQ ID NO: 24787 - protein, 433 aa, synthetic construct
MSKKITIVSKPPKLERKKRVAAYARVSSGKDAMLHSLSAQVSYYSDLIQSHGEWLYAGVYADEAKTGTKDSRAGFQNLVAECRASKIDMVITKSISRFARNTVTLLQTVREFKALGVDIYFEEQNIHTMSGDGELMMTILASYAQEESRSASENQKWRVKRNFEAGIPWDRTLLGYRMENDHYVIVPKEAEIVRHIYNEYLSGSGYNSIAKMLNDEGILSRFGGKWNQSAISMVLSNYTYTGNLLLQKTFSENHITKRKMFNTGELPKYHAEDAHEAIIDMETFQAVQKEKERRAAQFIKKPAPKKIYPFTGLLMCNNCGKNYRRKVTKAGAVWVCGTFNSLGKAACASKQIPEFTLQQVTADVLGQNDFTHEWLCDRIQHIRVCNDNALIFCFNDGSEITRIWKDRSRSQSWTDEMKEAARQKTLERSNHNA

SEQ ID NO: 24788 - protein, 526 aa, synthetic construct
MPKVTMIPATVNPLTHLPKASVQKRRVAGYARVSTDSDEQFTSYEAQVDYYTRYIQSKPEWEFEKVYTDEGISGTNTKHRDGFKEMISDALAGKIDLIVTKSVSRFARNTVDSLVTIRKLKENGVECYFEKEGIYTFDGKGELLITIMSSLAQEESRSISENITWGQRKSFADGKIHLAYKHFLGYKKGEDGRPAIVEEEASVVRLIYRLFLDGKTQAGICRYLEDLEIPSPSGKAKWSKTTVTSILTNEKYKCDALLQKSFTVDFLQKKTKQNEGEVPQYYVESSHPAIIEPDEWDHVQAEFARRKALGNAYSGKSIFSAKLVCEDCGGFFGSKVWHSTDCYRRTVWQCNNKFKGGERCLTPTVDTETVQQLFIKAYNQMMGNRKQIIEDCEIMRKKLTDFKSLDADIERQFEETQIVAELVKAAVKDNAVTAQSQEAYLKKYEALTKRYETAAAELERLQNLRTLRSQKDKAMALYIRTLKKQPTVLSEWNDTLWTVMVEKAIVHRNSEITFEFYNGTKVKVRQ

SEQ ID NO: 24789 - protein, 526 aa, synthetic construct
MINMVSFDNIIIYLRKSRSDDPAQTVEEVLAKHERILQDYCIKEYGKVIPEKRIYREVVSGETIQDRPVMQKLLKELETNNIYGVLIVEPQRLSRGDLQDCGQIINSFRYTNTAVITPGKTYNLQDEYDRKFFEMELTRGNDYLEYTKKILNRGRVASVKQGNYICSVRPYGYKKVVIGTGKDKCHTLEIIPEEAEAIKLMYHLYLDENMGFTNIARTLDSMHIKPLKSSNWSAATIRDMIDNPIYIGKIVWNNRKVVKKWENEQIIKVRPRNKGDDVICVDGKHEAIIDEETFNAARQKRGLTPKVRKFKELRNPLAGILFCSTCGHSMSMKKYVDNRSHTGKVTTIMLCNKQAVCHTKSAQYEQIVAKIKESLADAIANFEIKMKEQENNNIDIHKQRITSLKDELNRLYNKDVRQKDAFEDGIYTKEEYIERNSKLQSQILNIKAEIENEKNNTPVIIDYQNKITTFTECLTSLDDDSISAADKNSLLKNCIDKIIYHNDMPSLPGIGRYIENSFRLEIFLKM

SEQ ID NO: 24790 - protein, 604 aa, synthetic construct
MKKVFVYHRVSSDQQLDGSGIARQAELLEGYLERTGICADMDDPAPVVLSDQGVSAFKGLNISEGELGAWMEQVRNGMWDSSILVVESIDRFSRQNPFDVMGYINALMAHNVAIHDVMANIVISRSNSKDLPFVMMNAQRAYDESKYKSDRIRKGWAKKREQAFNKGTVVTNKRPQWIEVENDKYVLNHKAAVVKEIFALYQTGMGCPTIAKQLQKKEGEQYKFNRPWTGELVHKILTNRRVTGKIFISEIIRNHDDIDNPVTQKKYDMDVYPVVINEEEFELVQELLKSRRPNAGRITVKKEGQEEVLIKSNLFSGIARCTECGGSMYHNVVRAKRTPKKGEPKIEEYRYIRCLNERDGLCENKAMTYETVERFVVEHLLGMDLNTVIKAQEFNPEIEVIRIQIDQVKDQITNYENGIERRKNAGKAVSFEMREELDDAKLELEQLLARQASLATVQVDVPVLQDVNVTELYNVNNVDIRTRYENELNKIVSNIRLKRNGNFYTIDIIYKQNELKRHVLFIENKKKEQKLISEVIIDDVDGAKFYYTPSFIISVKDGEIRFQQTKEDLSIVDYSLLLNYVDAGDGIDAVGVWMRNNMSFLFTN

SEQ ID NO: 24791 - protein, 507 aa, synthetic construct
MTAVIYARYSSDNQREESIEGQIRECTVYAEKNGITVVKHYIDRALSAKTDNRPDFQQMIKDSEKRLFDIVLVWKLDRFARNRYDSAHYEYQLERNHVKLVSATEPISDSPAGIMVKSMLTGMAEYYSAELSEKVVRGMTENVLKGKYNGGTIPIGFKVNEEKFFQVDPLKAPFVVEAFQRYNDGATMKELMNWLNDSGVTTNRKQKFTYNSVQTLLTNKRYIGENHFKDIVMPDSIPAIVDKDLFEEVQLKIKKNSRAPARHKAEDDYLLTTKLFCGMCGAMMFGECGTGRNKVVHHYYKCATAKRFKTCKKKTVRKEWLEDLVIAETMKLIQDDAVIDAIVAEVMELQDQKNTTLPLLEKQMREVENGIENMLNAIQAGVLTNSTKSRLEKLEAQQKELEIRIAEEKIARPRLSENQVRFWLIRFRKLDPNVKSHRETLINIFVNAVYLYDEKVLITFNYKDGTKTITFDEIAAKDAPEGNGSDLGCFAPPKMLSVRKYAGLFVL

SEQ ID NO: 24792 - protein, 534 aa, synthetic construct
MLKADGKYCIYLRKSRADRDTQLYNGSKQDVLKRHREILLSTSKNLGIHISKIFEEVVSGDTIAARPEVQKLLSEVENNIWDGVLVVEVERLARGDTKDQGIIADTFKYSDTLIITPQKIYDPSSEFDEEYFEFGLFMSRREYKTINRRLNRGRIKSVKEGKWIASEAPYGYSKVKIKGDKGYTLSFLEGEIDVVRMIFNWFRVGELQENGTYKTLSPDNIGVRLDSMGIKPRKAEKWSRATIRDILTNPAYAGMVRWGYKKEEKRMVGGILSTERIRSKDFHLYDGIHPAIITKEDHYSILRKLTANAKSSSVNNNNKLKNPLSGLVYCENCGHLTTRLGQNSKNKYETIKCPNRNCDNVSAPLFLVEEKILASLSDWLSKYKLECDNKDFAAEELHLKQALISNLYKEKEKVKRQLDKTYTLLEQEVYTTEIFVQRNKALTDQLQAINTNIIDLETDYNAELNTKYEYEELIPKMENIIDIYFKIEDIQTRNELLKSVLEKVLYKKTERNKKGNALNANFEITIYPKLPKKK

SEQ ID NO: 24793 - protein, 513 aa, synthetic construct
MKKQPTGGNRLVAYYRYSGGSHQTEQSIEGQRRDCETYARIHGMVILHEYIDRHISGKTDDRPEFQQMIADAGKGMFDYVICWKTDRIARSRYDSIIYKKKLRDNGVELLYAAEANVEGSGGIIVEGLMEALAEYYSAELAEKVRRGMRESALKGKAIGSSRPLGLTVDKDKKYIIDPAGAAAVRYIFEQYAAGAASSAIVAHLNEQGLCTSRGNPFNKSSVVRIIQNEVYRGVYVSPKFDVRIEGAVPAIIDDDLWERAQKMFIRNRQSRSPRNDRADYILSGKLFCGECGTAMKGVSGHSSNGEVYFYYNCPCKDCHRRNIPKDELEGLVIRTVCNDVLQPDVMDRIADSVIAAQTAELNQPNPEKEALQHELADVQRKAKNLLSALENGTAGAMLTNRLAELEQQADTLSYQLSSLESEPKYPVFSKEEVLYLLEQFLIAPSEKTKAYRRRLIDTFVSKIEVSNTELTIYFNIAEEDCGKMKKAPQSNQPEGCSTEKQMVRVARIELTAS

SEQ ID NO: 24794 - protein, 510 aa, synthetic construct
MSYFIYARKSRKDADLEALGIDVLERHITTLLELAKTLSLPIGAIYREVVSGDSIDSRPVMSQVMAEVESCMWDGCLVMDVDRLARGDTIDQGRVQRAFFYSNTKIITPNKTYDPANEYDNEYFEFSLFMSRREYATIKRRMQRGRERSSSDGYYVGNIPPYGWRRVIAPDGKHFSLAPDPAEAPVLDLMYDLCGNKQYGYQKACTYMTEMGILSRSGRPFTPSTLKGIISNPANIGKVRWGHRKTVRTVKDGKISRSRPHSSDYILADAVWPPRISADLFRRANQPKGSCSAPVRDDRPIQNIFAGLVRCSQCGRLMVRKKAHTKTPYDILICQYTECPTVGIRIDELELALLEWLRNYIDKYELTDALPEDAENVAAKEAIVKNFEKEHETLLKQRESLFDFLEQGIYTKEIFIERSNALEQRVKECMEHIISAQNDLHATLALQANRKNFVPRCKNLLGEWGRLTIPEKNSALKVLIEKIMFTKTKRNKKGQDRSDFEIDVFPKVPK

SEQ ID NO: 24795 - protein, 514 aa, synthetic construct
MRKKKVKDGNRLVAYYRYSGGSGQTEQSIEGQRRDCENYAKLHGLTILHEYIDRHISGKTDDRAAFQQMMNDGDKGAFDMVICWKTDRFARNRYDSAVYKKRLRDNGIEILYAAESNVEGAEGIIIEGLMEALAEYYSAELAEKMRRGMRESALKGQAINRCRSLGLTTDENKKYVIDEKTAPTVRFIFEHYAAGESSASIVEQLNAKGLRTSQGNPFNKCSIPRIIQNEMYRGVYTSKAYNVRIEGVIPAIIDDDLWKRAQAMMKTNRQLKAKYEPKAEYLLSGKLFCAKCGCTMKGVSGHSGGNDEVYRYYACSNPQCRKRNIPKDDLEGKVIRSICDHLLQPETMELLAETMVDVQKADMEKPNAERDVLEQELWDVRRRSKNIMDAIETGSANPQLVARLDDLTQQENTLTYQLSTMEAEKPLLFTKEQYLFLLQQFYAQPTEQDDAYKRRLINTFVTNIEVSDSELLIYFNVSEETENKNKNASQSNFDKSSSTEKRLVRVARIELTAS

SEQ ID NO: 24796 - protein, 464 aa, synthetic construct
MARSVTVIPARNRQRETGRRAVQEKKIRVAAYCRVSTDQEDQLHSFEAQVDYYAKYINDHENYEMAGIYADEGISVTNTKKREQFKRMIADCEGGKIDLVITKSISRFARNTQDCLAYSRKLKNLGIGIIFEKENINTLDSTGELLFTILSSLAQDESRNISENCKWGIRTKFKNGEMHLNTFKFLGYDKDENGKLVINKEQAKTVRRIYRDFLIGINPAQIAKELTEEKVPGCNGQTKWYPSTIVGILKQEKHMGDALLQKTYTADFLTKRQVKNNGEIAQVYVKDSHKGIIDKETWNAVQEEFERRERFMKDHGTDRYSYGADCMPFCEKVFCGECKSLFTRHSWKSRGIVQWQCKNHRTDGRVTCSNAYVDNSNLEKGFVKAFNKLVADREKFMERWNQMKTDGSPLEKIRAEQMMEATENEPLGRFVPEIAQLVLAEVTVLGAKKYEFFFLEGSRIKVSV

SEQ ID NO: 24797 - protein, 498 aa, synthetic construct
MEIQIREGNREQKRKLRVCAYCRVSTDADEQENSLDNQIRHYETVIKANPAYEYAGVYSDFAISGFKEKRPGLQKMLADAQKGKIDLILTKSVSRFARNTSIVLEATRKLKELNVGVFFELQNINTLSGEGELMLTILAAFAQAESESGSAGAKMVYQRKYEAGIPVQYLERSFGYTKDERGVYIADESEAVWVRKIYEMAADGYTPAAIKRYLNENGVKTVGGTKWIDSTVFRLIENEIYKGDYIMHKHFVNEERKLVRNRGEVDAWYIEDDHEAIVSPELWQKAQDAIEAKRDYLAEGSVIEEFTEDNYPYMNRIFCAKCGHPLYKRIYSNGNRLNWGCSGTKRYGRSFCEGINIPDGVLRKAWHFDGNMYIDEKPSVKGTKEFSYLKESSWKRRHKKKAPEAIPENTEEAYPYRKKIFCGLCGSRLVRHVNPKSHKVIWICNGAKRKGVAFCRGTRIPDSVIRGWGEIKKDIYIQRKDDKNGKKRYSYTSKKPTA

SEQ ID NO: 24798 - protein, 519 aa, synthetic construct
MKRVTRLGGDVKKKSTAKVLRVAAYCRVSTGSDAQLESLDAQKTHYENYINGREDWEFAGLYFDEGISGTKKEKRPALLQMIADCKAGKIDFVITKSISRFARNTTDCLEMVRKLLELDIPIYFEKENLNTSSMESELFLAILSSMAEGESTSISENNKWSIQRRFKNGTFKLSYPPYGYDWDGEQMVINPEQSETVRWIFEQVLSGKGTHAISDELNANSIPTKKGGRWTPTTVRGMVSNEKYTGDVIFQKTYTDSQFNRHINYGQKDRYAMSDHHEAIISREVFEAANALIAQRGKEKGIIKGSEKYQSRYCFSGKIVCGECGDTFKHRIHSTTTHKYAAWCCNTHIEDKSRCSMKYIRDDTVKAAFVTMINKLIFAHSIVLKPYVETLQNGCTDAPMRRIQQIQTLLLENAEQRKTLTKLMAQGYIDQILYNEENNKLLSQADRYRQEMDTLSKAIGGDGAHVTAAKELLRYVEKAAMLTDFDEALFENTVTRIKVLSREEVAFELKCGLTLKERM

SEQ ID NO: 24799 - protein, 483 aa, synthetic construct
MQAAAYARYSTEHQTDSSIAYQMRKIEEYCDAHGITVSARYADEAMSGTNTQRPAFQSLCRDAAQRKFDAVVIYDISRGSRDVSDWFSFRKQMALLHIQVISVEDHIGDILNPADYLTELITVGLGQHHVLTSRQKSMDSIATKAKTGQFLGGTPNFGYTIDENGRYVIQPAEAEIVRTIYQMYAAGKSYGEILDTIGEVRGRRGKVMGKNSLHYLLRNERYIGVYSWCKYHHKIMGKYAGNIPNENAVRIEDSIPAIIDKDTWEAVQMRMNDKKQRACNKAKRNYLLSGLIECTECGASYVGHTSTNKRGYSTRYYCCGNKYRNHTCHAKNINAEELEAFVVQNLKHYLANVDFSQMAQQIADEINGATADLKAERKELADIIFQLNNGTKAILKGIDYPELQEEMFRLRVRKSELEDMIQRGAEHNPVSVEKLVQLFQNAMERLDTDTKQVCKSMVKIYAHSNGDCDLEVGVHINGCGSQI

SEQ ID NO: 24800 - protein, 503 aa, synthetic construct
MNNRIDAIYARQSVDKKDSISIESQIEFCKYELKGGNCKEYTDKGYSGKNTDRPKFQELVRDIKRGLIAKVVVYKLDRISRSILDFANMMELLQQYNVEFVSSTEKFDTSTPMGRAMLNICIVFAQLERETIQKRVTDAYYSRSQRGFKMGGKAPYGFHTEPIKMDGINTKKLVVNPEEAVNIRLMFEMYADPATSYGDITRYFAEQGILFYGKELIRPTLAQMLRNPVYVQADLDVYEFFKSQGTVLVNDAADFTGLNGCYLYQGRDVKPDKLHNLKDQMLVLAPHEGIVPSETWLACRKKLMNNMKIQSARKATHTWLAGKIKCGNCGYALMSIVNRVGRQYLRCTKRLDNKSCVGCGKIYTAELETVVYQQMVKKLESHKMLTGRKKAAKANPKIAALQVELAHVDGEIEKLVDSLTGANNVLLSYVNVKIAELDGRKQELVKRIADLTVEAISPEQVSQISGYLDTWENVSFDDKRRVVDLMITTIAATSEAINITWKI

SEQ ID NO: 24801 - protein, 456 aa, synthetic construct
MRNKEIAPALVRVALYIRVSGEEQKIKGLSLEAQQERLEAYARERGWVIVGIYIDAAKTARKNIHKRTEFQRMMDSVKRDEVDILLFARLDRWFRSVADYYKVMEILQAHNCDWKTTDEEYDTTTANGRLYINVKLSIAQNEADIDGERIDVVFDSKIAHGTVVSGSAPFGFRVNEEKRLEVVPEDAAIVQDAFNYFENTVSQRATVRYVRETYGVNWCDATFRRMLKEKLYTGVYDRGGRYNDQFCPAIIDGQQFDRVQALLTRNVRSAPSGKVYIFTSILTCAECGHKLVGYKSSDYFYYRCNQHFQRGRCSHNHSAREDVVEAWLFDHLGEELERCQLEWDVEAAKKKASVARTDKAALKRKLTKLKELYVNDLIDIEDYKKDYQIYVSALNQIPEPAQEAPPDFAAVRRLLDNSFRTIYDTLTREEKRTLWRSVIKEIRIDNDQNITGVVFG

SEQ ID NO: 24802 - protein, 489 aa, synthetic construct
MLKTVIYARYSSDKQNEQSIEGQIHECEQFAKTHDMVIIKHYIDRALSGKTDDRPSFLQMIKDSSSGLFDAVLVYKTDRFARNRYDSAVYKAKLKKNGIKIFYAKENIPDGPEGIILESMLEGFAEYYSAELSQKVKRGIKENIRKGLSFGGACPFGYKIVNKKYVIDDEQAPYVKKIFEDYAKGRRAIDIFNELNILPNYAGKGRKWNRSSLNRMLTNKKYIGIYELEDVCVKDAIPPIIDEALFNKVQSRILFNRRHTTRAKVNYLLSGKLFCGLCEHSMTGKTGTSKTKVKYHYYVCSNRHCKQKKYRKELLEDIIIQYTVKDILNPKHFKMIAKKCLEIQQADNKINDILLILKKQLTATKTKINNLMNAIEAGIITTSTKDRLEQLEQEKYKLELEISTQQLNSNRLLSEKQIIYMLNVFYNKRVDVSFYNQIIDCFIYKIYIYSDKICIVYNLNNSDKDVTYSDINELYKSSHLNSCGSPYDL

SEQ ID NO: 24803 - protein, 463 aa, synthetic construct
MARSVTVIPARNRQVSGYRAAPQKKIRVAAYCRVSTDQEDQLHSFEAQVDYYTKYINDHENYEMAGIYADEGISGTNTKKREQFKRMIADCGKGKIDLVITKSISRFARNTQDCLMYSRKLKNLGIGIIFEKENINTLDSTGELLFTILSSLAQDESRNISENCKWGIRTKFKNGEMHLNTFKFLGYDKDENGKLIINREQAKTVRRIYRDFLWGLNPAQIAKELEEEQVPGCLGQTKWYASTVIGILKQEKHMGDALLQKTYTADFLTKRQVKNNGEVAQVYVRDSHKGIVDKETWNAVQEEFERREKFMQKHGTDRYSYGSECYPFCEKIFCGECGSLFTRHSWKSRGIIQWQCKNHRKDGKVACTNAYVDNADLEKGFIKAFNRLVGEREKHIERWNSMKLDGTPLEKIRAGQMMEATESGQLQQYVPEAAQLVLEEITIFGAKKYEFAFLEGSRVKVSV

SEQ ID NO: 24804 - protein, 501 aa, synthetic construct
MEIQIREGSREQKRKLKVCAYCRVSTDADEQENSLENQIRHYETVIKANPDYEYAGVYSDFAISGFKEKRPGLQKMLADAEKGKIDLILTKSVSRFARNTSIVLEATRKLKELNVGVFFELQNINTLSGEGELMLTILAAFAQAESESGSAGAKMVYQRKYEAGIPVQYLERSFGYTKDERGVFVADEAEAVWVRKIYEMAADGYTPASIKRYLNENGVKTVGGVQWVDSTVFRLLENEIYKGDYIMHKHFVNEERKLVRNRGEVDAWYIEDDHEAIVSPELWQKAQDALAAKRDYLAEGSVIEEFTEENYPYMNKIYCAKCGYPLYKRIYSKGNRLNWGCSGTKRYGKSFCDGINIPDGVLRSAWHFEENTYIDEKASDKGVKEFTYLKERSWKRRHKKKQPSAIPENTETEYPYREKIFCALCGSRLVRYVNPQNYKVTWVCNRRKRKGKEACDGTRVPDTVIKGWGEIKKDIYIQRKDDKNGKKRYSYTSKKPSGIRV

SEQ ID NO: 24805 - protein, 512 aa, synthetic construct
MERAVIYARYSSDHQREESIDAQVRACREYCQRKGYLVTKIYADEAKSGKSIAKREQYKKMLSDSQKKLFDVVVFHKIDRNSRNELDYYLTKNQLISSGIKYEYAAQNIDTSPAGQMVEGILVAVAANYSRNLAEETKKGLKENALKALFNGGRPPLGFEINQENKYVINDYEAGAIRIIFDLYLKGKGYHYIISQLNSLGYKTREGRKFGKNSLYDILRNPKYCGTYTFNKVNKDPSGKRNSHKISENTIIVEDAIPAIISKEEFRKVQEKMSRNKHRTAAYRSKETYLLTGKAFCGICGAAMTGHRASARGKKYVYYTCAARDRLGISACENKVVPRDELEQVVLDTLKEELLSNNFQKNLNHYILEEFHTLASEVSNEADSLAEQKAIAERKLNNLYSIIEQGTADEYDLQRLADVKRELTSIKEKLSKCAAAHSLSDINPRAIERTIKLCRNMLLKNASAETLTLIFDDMVEKIVIGAKKITLQFKLECFDTYGAEGRTRTGTWGNHA

SEQ ID NO: 24806 - protein, 571 aa, synthetic construct
MMQDRTAPASTNRVAIYIRVSTTHQIDKDSLPMQRQDLIAYAKLMLNTDDYVIFEDAGYSGKNTDRPKFQEMMSQIRQGAFSHLLVWKIDRISRNLLDFATMYKELKDLGVVFVSKNEQFDTSTAMGEAMLKIILVFAELERNMTSERVTATMISRASNGQWNGGRVPYGYNYDYETKDFSINPIEAEIVRLIHDKYEEMRSLVRESRYLNEKGLRTRAGNLWNPVSLHIILHNIFYCGDYRYNVLKEGDRQKVKDESEWITVEDHHEPIISREQKERVIAMLDANKRLDRKRNTYQSEKYVHVFAGLLYCGNCGKPMGATPAAAKKDWQYSKYTCPTRRKLASACNGKFTSDPIVGEFVFNYVLNMLNVQKNFADIHSPEELQAALLIGNTFSYIDHIDEDGLNDLFNMLSSGKIKGTVFGKSAKLKKKKVVSELSKLRNEKQKIERALDRLTKLYLYAEDAMPESEFIIQKSKLTEALDEVNEQIGFSNTDEWNQSVSDEEFVRRASEFIIAQKLTDRNYVSYKRLATSADTAVIKTFVQGIIDSIIMDAGQVKQIIFKNGLSHTFIFK

SEQ ID NO: 24807 - protein, 525 aa, synthetic construct
MPTERKKKTTKEENAKNNSTKNTIKKPRNSTSNTKSKKESKSLLGLKDLMEDTSPEKVVGCYVRVSTDAQAEQGYSIPDQTAKLQAFCTVKGWENAKFYTDPGFSGSNLNRPAMQEMISDAMEGKLKAVVVFKLDRLSRSQKDTLYLIEDVFLPNEVDFVSISEALDTTTPYGRAMIGILSVFAQLERENIYMRTRIGMMGRVSAGYWRGGGKVPFGYDYDKESKSLIPNADAQKVPQAYDLYIKGYSCQKIADMLGLSCEQLVRNILTKRTYCGYINYKGKDYKGFHEPLIDEERFMLVAAEMERRGKENLAVCGNNKYYLLTGLVFCGDCGARMRYMKWGKYIRIVCYSHTCKKNMVKDPDCPNKGVRAEELEKVVISKLFDIGTDISLDDFDDTHVPASAAEILTNRIDELKESLRRLYGLYADIGDPMVYERIEDVRGQLHLLQRQLASEETQKLKEEHINYVREKIQTIGDLWPHLTPMERQTLVRDCVEKVILHHNGRVEVYYTFHTEKDSKILKRKGA

SEQ ID NO: 24808 - protein, 523 aa, synthetic construct
MAKVTTIPATISRFTATPINEKKKRRVAAYARVSTDSEEQLTSYTAQVDYYTNYINGRDDWELVSVYTDEGITGTNTKHREGFKRMVADALAGKIDLIITKSVSRFARNTVDSLTTIRKLKEHGTECYFEKENIWTFDSKGELLITIMSSLAQEESRSISENCTWGQRKRFADGKVTVPFKRFLGYDRGEDGNLVLNEKEAVIIRRIYSMFLQGMTPHGIAARLTADGIKSPGGKDKWNAGAVRSILSNEKYKGDALLQKSYTVDFLTKKKKTNEGEIPQYYVEGNHEAIISPEVFEMVQQELERRNKRGRRSGVHLFSGKIRCGQCGSWYGSKTWHSTDKYKKTIWQCNHKFDGDSKCTTPHLTDEDIHRYFISAVNQLLAQKDGIIESLTGGLALAFDLAPLQAQETELIEEVQMLADAVEKCIYENAHVALDQAEYQNRYDGLTQRYDETKAKLDAVTEQIADKKARRATIEEFLKVLQEQDGLVTEFQPNLWCGLVDFMTVYSADDVRITFKNGMEIKA

SEQ ID NO: 24809 - protein, 587 aa, synthetic construct
MRKISKIERKIPQMPSRKKVAAYARVSMETERLHHSLSAQISYYSDLIQKHPDWEYAGVYADDGISGTRAESRTEFNRLLADCEAGKIDIVLTKSISRFARNTVDLLETVRHLKELGISVRFEKERIDSMTEDGELMLTLLASFAQEESRSISENVKWGTRKRFEQGIPNGRFNIYGYRWEGDHLVIQPEEAAIVRLIFDNFLAGLSAETTEKQLAEMGVKSYKGQHFGNTSIRQILGNITYTGNLLFQKEFVVDPISGKSKKNDGELPQYFVENTHEAIIPMEVYQAVQDEKMRRRELGALANWSINTSCFTSKIKCGRCGKSYQRSNRKGRKDPSCNYTIWVCGTRKKTGNADCQNKDIPETMLKEACASVLGLAEFDETIFSEQIDHIEIPAPNEMVFYFKDGRIVPHRWESTMRKDCWTDERRAAKGRYVQEHQLGPNSSCFTSRIRCDHCGENYRRQRSRRKDGSYVSVWRCASAGGCDSPSIKEETLKQLCAEALGSDGFDETSFREQIACIHITAPFRLSIHFFDGHTFEGEWENKRQMPKHSEERKAHMSMKMKENWRKRRGESNDNSGNDQPVHSDTD

SEQ ID NO: 24810 - protein, 538 aa, synthetic construct
MSIKIIVGIYCRVSSDEQTEKGTIENQKEYAEKYAQLNMLNVYDYYLDDGVTGTLPLQKRPEGKRLLEDAKAGKFNLVLFFKLDRLGRSVRVILNAVYDLMELNVDVRSMTEAFDTTTPSGRFTLNTFAGIAELERDTILTRMRMGTIRHAKLGKWLGGPVPYGYTLGNGYLEISHTKIPGLAYSEADIVKLIFEKTVYEKMSAEAIADYLNNLSVPTKYKILNRKLITSGYWYPSRILSMLHNTVYYGVHIFGQMSKHQKPEIIKQTNPAIVDIDLWDAAQKQLTSNKLLAARCRKNDYLLSGLIKCGLCGRTYIGTGYAGSKKEKVLYYVCNDKNRYHPDKNQKICQSQNLRADWIESIVWNDCLSYIMQPDKLYLENKAQNLTDPKDELNALEQTAVKLERERSSILDLFRKKIITENDLKNQLDKIAKEQDKLNRAINDKKALISKIDKINNNMIKMVDLLKSFQKYISDNITFTDKRKIVEALVENIIVYTDYDNGQRDIPIVTIAINYVFKNEKNPLKRNYQPSSKQNIHGF

SEQ ID NO: 24811 - protein, 558 aa, synthetic construct
MKKTKVYIYTRVSTSMQIDGYSLDAQKERLTKYAEGNDMVIAGEYSDEGKSGKNIAGRVDFQRMLNDIACKKDGVEYVLVFKLSRFGRNAADTLTSLQFMQDYGVNLISVEDGIDSSKEAGKLMVHVLSAVAEIERENILVQTMEGRKQKAREGKWNGGFAPYGYKLVDGELIIEEDEAEAIRIIFDKFVHTNLGYNGVVNYLNNNGIKKKARQNGYLTQFTTSTVKAILDNPVYYGKIAYGRRKTTKIEGTRNEYHVVAQKEFDVYDGRHKAIVDEQLWKDAQAKRRATASKLEKKHDLDHEHVLSGLVKCPVCGAGLYGNVKRVKRKDGTYYKTYFSYACKHRLNKDGHKCDYHKQWSEEKVDNAVSEIIRKLVNNPRFSEVMKTKINTSVDTSEAEKELANAKKVLKQLIGTKDKIILQIDTLDILDKNYDRKYDDLQKRLDTIYDKIGDAEDLVSETEDKLSNIQKDKITGDNIYNYLLMFDSVYDVLSDMEKKQFYNALLTDIQIYEEEQDKQIIKSIGFKFPVFYDGEFTKRIIRDKEKTVETVVGLHRKDM

SEQ ID NO: 24812 - protein, 460 aa, synthetic construct
MARSITVIPAKQISTAESGTAQSVQKLKMAAYCRVSTDQEEQLLSYENQVNYYTNYISENPLYEYAGTYADEGISGTNTKKRDEFNRMIADCRSGKIDMIITKSISRFARKTLDCLNYVRELKDLGIGIFFEKENINTLDAKGEVLLTILSSLAQDESRSISENCTWGIRRRFETGKRFLGYNTDENGKLVINRTQEPIVIRLYQEFLDRKTTDYIKRIFEREGGTKWQSTTLMSMLENEKYKGDALLQKSYTVDFLTKNRTQNKGEIQMFYVEDDHDAIISKRIWECVQLEIKRRKKYLEEHGTNSYSYRPESNPFASKIICVDCNKVFARKGWRSSTGVDRKVWQCSERYKVKGVMGCANRHVEEEMLIKAYLMAWNALVENQEDFMGQWTEQLQSENLLEGYRAEKFIEYTDEAEPLTEMDTDFMLKTLDHIKVFEDGTLLVVFLDGTEIECKNEEE

SEQ ID NO: 24813 - protein, 655 aa, synthetic construct
MGLLSKYTSLQIGKLNKKQFMKEANYDDIFTDFGIDLNVMVMCRESTAHEEQQKALCDQVERMKAIIDSHRQFNLVEDGIVIEDGKSGLAMDIRPKFKATIERAVSEDIDIIIVQEASRFSRNVGDFFYNMNILQNAGVGLLIMEGEFWTYFMSPHDYPRLANEVAKGQAESLTTSKRVFRGIETYRERGQLVSGSMFGYDLVKAVDRKDNTYKINPVDGATVQLIFDMYVNKGKGTALIATYLNANNYPTHDRKGEWSASKVRRVLMHEKYANLILYGKFKIINTNTKKKVATHIKPIRYTTYDKDGNVIQERNVVYGTWEPLVDEETWWKAQEILKTRSEEYNITKDGKTIRQNWGRRQSVDAYANKGYCSCGYTLTHVLRHKATDERYSQYAYECRWQKNSGTESYRKKHGLKPSDCTCKLPAVTDVAMKLMSVKVFKYLLTDIRDTIEDTIRIIEMANEQALVNLTNSGVALEELEATLDKLNNRLSRFADMYADGDLTKEQYRAKKESTENEIKHTDELIKSRKLAISEQKKKKLDVASIKERLNTFVDLNGYGVSNEMIEFFVERIIHRDNNEFVWELNLTGQPSKPNKYKIKEYSKEYSDSLKDDSNFNIIKTFVISLDECKEFCETMAHRQFKGAYWSQITVKIAVK

SEQ ID NO: 24814 - protein, 454 aa, synthetic construct
MECVAYMRVSTEKQAVEGNGLDSQKRDIENYCRKNELVITDWYIDDGYTGTNMDRPELQRLVNDCSRKRISCVVAFKLDRLSRNMIDGIYLIEKVFQKYNVVFKCVHDSVNYDSPMEQAYTQMMAVFAQLDKNTMMLRMRGGMLERVKQGYWMGGGNLPYCYSYSKEQGILMPIPERKEQANKALDLFISGYSDEKIYKTLGYTSEMVVRSILTGIVNVGMIPYKGNVYQGKHEPIFDKARFELAQELRKSRRKTKATCLTKEPNLLTGLCYCGVCGCAMRYQKWGSDKHKIYCMSRNKSMSYLPNHNPDCNNSLEWADDIEKQVEEEMLKISLDLSSYKPKEKATKLEIMQSQLEKEQIKLKRLYSLYADGNDTVLEMIKELEKQIKDMKDNITAESKNAVNVQKKEFVYENIKKLADIWDNIDKKQKNMILKTIIDKIVIVNGNIEIQLKNF

SEQ ID NO: 24815 - protein, 523 aa, synthetic construct
MPNYAIYLRKSRKDNEAEQRGEGETLARHRKLLLDYAKCEGLHIAKIYEEVVSGESIATRPQMQLLLADVEQGLYDGVLVVEVERLARGDTMDQGLVAQTFKYSNTKIYTPMKVYDPNNEFDEEYFEFGLFMSRREYKTINRRLQRGRRASASEGKYIAGRAPYGYEKIKIPNDKGNTLRIIPEQAEVIKQIYDWYVNGLNGEDAGLSKIATKLNSLGIKPYRNDYWSKETLRDIITNPVYAGYIRWGYRRNKKTVVDGKTVTCRPVTLDENCVLSKGLHEAIIPQELYDKAQRKIKSVPPPPVGYKKELKGSLAGIVICKNCGHKMTLRSPSTKDKPPYLVCHYRYCDNVSTPYDIVEKRVLDTLQEWAEKYKLKEKQNKKNSSGSIDMLKSSVESAKKKVATLQQQLDGMCDLLEQGIYTPDMFRQRSVSVTERITKAKAEYEQLSEQLVSMEKLLTEKSTFIPKVEHVLKIYDTLSTPADKNRVLKEVIDHAEYSKTKSGAYKGVSVDDFNLTVFPKMPL

SEQ ID NO: 24816 - protein, 527 aa, synthetic construct
MEKNRAVLYLRLSKEDVDKVNKGDDSSSIKSQRLLLTDFALERGFKIVGVYSDDDESGLYDDRPDFKRMMTDSKLDEFDIIIAKTQSRFSRNMEHIEKYLHHDLPNLGIRFIGAVDGVDTESAENKKSRQINGLANEWYCEDLSKNIRSAFKAKMKDGQFLGSSCPYGYKKDTQNHNHLVVDDYAAKVVQKIFNLYLEGYGKAKIGSILSSEGILIPTLYKTEVLKQNYHNSKAIDTTQNWSYQTIHTILNNEVYLGHLIQNKVNTMSYKDKNKRILPKEKWIIVRNTHEPIITEEMFQDVQKLQKNRTRSVENIEPNGLFSGLIFCADCKHAMSRKYARRGEKGFVGYVCKTYKTQGKNFCESHSIDYDELEEAVLFSIKNEARSILQQEEIDELRKVQAYDETKSYYEMQLENIKSRMEKIEKYKKKTYDNYMDDLISRDDYKKYVTEYDKEIGELKQQQELINSKTDLEKEISTQYDEWVEAFINYVDIDKLTREIVIELTEKIEVNKDGSINIYYKFRNPYIS

SEQ ID NO: 24817 - protein, 510 aa, synthetic construct
MSYFIYARKSRKDAELEALGIDVLERHITTLLELAKTLSLPIGAIYREVVSGDSIDARPVMTQVLSEVEACMWDGALVMDVDRLARGDTIDQGRVQRAFFYSNTRIVTPNKTYDPANEYDNEYFEFSLFMSRREYATIKRRMQRGRERSSSDGYYVGNVAPYGWERVIAPDGKHYSLAPHQTEAPVLDLMYDLCGNKQYGYQKACTYMSNMGILARSGKPFTPSTLKGIISNPANIGKVRWGHRKTVRAVKDGRVVKSRPKATDYILSDAAWAPRISPDLFKRANQPKGCFSAPIRSDRPIQNLFAGLVRCSQCGRLMVRKKAQTKTPYDMLICQYAECSTVGIRIDELEEALLGWLKDYIAKYEFADTHAEDTAAIAAKELIVTNFETEHQTLLKQRESLFDFLEQGIYTKEIFIERSNALEQRIRDCMNNITAAREDLHTTIARQANRKNFVPKCKNLLSEWDSLAISEKNSALRQLIDRIVLTKTKRNKKNQKNSEFTIDVYPKVPK

SEQ ID NO: 24818 - protein, 569 aa, synthetic construct
MKQSSNKKSREATAFLYERLSRDDNLEGESYSIGNQKKLLTKVAKEKGYTNLVHFLDDGISGVTMNRPGFVEMMQQLEQGKAAAVFVKDLSRLGRNYIEVGRLTEEFFPDHDIRLVAVSDNIDTAEGENELAPIRNLFNEWYARDISKKRRISNKIKGNSGEPMGLPPYGYIKDPNNPKHWVIDEEAAQVVRRIFDMTLEGFGTEQIATQFEKEGILTPQAYWIQKGIGRPGKTKTRPATKWNGSTITHLLYQQEYCGDVLNFKTYSKSYKNKKRIHNDPENWVVFQDVHEPIIERAVFEQVQQKRGKMRKRRTSNGEHNMFSGLLVCADCGCNLHFHFNQGNPEIKYFNCSNYKGNRGTCQSTHYIRVDFLEEVVLGEIRRLTKFASLYEDDFLKAVIGHSQQADEADRKLKEKELKALLARDEELDGLFERIYEDNVSGKISDERFSRMSRRYEDEQKELTEKIKQLRSEIEKQSNRTMTTDMFISLVRKYTRAKKLTPRMLNELVEKIEVFNAEKVNGVWEQRLRIHYNCVGIIEIPSALPLPTPDVSVNTRKGVVVNYAPCDVAI

SEQ ID NO: 24819 - protein, 523 aa, synthetic construct
MRFFSYGRKSVFSDKSDSIDNQFRMNREYCESKFSGQVDSWQQFSDEDFTGANTSRPDLQRMLSFIKGGFCDVLVVYQLDRLSRDVRDFANIYALLEEHGVMFISIKENIDTTTPIGRAMMYVTVVFAQMERETIAARVTDNMLGLAKKGYWTGGNPPVGYVRKHIVVDGKKHCSIEVDPDGARYVTQIFDTFLAYNCSLQGMETRFKNQGIRTQSGKFFSTTQLHKMLTMPYCVEATPEVYDFYAAKGCIMDPGSPREMWDGSVGVIIYGRSTEKNKKHQAQPPEKWTVCLGKHKPFMPAEKWLAVQSRFTQNKCIKDAKWPVPLLKGVIRCKCGNLMQVSRKKKVDGTCSSWYYCRKRMRQGVDACDMGQIKCDLLDEKVLELFRGIAADPGLIQKFVKAKAPDDIPNLKAAQARVSACERKISRLAASLALAEDSTASKYIIAEMERLDVELGALKREASLAEMESHRATANANDAKATAVEIAKLIHGLEGFDDKEKNAIARAVIQECTWDGERLFITL

SEQ ID NO: 24820 - protein, 534 aa, synthetic construct
MDSSPFLMQERMGIELMAKNKKAGFEPDMQDAVIYTRYSSHNQRDCSIEQQVADCEIFARQNNLRVVKVYADRHLSGTTDNRPQFQQMLKDAAHGHWAYVICWKIDRFARNRYDSATYKFRLKKAGVRVLYAKESIPDGPEGILLESVLEGSAEYYSAALAQNIRRGMKFNAEQCKVNSGSIPFGYCKGPDGRFAIHEANAEVVREIFRKAAAGMPFVDIANDLNSRGLKTSRGGRWNKGSFRLLMNEAYIGVYHFSDTRIEGGMPALVDQGTFWAANERLKANSSVRGRHQDGGDYLLTGKLKCAHCGSYMIGFSGTGKSGELHYYYGCQKRRRERACKKANVPREWIERVVVKAALDYVLRPDVMEWIADAVMEYQEREAASAQLAALTAELEENQKATDNVMKAIEAGIITSTTKQRLLDLEAKAQDLKRAIELEKLSHVRLERDQVLFWLDRFRGGSLQSQEFRRKVIDAFVSVVYLSDDHLRIAFNYSGGSNAEADFDLVMDAEAAAGELSKKFAQGHVASTNSSQKLT

SEQ ID NO: 24821 - protein, 490 aa, synthetic construct
MLSKNACAYIRVSTDKQEELSPDAQKRLILEYCKKNNLTIMSEHIFVENGISGKKADKRPQFQRMIALAKQKEHPFDVILVWKFSRFARNQEESIVYKAMLQRVGVEVVSISEPIIDGPFGSLIERIIEWMDEYYSIRLSGEVMRGMTEKAMRGGYQSTLPLGYHMNPDTGVPEIYEPEAAIYRILLDRYLNAGMSPLAIARELNAAGYRTRRGAPFERRTIIYILENPFYTGMIRWNRQNHSDHTIKDRSEWILAKGAHAPLIDKDTYDHIQAVTALRTRPYKARGTSSIKHWLSGIVKCSDCGKSLVGNALYNGVPSSWQCSDYNKGRCCHSHFIKNTALEQAVFNALEHAITSGDISYTLKSTDSSSELASDLDRMLSKIDDKERRIKQAYRDGIDSIEEYRENKEILTKERQDILSRLAALSERSSEDDKKKLLAEVQSVYDIVTGNADKLTKANAIRSIVDHCVYDKANDSFDIFFFFSKGSKLL

SEQ ID NO: 24822 - protein, 464 aa, synthetic construct
MARSVTVIPARNRQRETGRRAVQEKKIRVAAYCRVSTDQEDQLHSFEAQVDYYTKYINDHENYEMAGIYADEGISGTNTKKREQFKRMIADCEGGKIDLVITKSISRFARNTQDCLAYSRKLKNLGIGIIFEKENINTLDSTGELLFTILSSLAQDESRNISENCKWGIRTKFKNGEMHLNTFKFLGYDKDENGKLVINKEQAKTVRRIYRDFLIGINPAQIAKELTEEKVPGCNGQTKWYPSTIVGILKQEKHMGDALLQKTYTADFLTKRQVKNNGEIAQVYVKDSHKGIIDKETWNAVQEEFERRERFMKDHGTDRYSYGADCMPFCEKVFCGECKSLFTRHSWKSRGIVQWQCKNHRTDGRVTCSNAYVDNSNLEKGFVKVFNKLVADREKFMERWNQMKTDGSPLEKIRAEQMMEATENEPLGRFVPEIAQLVLAEVTVLGAKKYEFFFLEGSRIKVSV

SEQ ID NO: 24823 - protein, 499 aa, synthetic construct
MLKAVIYARYSSTQQREESIEGQIRECTDFAKRQDITIVGSYIDRALTGKTDARPHFQKMIADSGKQLFDIVIVYTLDRFARNRYDSATYKAKLKKNGVKVISAKENITDDPSGIILESVLEGMAEYYSVELAQKVLRGMTENALECKWLSGIIPLGYKLDEDKHLIIDDHAAPIVRKIFEMYAAGDRIVDIAKYANSTHLKTAKGNNFSRCSFTHMLKNETYIGTYKWRDIVKTKVIPQFIPDDLFHSVQKRIKSRKETNVRGKSENFLLSSKLKCGKCGQFMTGVSGTSKQKRRYYYYQCYASKSKKCDMPLFPREKLEDIILAETIKLLSEPQTIEFIANTVANLPIDENTQVSILETEITEIKNKLKNCIKAIESGLISDTISKNISEYEKKLSVLEKDLSIEKVLNEPFKITPDHVKFFLYNILQIKNADERRDMIISTFVRDIVLTKDDIGYTVKITYNYNENPSTSLDNSVQKGSQKSSLVAPTRIELVISP

SEQ ID NO: 24824 - protein, 574 aa, synthetic construct
MARKKNIAAGLDAVIYARYSSHNQREVSIEQQIAECTKHAAALGLRIVGTYEDRAISGKTDNRPRFQQMMRDAEKGKFQAVVAWKSNRIGRNMLQAMVNEAKLDDYGVKVFYAEEDFDDTAAGRFALRNMMNVNQFYSENMAEDITRGLYDNASKCMANGRQPLGYKRGEDGRVVLDEANAAVVREIFTRVAAGDLFVDIARDLNAQGIKTSKGANWNKGSFQSICQNERYRGIYIYGDVRVADGIPRIVSDDLWYRVQEAMRMKKNPVGTRHRVGAEDYLLTGKLRCGHCGSYMTGVSGTSRNGELHYYYTCQKRRTEHACDKKNIRRDVIEPAVAQAIKMYCLTDDVIAWIADRTVEYWEKHDNDLQIEALEQQLEENKKATSNMLKAIEMGIITEATRTRMVELETEQSRLSVQLNVAKEDVVKIDREQIISYLELLQQGDIHDRDFQMELFKNFLVAVYVYDDNRMKLVFSCMGDQNSVEIPLETGEDPPDGGLSPDAKMFVLTPDSSTKKALYFVGSMVLFFFSAAKNGGCTALPASFSDVLQAVQCSPRVIGASAGQKVPVQLTISSI

SEQ ID NO: 24825 - protein, 656 aa, synthetic construct
MSLRSKYTEHQICKLEKKEFMKEASFDDIFIDYGHDLNTLILCRESTAHEDQQKALNDQVERMKAIVDKHRQLHLVDDGIIIEDAKSGLAMDVRPKFQATIKRAVAEDIDVILVQEASRFSRNTGDFFYNMNILQNSGVGILIMEGEFWTYFMAPADYPRLANEVAKGQAESLTTARRVNRGIETYRSRGQLVSGNMFGYDLVKAVERKDNTYKINPVDGATVQLIFYMYVNKGIGTELIATHLNANNYPTAKRKGEWSASKVRRVIKNEKYANLIMYGKYKVVDTSTKKKIATHIKPVRTTTYDKDGNIIQERNVQYGTWEPLVDEETWWKAQEIMASRSNSYNLKDDTGKSKRCANGLRTSNDAYANKAYCCCGHTLSPQYTHAATDTKYAQFRYNCRWQINSHTDEYRKKHGLSPSDCTCKLPAVTDVAMRLMSIKVFEYLFTDIRDTIDDTVRIIEMANKQAVDSLNNLGVSVEDLEATYAKLNNRLSRFADMYADGDLTREQYRDKKSSVEEELKHTKELIDSKTLAISEQKKKSLDIETIKARLNTYVDLKGYGVSNEMIEFFVERIIRRPNNEYVWELNLTGQPSKPNKYKIKKYNKEYSDSLQDDSNFNIIKTFVISLDECKKFCETLAHRQFRASYWNQITVKIAVK

SEQ ID NO: 24826 - protein, 668 aa, synthetic construct
MAYAKAKKHLKIWTKKKAALYVRVSTRYQVDKDSLPFQRKKLKEYCKFLGLEDHVIFEDDGYSAKNTERPHFQEMMSRVRSGEFSHLIVWKVDRVSRNLLDFAAMYQELKDHKVTFISMNEQFDTSTAIGEAMLKIILIFAELERNMTSERVTGIMLDRAEQGLWNGARMPVGYRWNSETKFPEPDPEEVKIVQLIFDKYEEWKSSIKIARYLNNNNFKSKRGGQWTSKLIHDIIRNPFYIGTYRYNLRESGRGPLKPESEWIVRENNHPAIIDKAQFERCNKIMDQNGSSRDTSDLRARKYVHTFSGHLVCGKCGANMIASKDRARANGWRPSMYRCAQRSRMLDCDNSRTINESYIGPFIFNYIANLARIQKNFKNITTVEKLEKELLKGETFDGVAGLLPEGLNLTFQALSFRQVGNGTYIPDIDFLGDSDDASDRDQIELLKSEIEKSKNAVTRLTDVYLFDPDSMTKEEFATKKKELAKKIEGMERQLADLLDDSGNDDLADMSFIKKASAFLVAQRIVSKSFVDYVGMAQELDNEILKDFIDQIVDQIVVLDGRVQSITFINGLKHEFRYIAPAELPVCQKCGGHIGSTCGCRTRTFDFSGKRYQRIKVGDPRDMLHGKKNPVCPECFAQEGRWHHWNCKVETCPICGGRLAECEHGPNGKN

SEQ ID NO: 24827 - protein, 438 aa, synthetic construct
MSTDQEEQLLSYENQVNYYTNYISENPLYEYAGTYADEGISGTNTKKRDEFNRMIADCRAGKIDMIITKSISRFARNTLDCLNYVRELKDLGIGIIFEKENINTLDAKGEVLLTILSSLAQDESRSISENCTWGIRRRFETGKHKMSTKRFLGYDTDETGKLVINRTQEPIVIRLYQEFLDGKTTDYIKRIFEREGVKNWDGGTKWQSTTLMSMLENEKYKGDALLQKSYTVDFLTKKRTQNKGKIQMFYVEDDHDAIISKRIWECVQLEIKRRKKYLEEHGTNSYSHRPESNPFASKIICGDCNKVFARKGWRSSTGVDRKVWQCSERYKVKGVMGCVNRHVEEETLIKAYLMAWNALVENREDFMEQWTEQLQSENLLEGYRAEKFIEYTDGAEPLTEMDTDFMLKTLDHIKVFEDGTLLVVFLDGTEIECKNEEE

SEQ ID NO: 24828 - protein, 425 aa, synthetic construct
MRVKVINKRPASVLQKKRVYAYARVSTDSRQEDSLENQMETYERLITGNSEYEFIGVFADQGISDYCENRQQFQRMMEKARAGEIDLIITKSISRFARNTVTVLKFARELKELGVGIFFEEQNINTLSGDGETMLAVLASFAQEESRSMSENNKWSIRKKFERGEVMITTSRFLGYDKNEYGDLIVNRKEAEIVSLTFDLYLMNVGSSRIGELLDYLGVKTVTGTTWESGTINGMLCNEKYKGDFHLQKYYTPENKRNHTRKNNGEVQSYYISENHEPIVSPEVWEQVQKVREQRKRDRNIGQDNTMKFQNRYPLSGMLICPYCGKTLRRRQVYKKKIQWLCSTYIEKGVKACKGIRIDDAELQGLNITEQTVIEEVVKNGKKHYCYTSKADFDCGIRNSTVSAEIEDGSVLPSVNRPRRTVIKL

SEQ ID NO: 24829 - protein, 544 aa, synthetic construct
MAETAKKISMIPAKVQYDRNVKLSEKKMKVAAYCRVSTELEEQDSSYEAQVEYYTSKISENENWKNAGIYADDGKSGTNTKKRADFNAMIQDALAGKIDMILTKSVSRFARNTVDSLVTIRKLKEKNVAVVFEKEGINTLEGTGEILITILSSLAQEESRNISENIRWGVVRKFEKGKVIVNCTKFMGYTKNEDGDLVIVPEEAEVVKLIFRLYLEGYSTGKIAKHLEEQGIKTATGQDKWHSTVIDKMLRNEKYMGDALLQKTYTVDFMTKKKVKNTGLVPQYYVEDDHEAIIPKELFYRVQEEMMRRASLCKAAVTRKKNQKSRYSSTYALTGMLICGKCGQEYRRVTWARNGKKKVVWRCSNRLTNGVKKCGESETLEENALNRAVMEAIHRITSDDMEFMENFRQNIIHVIGNYSTAKESEEYEEKIKEKQEEMVALIAENAKTGSYTPEFDERYRTIAEEINALKEAQKTARNGKRMADSYEQRIQDIDHYLSTSTCQIPEFDNDLVRRLISTIKVESSEKLLIQFQSGIVMEQEIRYE

SEQ ID NO: 24830 - protein, 517 aa, synthetic construct
MYLVAYARYSSDNQREESITAQLRAIHNWADANGHIIVKEYIDEALSARTDKRPNFLKMIEDSKTEDWNGVVVHKLDRFSRNRYNSAVYKKTLKDNNKKLFSVLEKLDDSPESIIMEAMLEGLSEYYSANLAREVKKGLNENALDCKHNGGTPPLGYSVLNSHYVINEQEAVIIKLIFDMYRTNHSYVEICSELNLRGYKTKRNKNFSKNSIHDILVNEKYIGNYTFGYGNRAKKRGQPNPDMIKIEGGMPAIIDKNVFFEVQEKMKGRKHMGGTYKAKQVYILSGILKCGICGEKYVGAKKNKFWSVYECSGHKKGVCDNKAIKKEEIEKIVVDELKTKLKKLFNNTELLEKVNSTYKDLYDNAENNLKVEEEKLINVKAQINNINKAVMDGLYSPEMKDQMNSLQTKKELIEHSIYLIKNISEKNEITSNDLNKIINTDLLKLESDNLEDIKEIVQKYVKEVLITPENINIKIVLDDTNINTKHKGDTDVCDSPPPKFEKRTAIILNLAVLFFFI

SEQ ID NO: 24831 - protein, 505 aa, synthetic construct
MSNAVIYARYSSGHQREESIEGQIRECTNFAKRNGLTIVEHYIDRAISAKTDDRPSFQQMVADSSKKTFDTIIVYTLDRFARNRYDSAVYKAKLKRNGVRVLSAKENITSDPSGIILESVLEGMAEYYSVELAQKVKRGMTENALACRWASGRIPFGYTIDADKHLHPDPALVPIVQEAFEMYAAGAKIVDIARKINSYHVVTGMGNKFGRSSFDRMIRSETYIGVFKWNDIRKENAIPPIITPELFYKCQARYNARNRKNVARPSAIYLLSGKLRCGCCGGSMCGMSGKSRNGTMHYYYSCYSTRRRTSHCDIGNIRRDEIEHIIAAHAASILKKPINLDIIANQALKTNNSVKNYRLESLIQQEKDLTQKLENCMKAIDQGLVSITLMDRIKQYEADLQSVKNDISLEKIKSNPIQVTKEHIIFFLEKFALLEGEKFKDRIISTMVRDIVIKKEKDGNYLVTVQYNYANSKELPNEESYSVPESIGSQDVELVETSGIEPLTS

SEQ ID NO: 24832 - protein, 477 aa, synthetic construct
MKDSKSKTVIIYNRVSTIMQDKNESLTEQTDECIRYCKTNGYEIYKILKDVKSGTKDDRAGYLELKKHIKRKDFDILVVLETSRIARKMKELVLFFSLLNENNIEYISIREPNYNTTTPDGKFAMNIRLGLIQFERDNTAERVTDRLYFKASKGQWVNGKPPIGYKLVNKRLEIDEEKAEIVRNIYEDFLNGYSLNQINNKLQFSWGSKQVKRILTNPTYKGYIRYGTRSNRKKNNREAFIVKGWHEAIIPEDKWEKVQEMYKSLNRKASNTKPTLLGGLLKCKECGNNYIRKRGGSYDKNLYYGCNLNNLRYSDKFFYKDIPECSSATIKGDLLEKAVIDTLKKQINDLNFNDIEIDKKRQVNIKQIDSSINKFKNRLNKIYELYIEDEIPKDKYLKDKKDIEARIISLEKQKKSFGEIEVEKSNNEMIQEYFSKIDLSNIEEANRILKIIVNKIVVYKKKKTPKDDFEVEIYLNI

SEQ ID NO: 24833 - protein, 527 aa, synthetic construct
MEKNRAVLYLRLSKEDVDKVNKGDDSSSIKSQRLLLTDFALERGFKIVGVYSDDDESGLYDDRPDFKRMMTDAKLDEFDIIIAKTQSRFSRNMEHIEKYLHHDLPNLGIRFIGAVDGVDTESAENKKSRQINGLANEWYCEDLSKNIRSAFKAKMKDGQFLGSSCPYGYKKDTQNHNHLVVDDYAAKVVQKIFNLYLEGYGKAKIGSILSSEGILIPTLYKTEVLKQNYHNSKAIDTTQNWSYQTIHTILNNEVYLGHLIQNKVNTMSYKDKNKRILPKEKWIIVRNTHEPIITEEMFQDVQKLQKNRTRSVENIEPNGLFSGLIFCADCKHAMSRKYARRGEKGFVGYVCKTYKTQGKNFCESHSIDYDELEEAVLFSIKNEARSILQQEEIDELRKVQAYDETKSYYEMQLENIKSRMEKIEKYKKKTYDNYMDDLISRDDYKKYVTEYDKEIGELKQQQELINSKTDLEKEISTQYDEWVEAFINYVDIDKLTREIVIELIEKIEVNKDGSINIYYKFRNPYIS

SEQ ID NO: 24834 - protein, 519 aa, synthetic construct
MADFEHVIIYLRKSRSDDPATTVEEVLFRHENILQEYAVKEWGARIPEDRIYREVVSGETIKDRPVMQHVMKILETGLVSGVLVVEPQRLSRGDLQDCGHIINSLRYTNTAVITPPKTYDLSDEYDRKFFEMELTRGNDYLEYTKKILNRGRIASVKAGNFIGNSAPYGYRKICVGTGKEKYYTLEIVPEEAEAVRLMFDLYVNKDYGFRSIAHALDMAGYKPRRSAEWSPAAISCMIANETYIGRVVWNRRKTIKKWENDTIVRTRPRQSEYISVPGKHPAIINDELFYAAKAKRNRTPRIKRYVQLLNPLAGLLYCGTCGHAMSRKRTVDKKYGSVSVSFLCNNQSNCHTKSVMYDAVIDRVKETLRQSIEDFEVKVNNKDETDIAYHRAMIANLKSELRKLKEKDMRQKDAYEDGIYTKEEFVVRNAKLAEQISIAQLKLDEAESSTTQLVDYQERLVRFRECLEALDDDTISAADKNALLKSCIDKIMYYNDSPSLPGIGRYVDNPFRLEIFLKL

SEQ ID NO: 24835 - protein, 668 aa, synthetic construct
MAYVRNKKKILKFWSKKKAALYVRVSTRYQVDKDSLPFQRKKLKEYCKFLGIEDFVIFEDDGYSAKNTDRPHFQEMMSRVRDGEFSHLIVWKVDRVSRNLLDFAAMYQELKDHKVTFISMNEQFDTSTAIGEAMLKIILIFAELERNMTSERVTGIMLDRAEQGLWNGARMPVGYRWNPEIKFPEPDPEETKIVQFIFDEYERVRSTTKIARYLNHNQIASKRGGQWTSKLIRDIIRSPFYIGTYRYNLRESGRGPLKPESEWIVRENNHPAIITKEQFDRCNAIMDENGTSRDTSELRARKYVHTFSGRLVCGKCGANMIASKDRARANGWRPSMYRCAQRSRMMDCDNSKTVNESYIGPFIFNYAANLARIQKNFKNIKTLEQLEKELLKGPEFENMKVSKESLRRTFDALAFQEVGKGAYLPDINLSDGDDDYTAAEQLSILKRELDKCKTAIDRLTDLYLYDPDSMTKEEFAKKKRDLVNKIAGYEKQIEVSQATGDKDDLADLEFIRKASAFLVAQRIVSKKHVDYIQMALDLDNEILKDFVDQVIDRIEILEGRVRSIRFVNGLVHEFTYSTPADLPVCQKCGGRIGSTCGCRTRTFDFAGKPYRRIKVGDPGDKFHGVTGAVCPECSAQAGRWHHWKCGIERCPICGEQLIACEHAPNGKD

SEQ ID NO: 24836 - protein, 441 aa, synthetic construct
MKRAAIYVRVSTKEQKEKGLSVDSQLLALREYCSNNGYVIAGEYNDAGISARKKYINRPALLQLINDCKEGKIDIILFTKLDRWFRSVADYYQVQTLLDSYKVPWRAIWEDYETETSTGLFKVNIMLSVSQNEADKTSERTKEAVKYRRLRGDFVGGKCPRGYRRENKKLVFDEKTYDAINAMFRTYLSCFSIAKATEAVAEYGLHIATSQICRMLKSPAYAGNASGSECPAYITWDEHLLILTNSTKRNRTPKRSDRVYLFSGLCRCGYCGGRMVARVNRWVKNGQQLYYPFYSCAAHNDKRNLDCPGVNLAETKIEAYLMEHLEAELKMCQSEFELEQENKATYENKIKTLEQKLKRIGVRYEDGDIPFEEYKDKRFAIKKEIAGYKDKIDNARSVPSLPDNWKDLYNSLTPDNKRGFWLNILKEIDITKEAINIVFPV

SEQ ID NO: 24837 - protein, 535 aa, synthetic construct
MPRKKSATGAPVCLVAYYRYSGGSRQNEQSIEGQRHDCEAYARSHGLTITKEYIDRHISGKTDDRPAFQQMISDSDRHAFDAVICWKTDRLARNRYDSAIYKNRLRKNGVKILYAAETVVDGPEGIILEGLMESLAEYYSAELSQKLRRGQRESAMKCIALGGNRSFGYDIGPDKHYCINPQQAPAVRYIFEQYAAGFTAADIVAHLNANGIRTSRGNAFNKNSILRIITNEMYLGIYKYADIRIEGGVPAMIDRDLFDRCQRQLAFNRAHSGGTGPRADYILSGKLFCAACSRPMKGVSGISRSGEKYCYYACPGHTEKKGCTKSNVEKSALECAIVRATAQYILAPDKLQQILDQVLALQAHQTAPKPDPEKQALEAELSEVLHKQNNLLTALENGSSARLVQRLQDLEQQESTIRVRLAAIPDPPVPPRFTRDELEFMLSQFQRDESEQTLSYQRRLLDTFVSSVTLSDEQAVVCFNLTAPGTHSPERLTVPFSINKNPAEPSDLTPDSAGSTALRLVEAMGVEPMSEKSSV

SEQ ID NO: 24838 - protein, 572 aa, synthetic construct
MPKISRIEPVVPILTQRKKAAAYCRVSVESERMMNSISAQISYYSSLIQKNPDWEYAGVYADSFISGTNTAKRNEFNRMLADCENGKIDIILCKSISRFARNTVDLLQTVRHLKELGIEVQFEKEHIHSLSGDGELMLSILASFAQEESRSISENVKWGTVKRFKEGIPNGRFNIYGYKWEGDKLVIVPEEAENIRFMYREYMKGASRIEIGRDLMSRGIYTRLGKPWVDSNVKNILTNITYTGNLLFQKEYCEDPITKHRRLNRGELPQYFVENTHEAIIPMEDWQAVQEEFKRRRELGVFGNKSIKTSCFTSKVKCCVCGKSYRRSGKRKTNGEVYYVWICQTKSVKGAKYCGSKIIPEITLKKTCAEILETAEFNEELFADKVKQITVIGEDILEFHFYDGSVIKKRWKSTAKTDCWTEERRKDWGERHKNKADNPNRNYYNEFTGFIKCGNCGENYRGQPVSYADGTKDRYWRCCEHCGNTTIKESTLKEMVCNVLGLDEFSESKMDEVMDKVVILNGVVTFHFKDGHTECLDYEGKKKGYKHTDEYKSYMHRVMKERWQSKKESEDK

SEQ ID NO: 24839 - protein, 526 aa, synthetic construct
MTAKKVTTIPATINKFTAAPVNSRKKRRVAGYARVSTDHDDQTTSYEAQVDYYTNYINSRDDWEFVGIYTDEGISATSTKHREGFNCMVADALDGKIDLIITKSVSRFARNTVDSLTTIRKLKENNIECYFEKENIWTFDGKGELLLTIMSSLAQEESRSISENVTWGHRKRFADGKVSIPYSRVLGFEKGEDGNLVVNKEQAEIVKLIFRLFLEGMTPHSIAERLTKQGIKSPGGKDKWNQGTVRRMLSNEKYKGDALLQKEFTVDFLTKKHKKNEGEVPQYYVEGNHEAIISPQVFDLVQAELERRKRTKGSRYSGVSIFSNKIKCGDCGGWFGSKVWHSNDKYRRVIYQCNHKFIEGNKCETPHITEQEIKEVFVTAFNKLLTEKKEIISNVELMYRTLFDTAELTAERDRLQEEMLMLVEMTQSCVAENARVAQNQEEYQKRYDGLVDRYDKTKERYDELDYEIEQKKAQSEKMKIFIQTLKNMDGVITEFDDGLWGSLVDFITIGRKERTVTFKDGTAITV

SEQ ID NO: 24840 - protein, 464 aa, synthetic construct
MKSKTLRCAIYIRVSTTEQMMHGKSLEAQKDYLIHYAKEHDMNIVGIYADEGKTARKELKRRKAIQELVKAVERDEIDVILFWRLDRWFRNLSDFYKVQDILDQHNVRWISASEPGINMETRDGRLQLNVVLSIGQNEVDTTSERIKFVNEASIRQGKVIFGDSNMPIGYMVGTVDGVKRMVKDPEKEDLVNAFYRYFRTHQSKMKTLKFIQENYDPTFSYSQLRNMLESDFYHGTYRDNPHYCPAYLTEKEWAEIQEISNRNVKHPSSGRVYLFSGMMRCPVCGQLLAGRGGSSIINRKTRETRTYCYYRCNKACIDHMCTYRHNVSQNLIEEYLISNLEEEYNRYKIQSQNIHSKADLPKKKRTPAQVKKEMQRLNLLFQKERIEWDYYNEEYEKLTTELSSLEESDQQPKTNFDNIEKILHNDFRKTYDNLSPENRRAFWRSIIKEIHINTSHEVTGIDFY

SEQ ID NO: 24841 - protein, 477 aa, synthetic construct
MELVTKNRVIIYNRVSTIMQDKNESLTEQTDECIRYCKTNGYEIYKILKDVKSGTKDDRAGYLELKKHIKRKDFDILVVLETSRIARKMKELVLFFSLLNENNIEYISIREPNYNTTTPDGKFAMNIRLGLIQFERDNTAERVTDRLYFKASKGQWVNGKPPIGYKLVNKRLEIDEEKAEIVRNIYEDFLNGYSLNQINNKLQFSWGSKQVKRILTNPTYKGYIRYGTRSNRKKNNREAFIVKGWHEAIIPEEKWEKVQEMYKSLNRKASNTKPTLLSGLLKCKECGNNYIRKRGGSYDKNLYYGCNLNNLRYSDKFFYKDIPECSSATIKGDLLEKAVIDTLKKQINDLNFNDIEIDKKRQVNIKQIDSSINKFKNRLNKIYELYIEDEIPKDKYLKDKKDIEARIISLEKQKKSFGEIEVEKSNNEMIQEYFSKIDLSNIEEANRILKIIVNKIVVYKKKKTPKDDFEVEIYLNI

SEQ ID NO: 24842 - protein, 581 aa, synthetic construct
MAYRSTITTPSAASRKVKAALYIRVSTLYQIDKDSLPFQRQELINLAKYMLGTDDYEVFEDAGYSGKNTDRPSYQRMMTRIRQKEFSHLCVWKIDRISRNLLDFAAMYDELKKYNVTFVSKNEQFDTSSAMGEAMLKIILVFAELERKLTSERVMGVMLDRASKGLWNGARMPLGYKWDTNAKFPVIDADEAVTIRFIFDKYEEVKSTLQISRILNRNHIKTKRGGEWTSKTVNDIVRNPFYKGTYRYNYRESARGAIKNEEEWIIVPNALPAIITEEQWTRCNALMDSHHETKDTSSFRVCHTHIFAGILKCCDCGGGFSSNRDRPRLSGWRPSTYRCTRSAKMQDCHTFGISDVVLGPFIFNYIANFVRLQRKGTNYTVESIEKALLSGKPFENIAGIDSASLEETLLALKQYNSSSNAANYSPDLLEELPNQSDNGSNIDIELLRQEENKYKTALQRLLDLYLFDPTAMPQKDYLLRKEELEGKLQEVQASIKRNSASTPEVAGATDISFIKKASAFIISQRILSKQDIDFEDLIQKCTPELLKDLVNSTIKEIGIRGRRVEYIEFQSGLRHTFIYKD

SEQ ID NO: 24843 - protein, 535 aa, synthetic construct
MEGLIYNSYSNENEINVYGEYAIYLRKSRADMEAELKGEGETLARHEHILLDLANSKNLKIGKIYREIVSGETIEARPEMKKLLADVKMGKWKGVLVVEVERLARGETMDQGIVAQAFKISETKIITPMKIYDPNNEFDEEYFEFGLFMSRREYKVINRRLQRGRLMSVNEGKYVGSVAPFGYDRVKIKGDKGYTLKKNQEANTVKIMYDLYAYDDLSLNEITAKLNEMGLKPRKSEEWSVSTIKDILANPVYIGKIKWNARKEVKVYKHEKLIKTRPRNSDYILVDGLHKAIINEKTWKIVSAKRSLNSAPVVHNNVVQNPLCGLVICAKCGKKMKRRSYSKFSKEPTLYCSNPNCDNIGSKFHFVEEKVLDGLKKWLEQYKFDYQEHLQKINHNKIESIEETILSLEAEAKKENEKLLSIFNFLEDGTYTKEMFKARSDAVSQNVARINSSIEEYKVKLAQEKIVDKEKEVLVPKIENLLDVYDLLQTPEEKNDLLKTVLTQVTYLKTEKSIRKDSDPTNFTINLYPKINKVV

SEQ ID NO: 24844 - protein, 527 aa, synthetic construct
MEKNRAVLYLRLSKEDVDKVNKGDDSSSIKSQRLLLTDFALERGFKIVGVYSDDDESGLYDDRPDFKRMMTDAKLDEFDIIIAKTQSRFSRNMEHIEKYLHHDLPNLGIRFIGAVDGVDTESAENKKSRQINGLANEWYCEDLSKNIRSAFKAKMKDGQFLGSSCPYGYKKDPQNHNHLVVDDYAAKVVQKIFNLYLEGYGKAKIGSILSSEGILIPTLYKTEVLKQNYHNSKAIDTTQNWSYQTIHTILNNEVYLGHLIQNKVNTMSYKDKNKRILPKEKWIIVRNTHEPIITEEMFQDVQKLQKNRTRSVENIEPNGLFSGLIFCADCKHAMSRKYARRGEKGFIGYVCKTYKTQGKNFCESHSIDYDELEEAVLFSIKNEARSILQQEEIDELRKVQAYDETKSYYEMQLENIKSRMEKIEKYKKKTYDNYMDDLISRDDYKKYVTEYDKEIGELKQQQELINSKTDLEKEISTQYDGWVEAFINYIDIDKLTREIVIELIEKIEVNKDGSINIFYKFRNPYIS

SEQ ID NO: 24845 - protein, 624 aa, synthetic construct
MKQKLVAAIYARKSVILKKGDTLNIQEDKCRENLKLRYKYDYDLTIKCFTDEKTGKDMDREEMQSMIEQIKEGKVQVVCAYKLDRFGRNAIELVNFIELLKKYNVKLHCVDDQINYDPTDDNDVMTKLMIVLLSVLAEMERNNIRQRVIVTVYSLARKGFWLGGTAPYGFVSVRVPNEGIIDDVGAKSICILNPYAEEIQVVKYMYATYKDEDVSYSELANRCNDLGYEPRFASMFDQHTIQGMLMNLVYVKAAPQIYDWLISKGYSVENIPARDKFDGKHALLTYGKTLRGEEADNNIEAENKNRKDVKDWIVAIAPHEGVIEANDWLVVQNKIERNKGSKSKKNTKHNNVLITSDMFRCGCCGGVISSFNRKSRTDDNVLYPHYRCENKRKRRGKLCDVDNLPATDVDEKIIDLIFEKRDEIASSVEYIKRNLMPARKEYVKKNIIPKLEKEIKVQLKKIDGFLENMSSGKLNDNVLEMVNNKIEECNVKIKELEERIAEEDNKMLSMDKNHQNLDLLIDKFFSLDKTDFMKLPMKDKRNLVRLLIKEVVWDGENVHVYFKTPDSVCGGDTTDSLSINTALTNVDMVKQHFLMHCLILFPKMSELLQLKIRLNCRSRGLAIL

SEQ ID NO: 24846 - protein, 519 aa, synthetic construct
MKKVTKIDKLQPSQTSKKKLRVAAYCRVSTDSDAQLESLDAQKEHYKNYITSRDDWTFAGLYFDEGITGTKADKRPMLLRLIDDCKAKKIDFVITKSISRLSRNTTDCLEIVRTLLSLDIPIYFEKENINTGSMESELFLSILSSMAEGESASISENNKWSIKKRFLDGTYKLGYVPYGYRWKDGEILVDPAQAEIVKRIFRELLSGKGTEAIAKELNQEQVPTKKGGRWTSTSIRDIIRNEKYTGDCIFQKTYTDSNFNRHKNDGHLDQYYVPDHHEAIISHEDFEAAAALIEQRASEKGIKKGNAKYQQRYAFSSKIICGECGNTFRRRIHSSTYGKYAAWVCNTHLEDTSRCSMLYIRDDDLKLAFTTMINKLVYCHKLVLKPYLKALQENTGDASLLNIQQLEILLEQNTEQRETLHKLMGQGYIDQILFTQENNVLLSQAGEYRNQIELLNRSQSLDATKVYETERLLHFCERGEMQLGYSEKLFELFVDHIEVYSRQKIGFALHCGLILKEMI

SEQ ID NO: 24847 - protein, 521 aa, synthetic construct
MGNVMVIPAKRQVGNTARQQDAKPKLRVAAYCRVSTDSDEQATSYDAQVEHYTEFIQKNPEWEFAGIYADDGISGTNTKKREDFNRMIDDCEAGNIDMIITKSISRFARNTLDCLKYIRQLKDKNIPVFFEKEAINTMDAKGEVLITIMASLAQQESQSLSQNVKLGLQFRYQNGQVQVNHNHFLGYTKDADGNLIIDPEQAEVVKRIYREYLEGYSMDRIAKGLEADGILTGAGKTKWWTSTINKILRNEKYIGDALLQKTYTTDFLNKTRVKNNGIVPQYYVEGNHEAIIPKDIFLRVQEELVRRRVAKTSANGKKRSYSCNHCFAQIVICGECGEMFRRIHWNNRGCKSIVWRCISRLEPTGQECHARTVNETVLENVVVQAINMLLGDKSTYQAQLQQNITKVIRSAQQNTADGIDERLQELQKELLKKANNKEAYDETADEIFRLREQREKCTVDTAARDAQIARINELQDFIKLQPAHMEAFDEALVKRWLERIIVWEDHFTVELKSGLKIEIEG

SEQ ID NO: 24848 - protein, 574 aa, synthetic construct
MRKKKIDAPKEKPQRAAIYLRVSTAYQVDRDSLPMQRKDLVGYCEYALNISDYTIFEDAGYSGKNTDRPAFQKMMMQIRNGMYSHLLVWKIDRISRNLLDFAQMYEELKMLGVTFISRNEQFDTSTAMGEAMLKMVLIFAELERKTTAERVTATMISRANDGTWNGGRVPFGYDYNKETQTFSVNGDESFIVLEMYDLYEKTDSLVHTARELNDRGYVSRQHNPFSPVSVWTILRNPWYIGTYRYNYYKIPGRKAIKDESEWVVIPDHHTPLVSKERFDRVQKMLDSNARYRNTPGRSATQKNVNIFSGLIWCACCGAAFTASPGKLHASGYRSAKYGCPNVRKTKTCNAKYTSDTVLGEFLLNFILNVINAQKSFDQIKSPADLEARLLRGDTFKNVAGIDSASVAALYEMLAEYSPADSVLLKKPTVKKNLDPELRKLRADKRKTERALTRLDHIYLYSNKQMSDKEYLIKKNDLMNDLKEQDKSIGLLTSESWAQSLSDDDFLEQASSFIMSQRLQEREYIYFQGLAECTEPSVLRSFFLSIVDSVRMRNGHVEMLTFKNGISHKFTYKAI

SEQ ID NO: 24849 - protein, 515 aa, synthetic construct
MNGVIYARYSSENQREESIDGQLRECTAFAQHNDIQIVGEYIDRAFSAKTDNRPSFQKMIKDSAKGEFDVIIVWKLDRFARNRYDSAHYKNILKKNGVKVVSATEAISSGAEGIILESVLEGMAEYYSAELAEKVSRGMKENALKCKYNGGSVPLGYYIDESKHFQIDSSVAPFVVECFEHYADGMTMKQLRDELNMKGVKNSRGGKLSIDVISRMLTNRKYLGEYTFQDITIKDGIPAIVSTSLFEKVQDRLTKTKKAPSSHKADDDYILTTKLFCGKCKSFMVGESGTNAQGKKYRYYKCVNHKKHQGCDMKSIRKDLIENMTIKYIREFLNDEDLINTLIDLAYDAQHKENEQLPLLRKQLAQTEKGIKNIVDAIEQGISTKSTRERLLDLEQRKNDIEMSISKESIENPMLTKKQFKFWFDQLKKLDISKSEQRQKLVDLFVNSIIIYDDHIKFFFNYKEHTETITFDELNNCSDLPDSPRPFDLRKQMLPKVLFFAKNWLKYCVLWYFEF

SEQ ID NO: 24850 - protein, 518 aa, synthetic construct
MFTVGIYARKSVYRDNSDSVQVQVRLGKEYAGIIFKDKELEFRVYDSDEGFSGKNTNRPDFQRMMNDVENGLLNAVVVYKLDRISRNVQQFSAMYEILHQHQVAFISVKESFDTSTPMGRTVMYILAAFAQLERENTSERVTDGMLALGTAGKWTGGICPSGMKSVRMQCGDKYHSYLQIDPDTIWRPKMLYELLLDGNPITRIERYCRDHGIKSQTGKYLNSSQIYNILTNPVYCQNSIEAYYYFCDLGCKLPEASGFDGNHGLIGYGKTKTGTNSQHKRTSSEWTIAIGIHDYVIPADKWIAAQKRLGTNKMIRTAKYEAGILKGVLKCSCGGSMEVRTYTKNNIQFSYYYCRRMQRYGKEYCNSGYTPVKKLDSVFLNKLKQIQLDPARVTMDHPEDVFTQSSADLKKILHNLEASIMNLTNALTQAMGSSASEYIIRQIEELDHQKQITEAALRDAKIKEAQRIQNTNAVDQIYQSICYLLDHFDDIDYHGKNELIRKIVKNCIFDGENLKITF

SEQ ID NO: 24851 - protein, 479 aa, synthetic construct
MPKVAIYARVSTLNQAEEGYSIEGQLASLRKYCSALDWQIYQEYVDPGFSGGSLNRPAIQKLIVDAKSHRFDIVLIYKLDRLSRSVQDTLYLVKDIFDKNKISFVSLNEKIDTSSPMGNLFLTLLASIAEFEREQIKERMMMGKVGRAKSGKAMGWSKVPFGYTYDKQTGIYQINTLQAQIVKRIYRDYLDGVSITKLVDLLNAEGHIAKDRPWTYRTVRQALDNVVYTGRQFYQGNVYPGQHEAIISIEDYDKTQAELKRRQLTNAQKFNPRPFRAKYMLSGLLRCSVCGSSMMVQTRYLKYADDYHYYRCVSSIRKRIRFSYRQDTELCQNRSDYLKDDLENAIIKTIRHLQLHPDQMPVNTVKFDDKPLKDEINRINDKLNKLVDLYLNSNGISIGIINQKRDELLQQKEALENKLQERKPKQPELDPKKALLLLSKKNILELPYEEQVKLVKSLISKIEVSPSKMKIHWRFNVEK

SEQ ID NO: 24852 - protein, 447 aa, synthetic construct
MSITNVAIYVRVSTDRQAKKGDSIDEQLSTCKNYIDSKENMVLAGTYIDDGISGRKIKRGDFEQLLDDVRLGRIDLIIFTKLDRWFRSLRHYLNTQAILEVNHCDWLAVDQPYFDTTTPHGRAFVAQSMTFAELEAENDSVRIRDVFDYKYRQGEVLAGKAPLGFSIENKHLVPNQDAEKVLHIFQFYAACNSLNQTITHLESDMGIVMTQSNLKTAILKNKKYIGVFRDNDHYCPAIIPLDLFERVQELLAINVKISQKYNYIFSGLLRCAHCGHSFSGATRKIKKKAGGFYKYPLYKCHGAYPSKRCSNRKVIFESCIERYLIANIKPLLQEHIAEYEITSAKVIDYDSRRAALLKKIDKLKDLYVNDIITMDELKRDKEKYIKELENLPRNQEQKDLAPIRKLLKMDLDSIYQTLEPAERRQLWRSVIKEIQIDDHKNLKVIFL

SEQ ID NO: 24853 - protein, 510 aa, synthetic construct
MSYFIYARKSRKDAELEALGIDVLERHITTLLELAKALSLPIGAIYREVVSGDSIDARPVMTQVLSEVEACMWDGALVMDVDRLARGDTIDQGRVQRAFFYSNTRIVTPNKTYDPANEYDNEYFEFSLFMSRREYATIKRRMQRGRERSSSDGYYVGNVAPYGWERVIAPDGKHYSLAPHQTEAPVLDLMYDLCGNKQYGYQKACTYMTNMGILARSGKPFTPSTLKGIISNPANIGKVRWGHRKTVRAVKDGRVVKSRPKATDYILSDAAWAPRISADLFKRANQPKGCFSAPVRSDRPIQNLFAGLVRCSQCGRLMVRKKAQTKTPYDMLICQYAECSTVGIRIDELEEALLGWLKDYIAKYEFADTHEEDTAAIAAKELIVTNFETEHQTLLKQRESLFDFLEQGIYTKEIFIERSNALEQRIRDCMNNITAAREDLHTTIARQANRKNFVPKCKNLLSEWDSLTVSEKNSALRQLIDRIVLTKTKRNKKNQKNSEFTIDVYPKVPK

SEQ ID NO: 24854 - protein, 553 aa, synthetic construct
MAKKKKPAGGVAIIYARYSSHNQRDVSIEQQIEACRKHAAELGLTIIATYEDRAISGRTDNRPAFQRMMHDAENGKFSYVLAWKSNRMGRNMMQAMVNESRLMDCGIKVYYAEEDFDDSAAGRFALRSMMNVNQFYSDNLAEDVRRGLMDNASKCMANGKQPLGYKRGEDGKVVVDEPAAAIVREVYTRVASGELFTDIARDLNRRGIKTADKGEWNKNSFHRLCSNEKYRGIYIYGDVRIEGGIPAIIDDTLWYKVQEALRVKKLKRNGRHRPGDEDYLLTGKLRCGKCGGYMIGMSGRSKTGDIHYYYACQNRRVGRTCDKKNIRRDVIEPAVAQAIKEYCLTDDAIEWIADKTVEYWEKADRNLQLDSIEGDLAAVQSSISNVMKAIEMGVVTETTRDRLIELEKQRTDLKSKLALAKEEVVHVDRKKLISSLLLFRNGDIHDRQYQEDLFKTFLISAYVYDDDDNGHLKIVFNAFGDNNTVDLPIDFGETDNQSAFFDGAEKFDYALRRSTKKAIWFMPDGFFRSILLYKNSVPSLRRYAHFYAVITEC

SEQ ID NO: 24855 - protein, 482 aa, synthetic construct
MKTKNSNSIYPADELVDIYIRVSTTEQALEGYSVAEQENRLRRYCEAMGFQIHKIHIDAGFSGASLNRPAIKEVIKDIQEHCVSKVLVWKLDRLSRSQKDMLIMLEDIFLANDCDFISMMESFDTSTAFGRAIVGILAAFAQLERENIKERTTMGRHARLAKGHYNGSRPPLGYRFLESSNDLKVEPYEASIVREIFSLFLGGTSINAIAALMQKKYPTVRTWNNTMIRRTLKNPVYIGKVRDVDVVRDGIHKAIISETEFYMANATLQHNQEIKKQSCRSRSLLTGLLYCGDCGARMQPRQIARGYPLRRYVCYSVSRTSKAMIRSDHCTNRLHPYTQEELDNIISGEIRNLAADEDYLREIIREDAGPVLDESELLQDRLTEIDKQTDKLLNLYQVGVVDLSQIEQRLADLKQEREALKENLEKSVPVVHMDIQEIQSHANAFQKALDCGDTERINSVIRLLIDKIVVLNEDIEIHWTFC

SEQ ID NO: 24856 - protein, 467 aa, synthetic construct
MIRMARSVTVIPARNRQCETGRRAVQEKKIRVAAYCRVSTDQEDQLHSFEAQVDYYTKYINDHENYEMAGIYADEGISGTNTKKREQFKRMIADCEGGKIDLVITKSISRFARNTQDCLAYSRKLKNLGIGIIFEKENINTLDSTGELLFTILSSLAQDESRNISENCKWGIRTKFKNGEMHLNTFKFLGYDKDENGKLVINKEQAKTVRRIYRDFLIGINPAQIAKEMTEEKIQGCNGQTKWYPSTIVGILKQEKHMGDALLQKTYTADFLTKRQVKNNGEIAQVYVKDSHKGIIDKETWNAVQEEFERRERFMKDHGTDRYSYGADCMPFCEKVFCGECGSLFTRHSWKSRGIVQWQCKNHRTDGRVTCSNAYVDNSDLEKGFVKAFNKLVADREKFMERWNQMKTDGSPLEKIRAEQMMEATGNDQLGRFVPEIAQLVLAEVTVLGAKKYEFFFLEGSRIKVSV

SEQ ID NO: 24857 - protein, 498 aa, synthetic construct
MEIQIREGNREQKRKLRVCAYCRVSTDADEQENSLENQIRHYETVIKANPSYEYAGVYSDFAISGFKEKRPGLQKMLADAQKGKIDLILTKSVSRFARNTAIVLEATRKLKELNVGVFFELQNINTLSGEGELMLTILAAFAQAESESGSAGAKMVYQRKYEAGIPVQYLERSFGYTKDERGVYIADESEAVWVRKIYEMAADGYTPAAIKRYLNENGVKTVGGTKWIDSTVFRLIENEIYKGDYIMHKHFVNEERKLVRNRGEVDAWYIEDDHEAIVSHELWQKAQDAIEAKRDYLAEGSVIEDFTEENYPYMNRIFCAKCGHPLYRRIYSNGNRLNWGCSGTKRHGKSFCEGINIPDGVLRKAWHFDGNMYIDEKPSVKGTKEFTYLKENSWKRRHKKKVPEAIPENTEEAYPYRKNIFCGLCGSRLVRHVNPKSHKVIWICNGAKRKGVAFCRGTRIPDSVIRGWGESKKDIYIQRKDDKNGKKRYSYTSKKPTV

SEQ ID NO: 24858 - protein, 698 aa, synthetic construct
MPKTPRITALYERLSRDDDLAGESNSITNQKKYLEDYAKKNGFKNIRHFTDDGFSGVNFNRPGFQSLIKEVEAGNVETLIVKDMSRLGRNYLQVGFYTEVLFPQKNVRFLAINNSIDSNNASDNDFAPFLNIMNEWYAKDTSNKIKAVFDARMKDGKRCSGSIPYGYNRLPNDKQTLVVDPVASEVVKRIFLLANEGKSPRAIAELLTGEKVLIPAAYAQKYHPEQYNGIKFSDPYLWGTSSVRTILGRQEYLGHTVLRKSVSTNFKLHKRKETDEDEQYVFQNTHEPIISQELWDSVQKRRCRVNRASAWGTHTNRLSGYLYCADCGRRLTLQTHYSKKDGSTQYSYRCGGYASRVNSCTAHSISADNVEALILASVKRFSRFVLKDEETFALELQSLWKEKCEEKPKQNQSELKRCQKRYDELSALIRSLYENLMSGLLPERQYKQLMAQYDSEQAELESQMETMKSEIAEDKSSSADIRHFISLIRKCKNPTEISDSMFNELVDKIVVYEAEGAGNARTQKVDIYFNYVGQVDIAYTEEELAELRAQKEQEERQRMEKQRKREKAYREKRKAKKIAENGGEIIKTKTCPHCGKMFTPTSNRQLFCSKDCWNQARQEQKEAAREAERGGHYYRQRACAVCGHSYWPTHSQQEFCSDECRRINHNRKTLEFYHKKKGNPKPDPEATPTPKPKEDNAA

SEQ ID NO: 24859 - protein, 518 aa, synthetic construct
MSIMSFNNIIIYLRKSRADDPTMTVEEVLAKHESILQDYCVNEFGQPMPESKIYREVVSGETIQDRPVMQRVLRLLESGNIDGVLVVEPQRLSRGDLEDCGHIINSFRYTNTAVITPTKTYNLQDEYDRKFFEMELTRGNDYLEYTKKILARGRLAAVMSGQYIGSVRPYGYNKVVYGSGKNRIRTLEKFKKENDILILMKRLYLDNDYTPEEIARTFDSMGIEPPKGKHWTASAVRRLLASPINNGKIVWNKRQTVVEWKNGKQVKSRAKSNKDDVIIVQGKHPATYDDETYAAIMAKLSIHSVKVTNQRGLRNPFAGILFCQCGRAMSLRSTHNGHSVILICNDHFYCHTRSVAFNPVLEKVKEALSEAITDFSVKISNKEQTESELYALNISTLENKLEQLYKKDLVQKDAYEDGVYSKAEYIQRNAQLQEQISAIANSLKEMRAKAPEVINYKDCIIRFQDCLNALEDNNVPVEVKNALLKACISKIVYHSINSNPEYSGRTKNPFNLEVFFKL

SEQ ID NO: 24860 - protein, 518 aa, synthetic construct
MLLLAFRVIYRLPKRKEAWLVEIQIREGNREQKRKLRVCAYCRVSTDADEQENSLENQIRHYETVIKANPAYEYAGVYSDFAISGFKEKRPGLQKMLADAQKGKIDLILTKSVSRFARNTSIVLEATRKLKELNVGVFFELQNINTLSGEGELMLTILAAFAQAESESGSAGAKMVYQRKYEAGIPVQYLERSFGYTKDERGVYIADESEAVWVRKIYEMAADGYTPAAIKRYLNENGVKTVGGTKWIDSTVFRLIENEIYKGDYIMHKHFVNEERKLVRNRGEVDAWYIEDDHEAIVSPELWQKAQDAIEAKRDYLAEGSVIEEFTEDNYPYMNRIFCAKCGHPLYKRIYSNGNRLNWGCSGTKRYGKSFCEGINIPDGVLRKAWHFDGNMYIDEKPSVKGTKEFTYLKESSWKRRHKKKVPEAIPENTEEAYPYRKKIFCGLCGSRLVRHVNPKSHKVIWICNGTKRKGVAFCGGTRIPDSVIRGWGEIKKDIYIQRKDDKNGKKRYSYTSKKPTA

SEQ ID NO: 24861 - protein, 687 aa, synthetic construct
MQSAFFFIPFFGSWRKGLFMAYVRNKKKILKFWSKKKAALYVRVSTRYQVDKDSLPFQRKKLKEYCKFLGIEDFVIFEDDGYSAKNTDRPHFQEMMSRVRDGEFSHLIVWKVDRVSRNLLDFAAMYQELKDHKVTFISMNEQFDTSTAIGEAMLKIILIFAELERNMTSERVTGIMLDRAEQGLWNGARMPVGYRWNPEIKFPEPDPEETKIVQFIFDEYERVRSTTKIARYLNHNQIASKRGGQWTSKLIRDIIRNPFYIGTYRYNLRESGRGPLKPESEWIVRENNHPAIITKEQFDRCNAIMDENGTSRDTSELRARKYVHTFSGRLVCGKCGANMIASKDRARANGWRPSMYRCAQRSRMMDCDNSKTVNESYIGPFIFNYVANLARIQKNFKNIKTLEQLEKELLKGPEFENMKVSKESLRRTFDALAFQEVGKGAYLPDIDLSDGDDDYTAAEQLSILKRELDKCKTAIDRLTDLYLYDPDSMTKEEFAKKKKDLVNKIAGYEKQIEASQATGDKDDLADLEFIRKASAFLVAQRIVSKKHVDYIQMALDLDNEILKDFVDQVIDRIEILEGRVQSIRFVNGLVHEFTYSTPADLPVCQKCGGRIGSTCGCRTRTFDFAGKPYRRIKVGDPGDKFHGVAGAVCPECSAQAGRWHHWKCGIERCPICGEQLIACEHEPNGKD

SEQ ID NO: 24862 - protein, 498 aa, synthetic construct
MEIQIREGNREQKRKLRVCAYCRVSTDADEQENSLENQIRHYETVIKANPAYEYAGVYSDFAISGFKEKRPGLQKMLADAQKGKIDLILTKSVSRFARNTSIVLEATRKLKELNVGVFFELQNINTLSGEGELMLTILAAFAQAESESGSVGAKMVYQRKYEAGIPVQYLERSFGYTKDERGVYIADEEEAAWVRKIYEMAADGYTPASIKRYLNENKVKTVGGAEWIDSTVFRLIENEIYKGDYIMHKHFVNEERKLVRNRGEVDAWYIEDDHEAIVSPELWQKAQDAIEAKRDYLAEGSVIEDFTEENYPYMNRIFCAKCGHPLYRRIYSNGNRLNWGCSGTKRHGKSFCEGINIPDGVLRKAWHFDGNMYIDEKPSVKGTKEFTYLKESSWKRRHKKKVPEAIPENTEEAYPYRKKIFCGLCGSRLVRHVNPKSHKVIWICNGAKRKGVAFCRGTRIPDSVIRGWGEIKKDIYIQRKDDKNGKKRYSYTSKKPTA

SEQ ID NO: 24863 - protein, 549 aa, synthetic construct
MRKEATRAIIYARFSTDRQNEKSVDDQVALCAARCAREGWEVVDSFSDRAVSGSTPVAKRVGGAKMLAALMAREADVLVLESLDRLSRDQVDQETIVRQLEFIGVRIVGLSDGYDSATGSSRKVLRAVRGLVNELYLDDLREKVKRGMRGVFERGCCPGGKVYGYRTEECEAGKRFVIYEPEARIVREIFTRFAAGWSAGRIVDDLNRRRILSPRGGKWMVSALVGVDSLGTGLLNNRLYIGMHIFGRFEWRKDPTTGKRTKRVRPESEWLRAEHPELRIVDEETWEGVRDRKRPTGHRTGGAPAKTLLSGILRCGLCGAPMIKSGRSSYCCSVSHNQGRSVCPGLSVSAEDAESAIIRVIQAQLLSPDAVERVLKSVRAQLETLTACSDEEEKEIQARMAALRAEIDNLVEAVAMGSLPAAVVGKKISERQAELERLEDDLKGLKRADTLNVPDEELRELIRTQAAAMREAINSDVQVAREMLKKVIGAVTVLAGDDTVTLKMKNPALGRVFKLPELSEPRDLIMVAGERNNGYLRITIPRRTTKNRR

SEQ ID NO: 24864 - protein, 515 aa, synthetic construct
MKGVIYARYSPGPNQTDQSIEGQLRECKQFAEENNITIVNTYADKKQTGRNDNRVQFQKMLQDSKKKQFDYVIVWKIDRFGRNREEIAKNKAILRMSGVKVLFAKEHIPDGPEGIILESVLEGLAEYYSANLSQNIIRGMRESAMKCKCNGSGLPLGYNVDKEHNYIRNDEEATLIKMIFKMYDDGSKINDICKYLNAHNYKTKRNSKFTHTGVSRILHNRQYIGEYRWKDIITPNGMPRIIDDELFERVAKRLERTKRAPSASRGDVKFLLTGKLFCGYCKSTMIGDSGTGKSGRKFYYYNCRIKKNKHTCKKKTVRKDWLEYEVARITANIVLQDKIIDYVSDKVVEIQKKEHEDKSNLNYYTVKLKETNSAIKNIMKVIESGIFTESMRERLLKLEDERSTYETEIAKEEIMRPTITKEQVVFFLKQFKNGNIEDKDYQAKLIDIFVNKVILYDDKIIITYNYSGEHNETSAKIIEEAAEELINEQEKCSDKLLSSPPQRYGSNDTNCYRTF

SEQ ID NO: 24865 - protein, 495 aa, synthetic construct
MTAVIYARYSSDSQREASIEGQLRDCKDYAEKNGITVVGTYIDRAYSAKTDDRPDFQRMIKDSAKKIFDVVLVWKLDRFARNRFDAVNYKYQLEKNGVHLVSAMEPISQGPEGIMVESMLIGMAEYYSAELALKVARGERENALQCKYNGGVVPLGFTIGKEDRLYHIDPETAPIVQEIFTRYASGEPAEKIAASLNERGLRTRTGKPFVKNSFFQIFRNRRYIGEYRYKDIVTPGGIPAIVDEDLFNRVQQRFEQNKIAHGRPAKEDVSYLLTTKLFCGKCGTLMGGESGTSHMGNTYYYYKCGKAKRHGKAHCDLKAIRKEPLERFVVETAIKVIFSDKIIERLINLIMEAQQQENTRLPVLKDQLRDTEKRLANLLEAIEQGILTPTTKQRLDELEARKEALNTSILEEELKKPVLTREWMRFWFEKFRKGDMRDMEHQRQIIDTFVNSVYVFDDRVVLNFNFTDDSKTISREEVLGSSAVENAPPNVRPFT

SEQ ID NO: 24866 - protein, 420 aa, synthetic construct
MQTGKITALYVRFSFDDGIDTESGSIEHQKALLKNYAESNGFTNLSYYADDGYTGTNFNRPNFQRMMNDIKNGLVGTVIVKDMSRLGRNYLMVGQYVEIDFPKYDVRFIAISDNVDSAKGMNDLLPINNLMNEWYSRDISKKIRSMVRQKGNSGQHITSKLPYGYYNTTENKQDWQVDEKAAEVVREIFELYVHHAMGTKQIALQLQAEKRIGVEYHKKIRKGIVVTAENIYLWNSGTIASILKRQEYVGDTVNFRTQIASYKNKTVIYNESDKIRIFPDTHPAIISRELFQMAQDRREKTIRHPSRPHKYLFGDYLYCMDCHARMHGRRCGTKSENALYCYECTTYRKNKGCYFHGAPEKYLEAEVLQAIRRVIYKANANPDEFYKTIQKRVEKKSDDCKAVILAELEKSQLRITVIDK

SEQ ID NO: 24867 - protein, 608 aa, synthetic construct
MPKKPTKHPAKPKRGKKLETEEPGVLYGRYSSHNQKDISVEQQFEKGYELAAEYGIKIIDTYADRAVSGRTDKRKDFQRMMSDAAKGKFRYVIAWKSNRMGRNMLEALINEARLQELGVRVLYVEEDFDDTAAGRFAARSMMNVNQFYSENMAEDIRRGLYDNASNCMVANGHLPYGYKRDDTLHYVIDEPKAAVIREIFTRVAAGEPFVDIMSSLNARGIKTSYNRPWGRSSFQKILSNERYRGIYIYGDVRKEDGIPRIISDELFFKVQEVITTKKNPQGRHRVNGDYLLTGKLFCGKCKSPMVGISGTGRSGKLHYYYVCQKHRTEKTCDKKNVRRDEIEMQVAQAIKDYALKDDVIEWIADSTVAYNERKEAESKVGILEDQLAGTERGIKNIMSAIEQGIITETTKSRLVELESERATIKAKIAAARADIVTVSRDDIISGLEMFRDGDVHDKKYQARLFDTFLVAVYVYDNDLRLVFSFSGNKNTVQIPIESAVNAVENNEAECSFKLCSAPPTGKSSSPPRLLDFLFSRHLVMARKLCYIWKNSSHRRMQHEQSGSLRSLAHARDLARDHRAQGGLQHGRAHGRGAPLPGGRRQEPVRARR

SEQ ID NO: 24868 - protein, 592 aa, synthetic construct
MPNLRKIEAAVPAIREKKKVAAYARVSMQSERMLHSLSAQVSYYSGLIQKNPDWEYAGVYADDFISGTNTVKRDEFKRMLADCEAGKIDIILTKSISRFARNTVDLLETVRHLKDLGVEVRFEKERIHSMDGDGELMLTILASFAQEESRSISDNVKWGIRKRMQNGIPNGHFRIYGYRWEGDELVIVPEEAEVVKRIFRNFLDGKSRLETERELADEGITTRDGCRWGDSNIKVVLTNVTYTGNLLLQKEFISDPISKQRKKNRGELPQYYVEDTHPAIIDKATFDFVQEEMARRRELGALANKSLNTSCFTGKIKCPYCSQSYMHNKRTDRGDMEFWNCGSKKKKKKGTGCPVGGTINHKNMVKVCTEVLGLDEFDEAIFLEKVDHIDVPERYTLEFHMADGNVVTKDCLNTGHRDCWTPERRAEVSMKRRKNGTNPIGASCFTGKIKCVSCGCNFRKATRNCKDGSKVSHWRCAEHNGCDSPSLREDLLEQMAAEVLGLDAFDAAAFREKIDRVEVLSSSELRFCFKDGRTVSRNWQPPERVGRPWTEEQRAKFKESIKGAYTPERRRQMSEHMKQLRKERGDKWRREK

SEQ ID NO: 24869 - protein, 549 aa, synthetic construct
MEYQTPLRVAAYARVSTEKEDQMHSLESQRSYFAQYINAKQNMQLTKIYYDEGISGTQIRNRIGFQQMIEDALQGRFNLILTKEVSRFARNTVDTLAYTRKLKEAGVGIIFTIDHIDTRDQDGELRLTIMASLAQEESRKTSERVKWGQKRRMEQGVVFGRDMLGYTVKNGILSIQEEEALIVKAIFHKYTNEGKGAFAIARELHEEGIFPKRMEEWSGTVILRILHNEKYVGDLCQKKTFTPDYLTHKKKYNRGQEEKIYIKNHHEGIIARELWNRTQEELARRSSLYRSKERHSNRYWCSGKIRCGECGSRFISRTRKLQSGTYRAWWCFQKSRHGGAKILEGQQIGCSNRSINERALFSCMKYCNDLLCDQKDKERIREEILENVRKVRYTSELLIDMDKITQKIGAIEAKKRKAFDMMLDDKLSKDDLYRQIQWYDKEITHLQELISQSRQKQELYRIDQEKTDLLEKALDEILSFGDGDQNEMLYREILQEIVVYREEERGCNRLVVWLKSLPFGIQLRIHSTGNGANFRTEILETEFVDRNSK

SEQ ID NO: 24870 - protein, 515 aa, synthetic construct
MKRAVIYARYSSDKQREESIDAQVRACKDYCLRHHYLITKVYADEAKSGRDIAKRDAYNQMMADAVEGKFDIIIFHKIDRNSRNEFNYYTVQNTLTRLGVEYAYAQQPIDDSPEGKMTEAMLVAMAAYYSRNLGKETKKGLNENAYKALFNGGRPPLGYKIVDQYYEIEPHEAEAVRLIYQLYLAGFGYNKIAHVLNSKGFKTREGRDFGKNSMYEILKNEKYMGNYTFNKTERKEGLPRNMHNMNSKNLIRVESAIPAIISEAEFMAVQKRREENRKRQHSYKTTERYLLSGKIFCGCCGSAMSGHRYTPRTKTYVYYSCNRKERIAAGRCPQKQISRDRLENWVIGIIKNKILADDSIKKIAADMAENYKNRNTGILKEKNALTTAKTMAERKLDNLYKLFENGNGDEYDMQRLENIKKELNNIKSKLKNLDEVNNLPELSEQNIESTLKYFKNKILEKDDMDAKKILIDLFVEQVTINIEEVFVTFGTKNVYMEMVPKTGLEPVRGSLPEGF

SEQ ID NO: 24871 - protein, 535 aa, synthetic construct
MKKAVAYCRFSSDNQRTESIDAQVRAIEEYCKKEGYTLIKIYKDEAISGTSIDDREEFLKMIEDSKNKEFNYVIVHKFDRFARNRYDHAINEKKLNENGVKLISVLEQLNDSPEAVILKSVLTGMNEYYSLNLAREVRKGQKENALKCVHNGGIPPLGYNLTEDKTYTINEEEAKAVRLIFKMYLEGRGYAYIADELNSLGFKNKLGKPFKKISIRDTLYNEKYIGNFIFGKKDKKGKLTGKEIKIENGIPAIISKEDFEKVQIMLQKKVRSSSGRSTALTTYLLTGLCECGECGGSYSGGYRSVNRNKTVSYGYQCRNRKDKVNDCKNTPIRREVLEDLVITTLKENIFSTSQIEVITDKVYGYVQDTFKRSNKELIKIDKSLEKLKAKAEKLLDLTLDGTISDYEYRNKKGEIDMEILNLKEERFKYTDAPKFMDKQKIKNHLIELGKNLDSKDENLLKILIQTFVKKIVVHRDSIVLELRIFPGLTPAKVGGDDGNRTRVRNYQRHRLLQCLVYYFISQQSLPQTGLTEAIL

SEQ ID NO: 24872 - protein, 576 aa, synthetic construct
MRRKNISKQTVDNTQRLKVAIYIRVSTTYQVDKDSLPMQRKDLIAYSSLVLGIEDYEIFEDAGYSGKNTDRPAFQSMMQRIRTGEFSHVLVWKIDRISRNLLDFAEMYEELQSLRVTFVSKNEQFDTSSAMGEAMLKIILVFAELERNMTSERVTATMISRANQGLWNGGRIPYGYNYDSDSSTFSIRDDEAAVCRIIRDDYLENKSLVHTSRLLNSIGHKTRAGADWSPTTVWIIIQNPFYAGMYRYNRYKGTEYRTVNPEDEWVIINDHHPAIFTLEEHEKMLDILQSNSRTKNILGQKHRAKNVYVFSGLLYCGKCGSRLVSSPGRVQADGFRTAIYSCPKKRKTHECDNPSINDLIVGEFVINYILNMLNAKSSFSSISSPVELEQRLLSGSAFNGITHISETGLHELFNLLSRYGSDKSYSFSISAPRKKKASVDPEIASLRKDKEKQERALKRLQDLYLYSSSAMTEKDFIIQKMEISKKIEDINARLGMITHDVDSTLSDEDFIKQASHLLINKKLQSKEYIYYKNLAQTVSPEILKTYMETILDSIYVTDGRITSIVFKNGLTHKFDY

SEQ ID NO: 24873 - protein, 543 aa, synthetic construct
MARKKNIAAGQNAVIYARYSSHNQREVSIEQQVRECMKHAAELGLHVVGTYEDRAISGKTDKRPNFQRMMRDAEKGKFQAVVAWKSNRIGRNMLQAMVNEAKLEDCGVKVFYAEEDFDDTAAGRFALRNMMNVNQFYSENMAEDITRGLYDNASKCMANGRQPLGYKRGEDGRVVLDEANAAVVREIFTRVAAGDLFVDIARDLNAQGIKTSKGANWNKGSFQSICQNERYRGIYIYGDVRVVDGIPRIVSDDLWYRVQEAMRMKKNPVGTRHRVGAEDYLLTGKLRCGHCGSYMTGVSGTSRNGELHYYYTCQKRRTEHACDKKNIRRDVIEPAVAQAIKMYCLTDDVIEWMADRTVEYWEKHDNDLQIEALEQQLEENKKATSNMLKAIEMGIITEATRTRMVELETEQSRLSVQLNAAKEDVVKIDREQIISYLELLQQGDIHDRDFQMELFKNFLVAVYVYDDNRMKLVFSCMGDQNSVEIPLETGEDPPDGGLSPDAKMFVLTPDSSTKKALYFAGSTVLFFLRKPIFEAALLRLHVF

SEQ ID NO: 24874 - protein, 506 aa, synthetic construct
MTKIIKAGIYVRVSTSEQAEQGYSIQTQIRACKDKAYELGAIDILEYADEGFSGAKLDRPAMAKLRDDIRKDKLDIIICYDPDRLARNLAHQLLITDEIEKYCREGLIFVSVSFENSPEGRLFYSMRGAFSAYEREKILERIIRGKKGKLLAGRLGNNHLYGYDFDKDTQMYVINENEAKIIRKIFEWYISGISSEQITDKLNANNIPKIWQGKRYKWSGSTVRTILKNEKYTGIFHGWQYLQVINKCGGYSIKKKDKSQWIDIEIPAIISNEIFEKAQKQIIKNRTYNTRKEKEVHLLTGLAYCGSCGNKIYNHHNIRRKYYVCSILYDKRITDKKICKPKFLHIPEVDELVWNALTKICSSPKLIKEYMTDINNHENTFLNYKEKLCMLDKKLTKLKNSQNDILEWFSDGLIDKETAQKKLENNKQKIEQLNSNKKELLINISNLKEKHTPEDIYNIFKKSAKISIDDKRNILRSILDKIYLTKLDKSKECKSKLSLKIVFVFK

SEQ ID NO: 24875 - protein, 540 aa, synthetic construct
MKQPYNTTIYNTALYMRLSRDDENYGDSVSIETQRTILQQYAKEQGLHVVGEYVDDGWSGTNFERPDFQRMMDDMEAGKVNCIVTKDLSRFGREHVMMDYYLEFLFPEKRVRYIAVAENEDTEKGLSDFVPFKNLFNEWFAKDTSRKVKAAFKAKFATGQRIGAYAPIGYRKHPEIKNKLIIDEETRWIVEKIFDLAIHGRGAASITRILIAEKVPTPGFINFQRDGTFANIYAGAPEEKSYAWTIAQVKSIMKDETYIGHTIHYRETNISFKNKRRVRKPQSEWVRVENTQEPIISEQVFRQVQEQIANRRRKCKDGTTQIFSGLVKCADCGWSLSYGENRQNSKPYGHYHCSKYGQGTRQCSMHYIRYDVLYAYVLSRLQYWSGLVQHDEERLLKQLLNATDKGQAAARKKQAAELKKAEKRKAEVDTLFARMYEDWAAGRITEYNFSMLSGKYQSEQAELDTKIEQLQSAIATESQNAADAEKWIALMKECVNPTELTAELLNMLIEKIVVHEAVKGEDGSREQEVEIFYRFIGKID

SEQ ID NO: 24876 - protein, 445 aa, synthetic construct
MKNKRVALYIRVSTEEQARQGLSLDAQLTDLRSYADKHNYEIVGVYTDDGASARKKPFSRRAFKALIEDIKQNKIDRVLFIKLDRWFRSVKDYYKAQEILDTHKVDWETTQEDYNTTTTNGRLMLNIKLSIAQNESDMTSDRIHFVFAQKRARHEICSGKIPFGYSVQDKKLVPNENAKYVQPLFEHFVKTQNLTEAARWMCSRGFYYTYASISHVLKNERYIGRSRGDDNFCQPLVTEDIFYKTQKIIKSKKLIKRTPTGRIFLFTGLIRCPMCGHPYTGIGCVGKNNGKTYYYYQCPQSVSPFKACTHRGRVTEKTIEESLLDSFDEAYKDFQYSVKKKQKQQPVTTDVEKLKRKLERLKELFLNELIDLDDYKKTHTELTAAIAEVETPKIQPSTPLNYYLPGGIRPYYEKMTREQRRQFWQQTVDRIDLDEDDTPRITFLS

SEQ ID NO: 24877 - protein, 556 aa, synthetic construct
MAYRKITDIRDTIGMRAVFYARVSTAEEEQLNAIELQIEENRGCIKDHGWKLVGEYIDRSKSGTMVKGRDDYQRLYEDLYEDLFDIVVIKDQERLQRNTLDWYLFINRVVQTGKLLFMYMDGKFYSPDDALITGVRAIIAEEFSRNLSKKLHNYHDHRIEKARQGQEIALQGSGNVYGWDKKDGKYYINPEQARVRRLMCEGIMARKGSTLIAKELNDAGYRNTVGKPWKPMDIPKFVYDCKNVGTMIINKERHDFESKQTIKLPKEEWVYVENALPPIVTQEEWDLICKIHEERVIATGSDRRGKKTSGYSFSGKLVCGICGAPYWRKQRVSKDEYWVCSTKQTKGRRTRKRDSTMGKAGEINPLGCDNENISYNSLMEIMGVVSERLQANTDTIKQDMINWLTKLRKQLLEANGGHTEADLQRELSRKSKLLDAYLDGILNKQEYQKKAEELDERIIQLKTETEKNKANSGDIAEIDKVLANIDEEVARYVDGNEKLKVEYLLEHLEQVQIFPDKVIVIVPILSEGIVVEKTQYVSREKRSRQKYNFPCSTGTD

SEQ ID NO: 24878 - protein, 579 aa, synthetic construct
MRNKSLAGRANNRAERPRKVAIYIRVSTTHQIDKDSLPMQRKDLIAYCELILGIEDYEIFEDAGYSGKNTDRPAFQEMMQKIRAGSFSHLLVWKIDRISRNLLDFAEMYEELQSLRVTFVSKNEQFDTSNAMGEAMLKIILVFAELERNMTSERVTATMISRANQGLWNGGRIPYGYSYDAETSAFSIIQDEADVCQLMKTDYFEHKSIIHTARLLNDKKIPTRSGALWSPTAVWKILSSPFYAGVYRYNHYKGTENRTLNPEEEWVLVPDHHPAIFTLEEHEKLCDILDANKRTANLPGQKHRAKNVYVFSGILYCGKCGNKLVSTPGRLQADNFRTTTYSCPKKRKTHECDNPSVNDLIVGEFVINYILNMLNAKSSFSSINSPAELEERLLYGGSFKDVQHISEDGLNEFYNLLSRYGSDSSYAFAVKHPRKKKAAVNPEVEALRKDKEKQERALKRLQDLYLYSERAMTEKDFIIQKNEISSRIQDINTRLGMVTHDANSTLSDEDFVRQASHLLITKKLIGRDYIYYKALAQTVSPDVLKIYMETILDSVYVIDGRVSSIVFRNGLTHTFIYQK

SEQ ID NO: 24879 - protein, 544 aa, synthetic construct
MAETAKKISMIPAKVQYDRNVKLSEKKMKVAAYCRVSTELEEQDSSYEAQVEYYTSKISENENWKNAGIYADDGKSGTNTKKRADFNAMIQDALAGKIDMILTKSVSRFARNTVDSLVTIRKLKEKNVAVVFEKEGINTLEGTGEILITILSSLAQEESRNISENIRWGVVRKFEKGKVIVNCTKFMGYTKNEDGDLVIVPEEAEVVKLIFRLYLEGYSTGKIAKHLEEQGIKTATGQDKWHSTVIDKMLRNEKYMGDALLQKTYTVDFMTKKKVKNTGLVPQYYVEDDHEAIIPKELFYRVQEEMMRRASLCKAAVTRKKNQKSRYSSTYALTGMLICGKCGQEYRRVTWARNGKKKVVWRCSNRLTNGVKKCGESETLEENALNRAVMEAIHRITSDDMEFMENFRQNIIHVIGNYSTAKESEEYEEKIKEKQEEMVALIAENAKTGSYTPEFDERYRTIAEEINALKEAQKTARNGKRMADSYEQRIQDIDHYLSTSTCQIQEFDNDLVRRMISTIKVESSEKLLIQFQSGIVMEQEIRYE

SEQ ID NO: 24880 - protein, 545 aa, synthetic construct
MSGATNKITALYCRLSQEDARLGESLSIENQKAILLEYAKKNHFPNPVFFVDDGYSGTNYDRPGFQSMLTEIEAGHIGIVITKDLSRLGRNSALTGLYTNFTFPQYGVRYIAINDNYDTIDPNSINNDFAGIKNWFNEFYARDTSRKIRAVQKAKGERGVPLTVNVPYGYVKDPENLKHWLVDPEAAAIVKRIFSMCMEGRGPTQIANQLWVDKVLTPTAYKLSHGRSTNAPAPEDPYRWDKRAVSLILERREYTGCTVNFKTYTNSIWDKKKHLNPVKNQAIFSDTHERIIDDDVFEKVQKIRNQRHRMTRTGKSSIFSGMVYCADCGSKMQYGSSNHRDFSQDFFDCSLHKKNGSRCKGHFIRVKVLEGRVLNHIQQVTDYILCHEDYFRKVMEEQLRVESSEKLTVLKKQLARNEKRIADLKRLFMKIYEDNASGKLSDARFDMMSQSYDAEQKQLEEDGLSIQQEIEVQEQQIENIEKFVQKAHKYVHIEELTPYALRELVSAIYVDAPDKSSGKRVQHIHIKYDGLGYIPLDELEAKEKA

SEQ ID NO: 24881 - protein, 516 aa, synthetic construct
MKTVSRIDPIPRQKKKLRVAAYCRVSTDMDAQLESLEAQKSYYENCISSHADWVLVGIYYDEGITGTKKDKRPDLLRMMEDCEAGKIDFILTKSVSRFSRNTAECLELVRRLMELHIPIYFEKENLNTSEMEGEFLLSTLSSFAEGESVSISENSKWSIQNRFQDGTYKLCSAPYGYRWDGKTLVVDPVQAKVVKRIFTEVLAGKGAGTIAADLNDDGIPAQRCDHWTSTSILGMLTNERYVGDALLQKTFTDEQFNRHRNTGEMDMYCVQEHHEAIISREDFDAVAVLLEQRAADKNIQKGVNKYQKRYTFSGIIRCAECGGTFKRRVNSGKGGKYAAWCCGTHIADKTKCSIQSVRDEDIKLAFTTMLNKLIYGNRLILKPYLKALKSTSQDDSQLRIQYLQGLIAQNTEQRETLTRLMAQGYIDQVLYSRENNGLLAQCEEFRSEIETLKKSQTTDAVQTAETEKLLKFVEKAEIQEEWNSDLFRQFVDSITVDSRNEIGFVLKCGLTLRERI

SEQ ID NO: 24882 - protein, 524 aa, synthetic construct
MAKTVRAIPATISKYTAAPINIVKKRRVAGYARVSTDHEDQQTSYAAQVDYYTNYINGRDDWQFAGLYTDEGISGTNTKRREGFKRMIADAKAGKIDLIITKSVSRFARNTVDSLTTVRELKDLGIEIYFEKENIWTLDSKGELLITIMSSLAQEESRSISENVTWGKRKRMADGKVSFAYSRFLGLDKDKETGKIVINHEEAKIVKLIFRLFLEGKTPHAIAVHLTEKGIKTPGGKDVWSQQTIRRMLSNEKYKGDALLQKEFTVDFLQKKLKKNEGEVPQYYVEGNHEAIIRPTLFDLVQEELARRKNGKTRYSGATIFSTKIKCADCGSWYGSKIWHSTRSYRKKIYECNNRYKEKCKTPYVTEKDVKEAFVAAYNQLLADKDEIIANAELVRTTLCATEDLQAEKLRLEDEISMIVSMTQNLVAENARVAQDQSDYQKRYDSLVKKYDEAKAQYDRVSESIVAKEAKNARLSEIVSLLKSQEKLISEFDIGLWTSTVDFVTVGRDKSITVTFRDGTEIKV

SEQ ID NO: 24883 - protein, 589 aa, synthetic construct
MPKISKVEQAIPTIQRKLCVAAYARVSMESERMQHSLSTQVSFYSNLIQQNPKWEYAGVYADYGISGTGTKKRKEFQRMLQDAKDGKIDLILTKSIQRFARNTVDLLTTVRQLKDMGVEVWFEKENIRSMSGDGELMMSILASFAQEESRSISENIRWRIKKQFEMGKPNGRFNVYGYRWEGDNLVIVPEEAAVVKRIFQNFLDGKSRIETGRELTAEGIKTRGGYPWVDSNIKVILTNILYTGNLLLQKEYVSDPIFKQRRKNRGELPQYYVENTHEAIIDKETFDYVQNEMARRKALGPLANKALNTTCFTGKIKCGICGKSFVHSIRKNAHRKEDYWICDSHKHKGRTCASRGVLQNKVLMKECTEVLGLTEFDEEIFLNKVDKIVVPEHHVMVFHLKNGEEITRRWVSTARKDWWTPERRKEWGERHKKKSTNPNRHYFNEFTGVIKCGNCGENYRSQSHTYADGEKERHWRCGNACGNSAIKENTMKRLVTDVLNMEDFDEKKMDELLDKAVILSNRITFFFKDGHTVEREYKEQRRGFYHEKAYRSYMSDIMKVAKSNDPYKHEKIQALKEEWRREDNRWQKQ

SEQ ID NO: 24884 - protein, 579 aa, synthetic construct
MGKKQKTNGGDAVIYARYSSHNQRDVSIEQQVEACRKHAAELGLTVTATYEDRAISGKTDKRPSFQRMMRDAEQHKFAYVLAWKSNRIGRNMMQALVNESRLVDCGVKVFYAEEDFDDNAAGRFALRSMMNVNQFYIENMAEDVKRGLYDNAKKGLVNGSLPLGYKRSADGKPEIDEPKAAIVREIYTRVAAGELFASIAADLNARGIRTARGREWNKGSFHVLCHNDRYRGIYMYGDIRIPGGMPRIISDELFYDAQEAYGMKKDNRYGRARHGAENYLLTGKLYCGHCGSYMVGISGTSKTGEMHYYYACQKHRLEHTCEKKAIRRDVIENAVARVIMMYCLDDETIDFIVDSTIAYFKQKDHDLHIEAMENELAAVRQAISNLMKAIEAGIITPTTRTRLLDLEEQQAKLSAKINTAKAERVEIDRDDLIAGLQLFRTGDIKNKKFLAKLFNTFLLAVYLYDDNRLKIVFSFTGNHNNIEIPLELDNDCPDSESGPYETEVRMSHLECRKNSGTPPSSGGAEKGDGCSGGRFVRTAPLPPHKKRPQAQAWGRFLSCGEEGSNSTAARRFVPCDMDK

SEQ ID NO: 24885 - protein, 433 aa, synthetic construct
MSGRITAVSKPPKLERKKRVAAYARVSSGKDAMLHSLSAQVSHYSDLIQRNSDWLYAGVYADEAKTGTKDSRADFQRLIADCHAGKIDMVITKSISRFARNTVTLLQTVRDFKAWEVDIFFEEQNIHTMSADGELMLTILASYAQEESRSASENQKWRIKRNFEEGMPWNGAMLGYRLKDGRYEIVPKEAALVRRIYNEYLAGDGYQAVAKRLTEEGVPSRFGGKWNQSVVSKILSNYTYTGNLLLQKTFRENHITKKTVINHGELPKYHAEDAHDAIISIETFHAVQTEKARRAAQFNKKPAPRTTYPFTSLLVCDICGKNYRRKTTKTGIVWVCGTFNTLGKSACASKQIPEATLQQVTAEVLGVKAFTREQLHSRVQSIRVCNGNILVFCFKDGSEVTRTWKDRSRAESWTDEMKEAARRKTLERSKHNA

SEQ ID NO: 24886 - protein, 501 aa, synthetic construct
MRDMDSARLRVACYVRVSTREQAEKGYSVSEQQERLKAYCLAKDWVVAQVITDPGFSGAKLERPGMQQLISLVQTKKCDAVLVWKLDRLSRSQKDTLYLIEDVFLKNGCAFVSMNENFDTSTAFGRAMIGILSVFAQLEREQIRERMAVGRVGRAKAGLFHGGGYAPIGYDYKTIAEGGAGLVVNEYEAMQVREVFSLYLQGWPVNRIRKYMAARYTTKDGDWGSDTTVRDVLKNPLYTGKINWAKKVYDGQHEPLISQETFDAAAARLATSSWKRTCSDGMERNSPFKSTHLLGGIIWCARCGARYFASGNYSGRGENKRYWPYYVCYSRAKSAKHMIRDPNCRNDRWAVAKLDAIIEGEIRKLAFDPATLELAVSGPQQDEDIAQRRAALQQRLNDLRAQMGRVLDLYQMGGSLPASMVGDRVAKLQAEIDGVEAALAEAVEEPPTQRLDAARAALVGAEDVLDNGTLDERRELVHSLIRRIDLDGENIDIHWSFAPEN

SEQ ID NO: 24887 - protein, 524 aa, synthetic construct
MANMNASKNITVIPARKRVGNTVAKEEIPKLRVAAYCRVSTDTEEQATSYEAQMEHYTDFIRKNTEWEFAGIFADDGISGTNTKKRDEFNRMIDECMAGNIDMIITKSISRFARNTLDCLKYIRDLKAKNIPVYFEKENINTMDAKGEVLLTIMASLAQQESQSLSQNVKLGLQYRYQQGKVQVNHNRFLGYTKDEDGNLIIEPKGAKVVKRIFREYLEGESLAGICKSLMKDGIYTAAGNPKWRPETVQKILQNEKYMGDALLQKTYTVDFLTKKRVKNEGIVPQYYVENNHEAIIPRELYLQVQEEMKRRSLLFKGKDGKRRIYSSKYALSSITFCSDCGDIYRRTYWNNRGKKSTVWRCVTRLEEGPKGCTSRTISEEDLHAAVAEAFNQVLGGGESMIAVLRENIESVVCESNEQAIANIDKQMEEKQMELISYANSGKDYEKLADEIQALSERKQAILTAEAESQGEKDRIIEMMDFIENHADQSLDYAEELVRLLVEKVTVFESNVVVRFKSGIEVEI

SEQ ID NO: 24888 - protein, 519 aa, synthetic construct
MKKIFKVDNVAATSKRKLRVAAYARVSTDSDEQLVSLKAQKEHYESFIRLNPEWDFAGLYYDEGLSATKKDNRNGLMDMIKDAEQGKIDLILTKSISRFARNTTDCLEMVRRLIDVGVFIQFEKENINTGSMESELMLSILSGLAESESVSISQNIKWSVQKRFINGTFIISYPPYGYINADGKMEVVPEEAEIVRTIFKECINGKGAFLIAKELNERGIPSKRGTIWHPSTVQGVLKNEKYTGDVIFQKTYTDSNFNRHINYGEENQYLLENHHEAIISHEDFEKAQLIMEQRGKEKGVSKKEGKYQKRYAFSGKITCGECGSRFKRRIHYSGKNEYIAWCCTKHIEHTVKCSMKFIKDEDIKVAFVTMLNKLVFSCDMLLKPFMQGLRNIDEKAYLKKITEIEDSIEKNENQRNVLMELMSKGLLNPGLFTKQNTELLSEFARLATEKKHIFFAVSGNASKIDESQRLIRFCSRNRMALKFNDNVFEDFIDEIVVNSREEIVFKLKCGLSLKERLVE

SEQ ID NO: 24889 - protein, 453 aa, synthetic construct
MECVAYMRVSTEKQAEEGNGLDSQKRDIELFCRKNELVVADWYVDDGYTGANMDRPELQRLINDCIKKRVKCVVAFKLDRLSRSMIDGLYIIERVFQPNQVLFKCVHDSVSYDSPMEQAYTQMMAVFAQLDKNTMMLRMRGGMLERIKQGYWIGGANTPYCYNYSKEKGILIPIPERKEQANRALDMFIGGYSDLYIKESLGFHSEVLVRNVLTGVVNIGMIPYKGNVYQGLHEPIFDKERFELAQEIRKSRRKNKTACHTDANLLTGLCYCGVCGCKMRYQKWTHGKHKIYCCSRDKAMKYLPNFNPDCNNSLEWAADIEKEVESEILKISLNLSECKPIEKQSKLEIMQSQFEKEQVKLKRLYVLYSDGNDTVLEMIKNTEKNISEMKVKITEEEKNERNSQKKEVVYENIKKLADVWAHIDKKEKNNILKSIISRIVIVNGDVEIQLKNF

SEQ ID NO: 24890 - protein, 465 aa, synthetic construct
MKGNAGDTIVKKIDLSPELVRVALYIRVSGEEQKIKGLSLEAQQERLEAYARERGWVIVGIYIDAAKTARKNIHKRTDFQRMMDSVKRDEVDILLFCRLDRWFRSVADYYKIMEVLEAHNCDWKTTDEEYDTTTANGRLYINVKLSIAQNEADIDGERIDVVFDSKIAHGTVVSGSAPFGFRVNEGKRLEVVPEDAAIVQDAFNYFETSISQRATVRYIRETYGVNWCDATFRRMLKEKLYTGVYDRGGRFNDHFCPAIISKQQFDRVQALLERNARSVPSGKVYIFTSILACAECGHKLVGYKSSDYYYYRCNQHFQRGRCSHNHSAREDVVEKWLFEHLAEELERCQLEWEVAAAKKKASVARTDKAALKRKLTKLKELYVNDLIDIEDYKRDYQIYTAALKQIPEPSIEPPPDFAAVRRLLDNDFKTIYENLTREEKRTLWRSVIKEIRIDNDQNITGVVFG

SEQ ID NO: 24891 - protein, 523 aa, synthetic construct
MAKVTTIPATISRFTAAPINEKKKRRTAAYARVSTDSEEQLTSYEAQVDYYTNYIKGRDDWEFVTVYTDEGITGTNTKHRDGFNRMVQDALDGKIDLIVTKSVSRFARNTVDSLTTVRKLKEKGVEIYFEKENIWTLDSKGELLITIMSSLAQEESRSISENCTWGQRKRFADGKVTVPFKRFLGYDRGPNGNLVLNHDEAVTVRRIYSMFLQGMSPYGIATHLTADGIKSPGGKDKWNAGAVRSILTNEKYKGDALLQKSYTVDFLTKKKKVNEGEIPQYYVEGNHEAIISPDVFEQVQRELERRKADKGRHSSVHLFSGKIKCGQCGEWYGSKVWHANSKYRRVIWQCNHKFDGDEKCSTPHLTEEDIKTMFVSAVNQLIGQKEAIITALMASLDAAFDFTNLKVEQTELESEMAIISDLIEKCIYENAHVAIDQGEYQKRYDGLTARFNAAKARFNAVDDAIHSKQSRRATIEAFLATLAEANLVDKFDTALWCGLVDFVTVYSADDVRVTFKNGMEITI

SEQ ID NO: 24892 - protein, 587 aa, synthetic construct
MRKINKIEPKVSHMPIRKRVAAYARVSMESERLQHSLSAQVSYYSGLIQKNPAWEYVGVYADDGVTGTKAEARVEFNRMLIDCEAGKIDIILTKSISRFARNTVDLLSTVRHLKELGISVQFEKEHIDSLSEDGELMLTLLASFAQEEVRSLSDNVKWGTRKRFEKGIPNGKFQIYGYRWDGDHLVIEPEEAKIVKLIYDNFLNGLSAETTEKQLAEMGVKSYKGQHFGNTSIRQILGNITYTGNLLFQKEYVVDPISKKSKINRGELPQYWVENTHEAIIPMEVYQAVQAEKARRRELGALANWSINTTCFTSKIKCGCCGKSYQRSNRKGRKDPNANYTIWVCGTRRKSGNAHCRNKDIPEAMLKQACADVLGLEKFDESVFSEQIERIEVPAPNEMLFYFKDGHTVPHHWESTLRKDCWTDERRAAKGRYVQARQLGPNSSCFTSRIRCDCCDENYRRQRSKHKDGSFEAVWRCASSGKCDNPSIKEETLAELCAKAMGMTFFDEASFRELIACIHITAPFRLSVHFFDGHTFDAQWENKRKMPRHSEERKQHMREVMIEKWRERHGESYDHSGNDQSVHSCTD

SEQ ID NO: 24893 - protein, 519 aa, synthetic construct
MKKVTKIDKIQPAKNAEDKLRVAAYCRVSTATDAQLESLEAQKSHYENYINSRDDWCFAGVYYDGGITGTKASKRPELMRLLADCKAKKIDFVITKSISRFSRNTMDCLEIVRTLLNLNIPVYFEKENINTGSMESELFLSVLSTMAEGESASISSNNRWSIKKRFENGTYRLSSAPYGYKLESGGLQVVSEQADIVKRIFRELLSGKGMYSIAKELNAEQVPTQKGGRWTSTSVHNILTNEKYTGDCIFQKTYADNNFNRHINNGELNRYLIQNHHEAIISHEDFKVAAALIEQRAAEKGIESGSDKYQKRYAFSEKLICGECGNTFRRRIHKGKYNSYVAWVCNTHLSDTNRCSMLFVRDDALKLAFATMLNKLIFSYRLLLKPYLAVMQSNTADEALLRIQYLENQLDQNAEQRSTLYKLMAQGYIDQILYTQESNELLLQARDFRSEIEVLNNTVAGDTTKVYETERLINYCKRGEMLTDFNESLFELFVDHILIYSRQKIGFVLRCGLTFEEMI

SEQ ID NO: 24894 - protein, 521 aa, synthetic construct
MGNVMIIPAKRQVGNTSRRQEDKPKLRVAAYCRVSTDSDEQASSYETQVEHYTEYIKKNPEWEFAGIYADDGISGTNTKKREEFNRMIEACKAGEIDMIITKSISRFARNTLDCLKYIRMLKDKNIPVFFEKESINTMDAKGEVLLTIMASLAQQESQSLSQNVKMGLQFRYQNGQVQVNHNHFLGYTKDREGNLVIDPEQAEVVKRIYREYLEGSSMDKIAKGLEKDGILTGAGKKKWWTSTINKILRNEKYIGDALLQKTYTTDFLNKTRVKNNGIVPQYYVENNHEAIIPKDIFLRVQEELVRRRVVKTSANGKKRSYSCNHCFAQLVICGECGEMFRRIHWNNRGCKSIVWRCLSRLEATGMECHARTVNETVLENVVVQAINTLLGDKSTYQAQLQQNIAKVIREAQKNNTDGIDEQLMELQKELLKKANNKEAYDEIAKQIFKLREQRQQCTVDTAARDAQIARITDLQDFIKQQRTDLAEFDETLVKRWLKQITVWEDHFTVELKSGLNIDIEG

SEQ ID NO: 24895 - protein, 516 aa, synthetic construct
MSYCIYLRKSRKDLEAEQHGEGETLARHERALLSLAKKNNLIISNIYREVVSGETIAARPVMQQLLHEVEQNLWDGVLVMEVERLARGDTIDQGVVQRAFQYSNTLIITPSKTYDPANEFDEEYFEFGLFMSRREYKTIKRRMQNGRYAAISEGKWPYNSAPYGFRRVKLEKEKGWTLAFDESEAPVVRLIFSMFTGPERVGIRSITRTLNSYGTKPRNSKLWSESTVRGILSNVVYDQCVKIGERKVVRTVENGVLTTTRPRTSDYTIVSGRHPRLIDHDVFAEAQSYLGCGSPKPAGSNIIKNPLAGIIVCSECKKKMIRRPPSGTASRVPYDLMLCSTYDCPTIGSPLDLVEREVYNALSDWVEGYRLSGQMPSKSLIPEKEVLLESAQQTLDQLLRQKGTMYDLLEQGVYSTEVFLERSDSLQNRISDAESNVAQLKLELDKERQREANIEQFLPACEDLLSCYWDLSIPERNRLLKLLIESIEYKKLTKNKRGHLNEPNFELTIKPRIPRK

SEQ ID NO: 24896 - protein, 538 aa, synthetic construct
MVKKVTVIKAAKAQKHTQEERRLKVCGYARVSTGSQAQATSYTAQVEYYTEKIESNPLWEFAGVYADEGISGTNVKHRDEFQMMISDCEDGNIDLILTKSITRFARNTVECIQTIRKLKEIGVGIYFEKENINTLSEKSELFITILASVAQGESENISSNNRWAIQKRFQDGTYIISTPAYGYGKDEDGNLVIIESEAETVRWIYESYLNGMGVYVIAKALNQKGIPTIRGAEKWQDGVIQDILKNPIYEGDMLQQRTYTETRFPFVRRVNNGQRNQYLIKGSHPPIVTHEEAEAVRNLMAYRVDVLHMNKSDYTKRYLFSGRIICGECGRTFRRQKIYIGKPYEKIIWTCSGHVEDKESCCMKAIREDVLHRAFTDMWNKLYTNQGTILEPLLKELTELVAARQDSEEIRQLDREIKDISAQSQILNQVMRKGYMDSALFMESSNKLGWQLTECRRKKTLLTRKLRRTKEIVRTEQLIQLIAEQDGLREEFDEQLFKMTAEKIVVSKEHDITFCLHNGLKLTERGGGQDAVAHANRL

SEQ ID NO: 24897 - protein, 544 aa, synthetic construct
MAETAKKISMIPAKVQYDRNVKLSEKKMKVAAYCRVSTELEEQDSSYEAQVEYYTSKISENENWKNAGIYADDGKSGTNTKKRADFNAMIQDALAGKIDMILTKSVSRFARNTVDSLVTIRKLKEKNVAVVFEKEGINTLEGTGEILITILSSLAQEESRNISENIRWGVVRKFEKGKVIVNCTKFMGYTKNEDGDLVIVPEEAEIVKLIFRLYLEGYSTGKIAKHLEEQGIKTATGQDKWHSTVIDKMLRNEKYMGDALLQKTYTVDFMTKKKVKNTGIVPQYYVEDDHEAIIPKELFYRVQEEMMRRASLCKAAVTRKKNQKSRYSSTYALTGMLICGKCGQEYRRVTWARNGKKKVVWRCSNRLTNGVKKCGESETLEENALNRAVMEAIHRITSDDMEFMENFRQNIIHVIGNYSIAKESEEYEEKIKEKQEEMVALIAENAKTGSYTPEFDERYRTIAEEINALKEAQKTARNEKRMADSYEQRIQDIDHYLSTSTCQIPEFDNDLVRRLISTIKVESSEKLLIQFQSGIVMEQEIRYE

SEQ ID NO: 24898 - protein, 441 aa, synthetic construct
MKRAAIYVRVSTKEQKEKGLSVDSQLLALREYCNNNGYTIAGEYNDAGISARKKYINRPALLQLISDCKEGKIDIILFTKLDRWFRSVADYYQVQTLLDSYKVPWRAIWEDYETETSTGLFKVNIMLSVSQNEADKTSERTKEAVKYRRLRGDFVGGKCPRGYRRENKKLVFDEKTYDAINAMFRTYLSCFSIAKATEAVAEYGLHIATSQICRMLKSPAYAGNASGSECPAYITWDEHLLILTNSTKRNRTPKRSDRVYLFSGLCRCGYCGGRMVARVNRWVKNGQHLYYPFYSCAAHNDKRNLDCPGVNLAETKIEAYLMEHLEAELKMCQSEFELEQENKTLYKNKITALEQKLKRIGVRYEDGDICFEEYKDKRFAIKNEIAGYKDKIDNARSVPSPPDNWKDLYNSLTPDNKRGFWLNILKEIDITKEGINIVFPV

SEQ ID NO: 24899 - protein, 539 aa, synthetic construct
MARAAKQDNNSEIIDGVIYARYSEGPNQTEASIEGQVRECKEYAKRNGIRIINVYSDSKHTGTNDNRAEFQKMLRDSRRGGFSVVVVWKIDRFGRNRAEMAQNKALLKLQGVKVVSAKEYIPDSPEGIILESVLEGMAEYYSANLSQNIKRGMKENALHCKSNGSGKSLGYIVDKDGYFEIEPNEATIVKTIFQKYDEGMKIADIWREIVASGAKTKRGKDFTQYGISRVLSNRAYIGEYRYGDIVTPGGMPRIIDDDLFNRVQERRALSKKAPASRRSNSDVDFLLTGKVFCGHCKGTMRGMSGTSKTGRKFYYYACHDKIFKHNKCTKKNVKKEWLETEVTRITRDDILNKETIEFIADRVVEIQRQEQEDKSMLRYYEQQLRDTQSAINNIMKAIEAGIITSSTKSRLFELEEQKSIIEGEIEREKIITPVIEKEQVIFSLERFFGGDINNKEYQRNIIDMFVNKVILYDNKIIITYNISSQNEISVDVVEQAAFAALDECSSKLSLPPPAGACPCTQFRFTLCKAVFLLPLINFI

SEQ ID NO: 24900 - protein, 536 aa, synthetic construct
MPRKKKLQEVGGLRLVAYYRYSNGGQQTEQSIEGQRRDCEAYAKAHGYKIVHEYIDRHISGKSDSRPAFQQMISDSDSHLFDAVICWKTDRLARSRYDSIIYKTRLRRNGVKILYAAETVVDGPEGIIIEGLMESLAEYYSAELAQKLRRGQRESALKCIALGGNRSFGYDIGPDKHYCINEKQAPAVRYIFEQYAAGATAADIVRELTARGYRTSRGNPFNKNSICRIITNEMYLGVYKYADIRIEGGVPAMIDRELFNRCQTQLAFNRAHGGGKGAPRADYVLVGKLDCGLCGHAMKGASATGHTGSKHYYYTCTQHVEKKCPKTSIEKNYLEQVIVDGVAKYVLTPEKISQIVDCMMELQAKEQEPKDNPEKDALEAELAECRRKQNNILEAIEEGGSARLAARLRALEEQEAQLTFALGEINNAPAPPQFSREALTFMFEQFRREEDEVDEEYRRRILDTFVSSILLYEDRAEVKFNITDQKTGDFERVILPISVNKKPPEDDDITSNSGGSTALRLVEAMGVEPMSEKSSV

SEQ ID NO: 24901 - protein, 503 aa, synthetic construct
MEITVEKVDTGVQKLGFQALSTLKTVRVAVYARVSTDQEIQLHSLEEQMKAFRAKIAQHPGWMLVDVYADEGISGTSVKKRKEFLRMMEDCEAGKVDYIMAKSISRFARNTVECLSYVRHLQSIGVQLYFEKEGLDTATSVSELILTVMAAFAQEESRSISENLKWGIRKRFESGESRWTKTYGYRKTKDGEIVIEPDEAAIVRMIFKMYQYGIPMTDILDELTFIQAPSARGKQTWNKTALKYLLENEKYIGDMRLQKWVSVDHISHRSVRNDSTVIPVYNVRNHHVPIIDRHTYQQVQRIMELKSPHGEYSRYPYFDTNIVCPLCGKKMIPRVMKVNSHKRILGCFDVDGCRGYAVKGYLVDAALLEAYNTLEIKEKKRTVAMQRMLEIKAESPKLDTVQYYWLDDLVGHIEFKQDTMRVFWKCGLESEVALNASKVEEPTHVAELYRNSLDRAQRSENKPVSMVRADKKSVNTREAQRNAAMQTAKNLRAKENGVAANDY

SEQ ID NO: 24902 - protein, 514 aa, synthetic construct
MAKRKFNKGGEVRLVAYYRYSGGSGQTEQSIEGQRRDCEAYARLHNMTIQKEYVDRHISGKTDDRAAFQQMIADSDKGAFDMVICWKTDRFARNRYDSAVYKKRLRDNGVEIVYAAESNISGAEGIIIEGVMEALAEYYSAELAEKMRRGMRESALKGQAISRCRALGLKTDEHKRFVIDEKTAPTVRFIFEHYAAGESAMSIVEQLNAKGLRTSQGNPFNKSSIPRIIQNEAYRGVYVSKSYDVRIEGAIPAIIDDELWERAQTMLKLNRQLKAKNEPKADYILSGKLYCSCGSLMRGMSGHSATGEVYRYYTCPNKDCHLRNIPKDDLEGKVMQSIVDHLLQPESMEALAEAMVEVQKADVEKPNAERVAIEQSLADVRRRSKNILDAIENGTANAQLCARLDDLTEQEQTLSFQLSSLEKEKPVVFTKEQYLFLLEQFLMEPSERTPEYGRRLVNTFVTSMVVSGRELVINFNVSDETVNKNKKTSQTNLQKESSSGMRLVRVARIELTAS

SEQ ID NO: 24903 - protein, 564 aa, synthetic construct
MKITKFPIDLSMLTEEEIDQFRQDPSTLFEGDTDVCLYLRFSSERQREQSIEGQLRDCRTFCKLNSYRITAIYVDRATTARKDVEKRVHFQEMIRDSEKKPWEYVVVWKLDRFARNRTDSALFKFRLRKNGVKVISATENISEKPEGIILEAVLEGMAEFYSADLSQKITRGMRESALKCHSIGGHVPLGYKIEDHKLVINPATAHIVQEAFELYANGETVADICRIFNTKGYRTAKGVEFNRNSFKSMFRNKRYIGVYTYKDIEVEGGVPAIIDKELFETVGHRLSKNAEAPARGKAKVDYLLAGKLFCGHCGGSMNGESGTSKTGAIHNYYTCYTRKRKHACDKKPLKKDWIEYIVAQDAMELLTDDTIQELADMAISQTEQDLRENTRIPELTDRMKETESGITNITKAIEKGIASDALMNRLVELEKEKKNLLRLLAEEEKYVCKIERSQIVYWLTEFKGGRIEDERYRRIIIDLMINSVTVWDEPDGFRITTAYNLTSCKSKTFRIAPSSGKGFGFEGSESTRKERHDESRVFLFVFNPLMWVPVIMTHPGYHVLGQKL

SEQ ID NO: 24904 - protein, 493 aa, synthetic construct
MGQKCVIYTRYSSDRQREESIEGQIRVCEDYAKRNGLEVLHIYADRAMTGRSDQRPEFLTMIRDAASLTFDTVLVYKLNRFARNRYDSAKYKHKLKKYGVKVVSAMENIADDPSGILLESVIEGMAEYYSVELAENVVRGMTENALEGKWPGGIVPLGYKLDDDHHLVIDEPNALVVRRIYQMILDGRTPASICRILNAEGKRTATGSAFNHNSITRLLSNERYIGTFSWRDVRRTGVVPRILDDRTFYAVQELRKSRKRHKGVAKRSENYMLTGKVFCGQCGSPMVGKSGTSKGGCVYYYYNCQHHIDGSGCPARPVRTDKLEDQVVQVTTKILSQPDAIKAIARQAIAIQKERRESLEVQSLKAQVTDLSKKLDNCLKAIDNGAFSEALCNHMREYESRLRDLKAALSRAQLMDRGGKLTEQQIEFFFFAISRQLKQENRYKEILLSSLVRCVIVNDDSIEIQYNYKKELPTLANPVKVKSSHKAVMVTPE

SEQ ID NO: 24905 - protein, 456 aa, synthetic construct
MYKKELAPDLVRVALYIRVSGEEQKIKGLSLEAQQERLEAYARERGWVIVGIYIDAAKTARKNIHKRTEFQRMMDSVKRDEVDILLFARLDRWFRSVADYYKVMEVLQAHNCDWKTTDEEYDTTTANGRLYINVKLSIAQNEADIDGERIDVVFDSKIAHGTVVSGSAPFGFRVNEEKRLEVVPEDAAIVQDAFNYFENTVSQRATVRYVRETYGVNWCDATFRRMLKEKLYTGVYDRGGRYNDQFCPAIIDRQQFDRVQALLTRNVRSAPSGKVYIFTSILTCAECGHKLVGYKSSDYYYYRCNQHFQRGRCSHNHSAREDVVEQWLFEHLVEELERCQLEWDVEAAKKKASVARTDKAALKRKLTKLKELYVNDLIDIEDYKKDYQIYVSALNQIPEPAQEAPPDFAAVRRLLDNSFRTIYDTLTREEKRTLWRSVIKEIRIDNDQNITGVVFG

SEQ ID NO: 24906 - protein, 590 aa, synthetic construct
MSVSVTLNTQKPDTTTNAVIYARYSSHGQTEQSIEGQLAKGHEYAAARGYTIVHEYIDRAITGRNDNREAFQKMLSDTGKHQFQVIIVWKVDRFGRNREEIAFNKHTCKKNGVRVEYVAESLPNSPEAVILESVLEGMAEYYSIQLSQNIRRGQLESAKKCQCVGGSVPLGYTLDSDKHFVIDPQTAPVVKKIFDLYAEGATISEITGQLNEQGIRTIRKQLFTKNSLTKLLKNEKYIGVYTYKDIVRVEGGVPAIVDKSTFDRVQELLKINRRAPSHTWTKVEYLLTDKLFCGHCGSPMVGESGFSHTGAKYSYYGCIKRRREKACDKKPVRQDWIEALVLDETVKLLHDDELMEYIIDRTWEYYQVTDKVQEEKAVLEAQLAEVDKAINNLVRAIEAGIFNAATKSRMDELDAQKAALTTSLADLELTSGIRITRDHIEYFLLRLRDLDVKDRECQKRLVQTFVNAVFVYDDGRVKITYNYSGQSSTITLNQIASAEKGKGFVCCLPCSTLTAISGRKSRHFLFFGENRTQIYYQFQLFCATMEAKTAEGGRKNEKAACCVPDGACLLGLCGVRRRNAGRRYGHFRAI

SEQ ID NO: 24907 - protein, 430 aa, synthetic construct
MKKIVKDITPELRANDTIKRVAVYARVSCEKDTMVHSLKAQIDYYRKFIMKNPGWKFAGIYADEGKTGTKEAREQFQALLTECRNGNVDIIITKSISRFARNTVTLLSITRELKELGINVYFEDQKMDSMSSDGQLMLTLMAGIAQAESKDCSDAVKWRIRHGYEQGRASSFKILGYRWDDGNVVMVPEEAPLVKRIFDLYLSGKGANAISKILNSEGTTGAGITKWAPTTIRNVLMNEKYYGDLLLQKSFVEDHINKRKVINNGELPQYFIEDDHEAIIDRQAMSDVKNEIAIRRARFYHGQGKESCLTSKIKCPYCHANYHRKKINGISKWSCATSNRKGKSMCPKSKDIREDVLLAILAHQLGYKDFDEKLFAEQVDYIECFDDHIITHFYDGSIKNSKWSNPSRKDSWTDDMKEKARQRGLNQYGK

SEQ ID NO: 24908 - protein, 597 aa, synthetic construct
MANKVVKVIPARPQGIIIDQAGVIKRKRVAAYARVSTEKDEQTNSYEAQVNYYTNYIQANPEWVFVGIYSDAGITGTSTKKREGFKRMIDDAMNGKIDLILTKSVSRFARNTVDSLVNVRKLREKGVEVYFEKENIYTLDTKGELLLTILSSLAESESVSISQNTTWGQRKRFADGKVSFAYSNFLGYDMGQDGKLHINEEQAKVVKRIYEEYLLGYTPSYIAKRLTADNIPTPQRKKVWYQGVIDSILTNEKYIGDSILQKTFSTDVLTKKRKKNEGELPQYYIENNHPAIITDEIFEMVKEEMARRKSAGLMTNVSCFSGRILCGDCGGYFGRKVWHSNQPNRTIVWQCNKKFSNPDACGTTSIKEKAIEEAFVRAFNEMFSRKDEIIENYKLCIDVICDDSKFQERKNELDKALEEKTIVIKDFLLKCSKTEENIEESNARYDVLINEFEALNAERQKCLDMISSLAAKRVKINSFLNILNSTEGVINSFNEVLFQKSVNHMVINHDLTIDVIWRDESKTTTYIERGVKEVKKSAPRIKPEKVLSDHTCLCCGKQLYITPGKVQRIFCNKKCGETYRRAKAKEARLENNTISHA

SEQ ID NO: 24909 - protein, 490 aa, synthetic construct
MKAALYTRVSTDEQAEHGFSLEAQKKRLIEYCNKNNIEIYKLYSDEGISGHSIIKRKALQEMLQDAKEHKFNYVIAYKTDRISRNLLDLLTIKNQLDEADVELLLSDEAIDTKDDAGMTMFSIMGAFAELERKKITERMMAGKRQKLMNEHIKLKNGRVPYGYLYDDENKRYVIDESRRSIVELIYKLASQGWSYNKITRHIAEETAANSSDSKKKWYISDIRAILTNPIYKGYSGISYYYNFNDRAKKPKNSAILYKATNVEPYFTEEYWDTLYSQLEKKTQYFKRKHPIDSYIFSDVLFCATCGLKIGTRQHHANYLYYVCNSKHKMYDNDHICDYAININKFNNWFIEFIRGIDENNIKLSVSKPKDLDRELQAVRSQISIKEKNWEVLLDKLMNGVIDDTEYRLASNMVIASLNSLKSQEKELSDKMDSLKEKEQTKRYNRLKIKALKVLVNDWDNLTDQAKKTLINSSINKIMITKDGIQEIEFN

SEQ ID NO: 24910 - protein, 530 aa, synthetic construct
MAKKKKPAGGVAIIYARYSSHNQRDVSIEQQIEACRKHAAELGLTIIATYEDRAISGRTDNRPAFQRMMHDAENGKFSYVLAWKSNRMGRNMMQAMVNESRLMDCGIKVYYAEEDFDDSAAGRFALRSMMNVNQFYSDNLAEDVRRGLMDNASKCMANGKQPLGYKRGEDGKVVVDEPAAAIVREVYTRVASGELFTDIARDLNRRGIKTADKGEWNKNSFHRLCSNEKYRGIYIYGDVRIEGGIPAIIDDTLWYKVQEALRVKKLKRNGRHRPGDEDYLLTGKLRCGKCGGYMIGMSGRSKTGEIHYYYTCQNRRVGHTCDKKNIRRDVIEPAVAQAIKEYCLTDDAIEWIADKTVEYWEKADRNLQLDSIEGDLAAVQSSISNVMKAIEMGVVTETTRDRLIELEKQRTDLKSKLALAKEEVVHVDRKKLISSLLLFRNGDIHDRQYQEDLFKTFLISAYVYDDDDNGHLKIVFNAFGDNNTVDFPIDFGEADNQSAFFDGAEKFDYALHRSTRLKPSEEAQVAFLFV

SEQ ID NO: 24911 - protein, 497 aa, synthetic construct
MTAVIYARYSSDNQREESIEGQIRECTAYAEKNGITVIKHYIDRALSAKTDNRPDFQQMIKDSEKRLFDIVLVWKLDRFARNRYDSAHYEYLLERNHVKLVSATEPISDSPAGIMVKSMLTGMAEYYSAELSEKVVRGMTENVLKGKYNGGTIPIGFKVDEEKFFQVDPLKAPFVVEAFQRYNEGATMKELMNWLNDSGVTTNRNQKFTYNSVQTLLTNKRYIGENHFKDIVMPDSIPAIVDKDLFEEVQQKIKKNSRAPARHKAEDDYLLTTKLFCGMCGAMMFGECGTGRNKVVHHYYKCATAKRFKTCKKKTVRKEWLEDLVIAETMKLIQDDAVIDAIVAEVMELQDQENTTLPFLEKQMREVENGIENMLNAIQAGVLTNSTKSRLEKLEAQQKELEIRIAEEKIARPRLSENQVRFWLTRFRKLDPNVKSHRETLINTFVNAVYLYDEKVLIAFNYKDGTKTITFDEIAAKDAPVGNGSDLGCFAPPKKNA

SEQ ID NO: 24912 - protein, 461 aa, synthetic construct
MRKDVKRVAIYIRVSTYEQAQEGYSIDEQKERLVQYCKAMGWVVSELYIDPGFSGSNLERPGLQKLISEIKAYDSVLVYKLDRISRSQKDTMYLIEDVFLKNDVDFVSMSESFDTSTPFGRAAVGLLATFAQLERENIKERMTMGMKGRARKGYWKGTSRPPIGYDYKEGNLEVNDYEAMQIRELFTIAANGIPNMPYNVKNMARYLSQKYSNKYGNWSDSTGITYTIQNKVYIGMVKYKDEYFPGNHMPLIDNELFEKANNRLNTYLSTFGEHTTYTKYMLSGLTVCGTCGLPYYRRNSQTKIGGIKKEYGYYSCQGRKIDMPNRCQSKIYRQEALEDKVITQIESLKYKDYSTGNGKNDTASLLQELKQIDSRQERLIDLYSLGSVSREQIDDKIRELNQQREKVKVLLSAQNTLKSEEIIKMSTCIRNVDYATQCDIAGMLIEKVVVEGENIRVYWNF

SEQ ID NO: 24913 - protein, 529 aa, synthetic construct
MTRCVVYSRFSSNNQREESIDAQLRASEEFASKKGYELVGHYSDKARSGTNSSKRSEFLRMIKDAEKGLFDVVIVHKLDRFSRDKYDSALYKRKLKQCGVRLVSVTEQLDDSPESVILESVIEGMAEYYSKNLARETMKGLKENAYQCKHTGGMPPLGYDVNSEKKYIINEREAESVRLIFEMYTTGYSQSKMVNELNERGFKTKLGTVFRANSIHSILTNEKYTGVYVYNKSAKKDAFGKRNSHAYKDESEIIRIEGGMPQIISKETFEKAQEVLKARRRAPGTNKAKENYLLAGLIRCGCCGRHYQGNRRQGKNKPMYVSYRCSYRRLTSSKVCDNKEIRKEYIEEYVLSELERKIFNDKAIPHLVEGINKNIQKKNKVEEEKKEVIKKEIKEIEAQINKIVTAIASGFMQEEFKNKMDELKGRKSELEFKLSELKSDEITQLVNEKDVRNLLNNFSGYVISRNIPECKKFVQDFVKEVIVYKEHIEVIFNVSFSLFKNNHGVEVKSKINRYVLYERYSNSFYIKVS

SEQ ID NO: 24914 - protein, 479 aa, synthetic construct
MPKVAIYARVSTLNQAEEGYSIEGQLASLRKYCSALDWQIYQEYVDPGFSGGSLNRPAIQKLIVDAKSHRFDIVLIYKLDRLSRSVQDTLYLVKDIFDKNKISFVSLNEKIDTSSPMGNLFLTLLASIAEFEREQIKERMMMGKVGRAKSGKAMGWSKVPFGYTYDKQTGIYQINTLQAQIVKRIYRDYLDGVSITKLVDLLNAEGHITKDRPWTYRTVRQALDNVVYTGRQFYQGNVYPGQHEAIISIEDYDKTQAELKRRQLTNAQKFNPRPFRAKYMLSGLLYCSVCGSSMMVQTRYLKYADDYHYYRCVSSIRKRIRFSYRQDTELCQNRSNYLKDDLESAIIKTIRHLQLHPDQMPVDTVKFDDKPLKDELNRINDKLNKLVDLYLNSNGISIGIINQKREELLQQKEALENKLQERKPKQPELDPKKALLLLSKKNILELPYEEQVKLVKSLISKIEVSPSKMKIHWRFNVEK

SEQ ID NO: 24915 - protein, 538 aa, synthetic construct
MSTAPNVTIIPAKIQTAENRDKYHQLKVAAYCRVSTEQEEQQNSYQVQIAYYTDLINRKKEWTLAGIFAVEGISGTQTKKRTEFNRMIRMCKNKKIDLVITKSISRFARNTVDCLEYVRQLKDLGIGVIFEKENINTLTMTSEFMIALYGSFAQAESESISKNVSWGKEKAYREGKVQFQYKYLLGYKKGEDGKPEIVPEEAETVRLIYTLFLDGYSMSRIKKLLENKGILTSQGKKVWNESLIRSILKNEKYVGDALLQKTFTSDCITHKVVKNHGERPMYLVTDHHEPIIDRDTYNRVQQELARRSSKRKVSDKTVTEQGKYSSKYALTELLICGHCGTPYRRTTWAARGKKQIVWRCISRLEHGKKYCPDSPTIKEEQLHKAIIYAINNYYSCRNDIARILKTNIGSVLECQGQEEIIAVENRLKEIDRARNELVGLIATGGCDEDKLDSEFEKLYEEEQSLSERLAMLKSKNQTSAETQAKLDKIIDMIEHEKFELETFDNVLIRKLIECVKVLSKTEILVIFKGGYEVRTEIE

SEQ ID NO: 24916 - protein, 514 aa, synthetic construct
MPTVTVIQPIIAAEQNTKIRCAAYCRVSSDSEDQLNSFMAQTRYYSQVFKDSETEELIDIYADEGITGTREDKRDEFQRMLKDCRRGKIDRIYTKSISRFARNTKDCLKSVRELKALGITIFFEKENIDTANMTDEMMITIMGGLAQEESTSISQNMRWSIKKRMENGTFELSCPPYGYIKENGKLVVDPAQAQTVQNIFSWYLSGYGIISIVNRLNHFNTPCCKRSNKWHMFGVTYILTNEKYTGNTMFQKTYSGTTLPIQRYKNNGERNKYYAVNTHPAIVSQDDFDKVQALMSEKGEIFYKTEKQKCVLRKIMKCGQCGSTYIRKKSRDKYYWSCRKHDLKASKCFSKRIPESDIYYAFIRICNKLISNYTQILIPLQTALQYLKLKKFSGQTQVMDIHKEVAKLKEQTHVLARLKTKGFLDEAKYIEQTTELTAKINKLQAELKKLTRSDDEDETLDQIDMLIDFFEKRENPMTEFEETAFESIVEKIVVIDQHELEFHLIGGLKFKENV

SEQ ID NO: 24917 - protein, 499 aa, synthetic construct
MSKAVIYARYSSTNQREESIEGQIRECTDFAKRQDITIVGSYIDRALTGKTDARPQFQKMIADSGKQLFDIVIVYTLDRFARNRYDSATYKAKLKKNGVKVISAKENITDDPSGIILESVLEGMAEYYSVELAQKVLRGMTENALECKWLSGIIPLGYKLDDDKHLIIDDHAAPIVRKIFEMYAAGDRIVDIAKYANSTHLKTAKGNNFSRCSFTHMLKNETYIGTYKWRDIVKTKVIPQFIPDDLFHSVQKRIKSRKETNVRGKSENFLLSSKLKCGKCGQFMTGVSGTSKQKRRYYYYQCYASKSKKCDMPLFPREKLEDIILAETIKLLSEPQTIEFIANTVANLPIDENTQISILETEITEIKNKLKNCIKAIESGLISDTISKNISEYEKKLSVLEKDLSIEKVLNEPFKITPDHVKFFLYNILQIKNADERRDMIISTFVRDIVLTKDDIGYTVKITYNYNENPSTSLDNSVQKGSQKSSLVAPTRIELVISP

SEQ ID NO: 24918 - protein, 411 aa, synthetic construct
MKKRVYTLYRVSTIGQVEKDDIPMQKEACHEFAERQGWEIVKEFSEKGVSGFKKSAKDRDQLQLLQQAAAAGEFDVLLVFMFDRLGRRDDETPFIVEWFTKQGVEVWSVNEGQQRFDSHVDKLMNYIRYWQASGESIKTSIRTRTRIEQLTEEGHYTGGIVAFGYKRVQKGRLNKKNQAVCDLEIDEEEAAIVRLIFQKYVYEGYGAKRICNYLVEHNIMGRNGKNIPNITIGRMIRNKGYTGYLINGNVEKECPELRIIEPEVFEKAQELRDARRREKGEDADSYSPHALLCGKVFCAHCGNRLNITSSGRTRLRADGTVVKEKRYRYSCNFNVRHPGQCDGQSGYGVTTLDAVVESIVCMKFEEILECSKSNLLEEMRRKDLDVAKKETTRWKEEVQTKVDEQDALKKK

SEQ ID NO: 24919 - protein, 465 aa, synthetic construct
MARSITVIPASQPYRVGGRTQQKTRNLRVAAYCRVSTDQEEQLNSFENQVEYYTKYIQDNPLYQMAGIYADEGISGTNTKKREEFKRMIRDCEEGKIDLVITKSISRFARNTQDCLEYSRRLKNLGIGIFFEKEHINTLDASGELLFTILSSLAQDESRNISENCKWGIRSKFKKGIPQVDCTKFLGYDKGEDGKLIVNQEQAKIVKRIYREFLNGYNPAAIAKMLMEDHIKTGTGREEWRSASVRAILKNEKYMGDALLQKTYTADFLTKKVKKNHGEVEQFYVKESHEAIIPKEQWEAAQLELERRGSYMQELGLTFYGYGSEVNPFSCRVVCGKCGAVCGKKSWKSRGVEFWQCNNRSKNHGVKGCASENLPHENLLKGFITAWNQIVAEREQYLPKWEKKKKEGNPLERLRAEQMIELTLQPTLTKMLPELGQMVLERVIVYGKEIMVIRFLDGTEIKVRI

SEQ ID NO: 24920 - protein, 498 aa, synthetic construct
MQIEVRKAEMGKEKKRLKVCAYARVSTEASEQENSLENQVSHYTEMIQANPAYEFAGVYADFGISGFKESRPQFLKMMQDAKNGKIDLIITKSVSRFARNTAIVLKASRELKERNVGIFFELQNINTLTEAGELLLTILAAFAQAESESASESSKMAYLHRIENGEVVAYLERSYGYEKDENGEYRAKEPEASVIRKIYDLVIQGVNCTNIARVLNARNIQTVQGAEWTASTVFRIVENEIYKGDVLMQKTFIDGKRHQVQNRGEKAMYYAKDNHPPIVSEKTWEKAQRKLEDMRAERAEHSVIQEFTEENYPYMNHIFCAKCGWPLKPRVYSHGHRLSWDCSGQKRGTKKFCTGIHVLDNDLRKMKIEGNRYFSETVDKYGEVHLKHVGERTWKNKHKKKKFNHKDLYPELNEENYPYYKRLYCARCGSRLGRYISHGTVRWICSSYKRKGQAKCPGVRIPDEIIKEWNLPDGKIYIMGKEDKNGEKHYSYTSESAL

SEQ ID NO: 24921 - protein, 600 aa, synthetic construct
MVDNCARAVFYARVSTQEEEQLKALPKQVEECKDIIASKGWRLINGYVDEGKSGTKKDGRKAYIKLLEDMQEDKFDIIVVKSQDRLQRNTFDWYKFADLLNKNNKRLYLYMDNKFYEPSEDALITGIKAILAEQYSRDLSKKLNNYHEHRIEKARAGEEVPAMGNGQTYGYQLINGKWVVDESQRELVRKMYELYTDLHSVCKVRDALNEQGYRNQRGNLFTDENIGRIVKNVMHKGWVILNRHHKEFDSKETIKKLEDEWVIVKNDHEAIVSEELWDAVNDEIQSHRNKGNSGTRGKRGGTDPLSGKMVCNCCGRVLWKHASQGSYKSKEGRKYTYKRYTQWYCSGKMGRGELACTDPATISGVKLQKYLVEMADMFLDYSTVEYSKNLLKRRTISWLEDLKDKLTTPNDNGKIEQDLKALEGKRGKLIDLYTDELISKEEFKSRSVDLDAEIEKKRALLVPVEENPDIKAIEDTIANIDAEIGALFEDEAMVEEKKVQFIQEHIKKVYVSKNSDVFIVLDNVAGAFLFIDKEDTRIEVVPVAEYNPEELSEEGITENDFVPFDRESMPQHHGPKHLHPSGTQTAPRCCFRDRFSCDQP

SEQ ID NO: 24922 - protein, 497 aa, synthetic construct
MQFVNVAAYARYSTENQDENSIETQFDNIAQYCQAHQYNIVAHYFDKAKSGTNIERADFQEMISAARTGKFSAIVIYDITRGSRDVADWFTFRKQMMQAGVQIISTHDNIGDLLNPNDFLTELIGVGIGQHHVLTSRLKSIDGTTMKAHEAIFLGGCPPLGYDVKDGKYIINESEAKIVRKIFSMYASGESYSNIIDSLNGAIGKKGRPIGKNSLSSILRNDRYIGIYTWNRRKIKIMGKWAGGVPNERIVQIKDAIPRIIDQPTWERVQIRLKSKTNSSSKAAHSYLLTGKIICTECGARYCGRTSVNQRGYQNPYYVCGNKTRTRQCHSKNIKCEDLDNFCRNAVREYILNYDLSETAQRVVTTYNATVSQYTNEKKELAEISRKIKNGTDAILNGFSSEELFQQMGKLQMRQKELEKIIADDAADELDLDLVTKLLKNMLEDVSTNIDEVVKQFVTKIYAHPNGDCTVHLGVAHFTSSGREIRTRYQFSQTRIN

SEQ ID NO: 24923 - protein, 558 aa, synthetic construct
MKKTKVYIYTRVSTSMQIDGYSLDAQKERLTKYAEGNDMVIAGEYSDEGKSGKNIAGRVDFQRMLNDIACKKDGVEYVLVFKLSRFGRNAADTLTSLQFMQDYGVNLISVEDGIDSSKEAGKLMVHVLSAVAEIERENILVQTMEGRKQKAREGKWNGGFAPYGYKLVDGELIIEEDEAEAIRIIFDKFVHTNLGYNGVVNYLNNNGIKKKARQNGYLTQFTTSTVKAILDNPVYYGKIAYGRRKTTKIEGTRNEYHVVPQKEFDVYDGRHKAIVDEQLWKDAQAKRRATASKLEKKHDLDHEHVLSGLVKCPVCGAGLYGNVKRAKRKDGTYYKTYFSYACKHRLNKDGHKCDYHKQWSEEKVDNAVSEIIRKLVNNPRFSEVMKTKINTSVDTSEAEKELANAKKVLKQLIGTKDKIILQIDTLDILDKNYDRKYDDLQKRLDTIYDKIGNAEDLVSETEDKLSNIQKDKITGDNIYNYLLMFDSVYDVLSDMEKKQFYNALLTDIQIYEEEQDKQIIKSIGFKFPVFYDGEFTKRIIRDKEKTVETIVALHRTDM

SEQ ID NO: 24924 - protein, 532 aa, synthetic construct
MATERKKKATEEKVRENITKKASNTTRNTTPKKNSKKKSNNLPLSLPDFQTFLEDDKSLEEFTKFTACYVRVSTDAQAEQGYSIPDQTAKLQAYCTVKSWENVKFYTDPGFSGSNLNRPAIQELISDAMAGRLNAVVVFKLDRLSRSQKDTLYLIEDVFLPNEVDFVSISEALDTSTPFGRAMIGILSVFAQLERENIYLRTRIGMKGRVSAGYWRGGGNVPFGYDYDREKKILVPNADSPKIQQIFDLYIKGYSCQKIADMFGLNNELRVRNILKRHTYCGFINYKGEEYPALHEPLISEETFLVAAAEMDRRSRGSLVASGKNSYHLLTGLVYCGDCGARMRYMKWGKPFKLVCYSHVSKEHMIKDPDCPNMGFVAADIEELVINKLLGIGSSVPLEEFDAKWRSQNTREILEKRIADATLRLKRLYGLYSESADNVIHERIFEVRDQIRLLQEELDNEDKVSLKDNHINYVRERIKNIGGIWPSLTPMERQTLIRDCVDKIILFHDGSVEIYFSFSTEAEEQQCRKKAN

SEQ ID NO: 24925 - protein, 503 aa, synthetic construct
MEITVEKVDTGVQKLGFQALSTLKTVRVAVYARVSTDQEIQLHSLEEQMKAFRAKIAQHPGWMLVDVYADEGISGTSVKKRKEFLRMMEDCEAGKVDYIMAKSISRFARNTVECLSYVRHLQSIGVQLYFEKEGLDTATSVSELILTVMAAFAQEESRSISENLKWGIRKRFENGESRWTKTYGYRKTKDGEIVIEPDEAAIVRMIFKMYQYGITMPDILDELTFMQAPSARGRQTWNKTALKYLLENEKYVGDMRLQKWVSIDHISHKSVKNDSTVIPVYNVKNHHVPIIDRHTYQQVQRIMELKAPHGEYSRYPYFDTNFVCPLCGKKMIPRVMKVSRQKRIIGCFDVDGCRRYAVKAYLVDAALLEAYNTLEIKVKKRTVAMQRMLEIKAESPKMDTVQYYWLDDLVERIEFKQDTMRVFWKCGLESEVALNASKAEEPTHVAEIYRNSLDCAQQNENKSVSVIQASEKRVSTREAQRSVAVQAAKNLRTKKNGAVANDY

SEQ ID NO: 24926 - protein, 404 aa, synthetic construct
MIIKKVMPKIPPAKKRVAAYCRVSTLRNEQDESFETQQKYYEELIQSHPDWELVKVYADRHSATRVKNRPGFQEMAAAAEAKKLDIIICKSISRFSRNMVDCQQYAKWFRTLGVTIIFEEQNIRTDDPTCDFVLSILAAVAQDESHSISENEKAAYASRFARGEYNLGNNRILGYDCVDGELVPNKDAWIVKEVFRRFIEGESYRQIAKGLEELGAQSLHSKKGFGVETLRYMVSNETYVGDKRLQKKAPLDYLTKKPNPNQKVESNYLWDDHEAIIDRETWDKAQEILEKRKELAKVGIHKTNREHHFLYGKVFCGECGAPFLRRTLKAAGGFKTQSTYKAWNCRNRQKGKGNERCGNRFIKEEELIDAILRELEWLNMDQERFEKEVSKVLVYPDHIEVEKN

SEQ ID NO: 24927 - protein, 519 aa, synthetic construct
MKKVIKIEPANAHQPKKRLRVAAYCRVSTASDEQLVSLETQKAHYEEYITSNPEWEFAGLYYDEGISGTKKEKRPALLQMMTDCENGKIDFIVTKSLSRFARNTTDCLELVRRLQELHIPVYFEKENLNTGSMETELFLSVMSSLAESESVSISENSKWGVRHRFENGSFKFSYAPYGYILADGELVIKDDEAEWVRFIFNEALTGKSARQIAATLNEKKVPAKRKGTWTAASVLWILRNERYKGDCLYQKTYTDFRLRRHLNHGEVDQFYEENHHDAIVSREVFEAVGNVISHEQQEKNRSEGNSKYKNRYAFSGKLICGECGASFKRRINITGRLKYPAWVCSVHHKDGSRCSMKYVRESAPETVFTTMMNKLIFGRKEVLQALLDKLTTQSHKSRLSRIDVVERTLNEMQERRRNLTSIMTKGYLDPATFTRESNEIMVETEKLTAERDQLKSEINGELTKTESLRDLIRFTGKSEMLSDFDAGLFERFVDHAVVSSRTELELHLKCGMKVKETIE

SEQ ID NO: 24928 - protein, 454 aa, synthetic construct
MNCVAYMRVSTEKQAEEGNGLDSQKRDIEIYCRKNELIISDWYIDDGYTGANTDRPALQRLITDCSKHRIKCIVAFKLDRLSRSMVDGIYLIERVFMPNQVEFKCVHDSVSYDSPMEQAYTQMMAVFAQLDKNTMLLRMRGGMLERVKKGYWMGGGNTPYCYRYDTESGTLIPIPERAEQARQALEMFINGYSDEQIMKMFGYKSEFVVRRILTGVVNIGMIPYKGEVFQGLHEPIFEKSRFELAQEIRKSRRITRTKCFDRETNLLTGLCYCGVCGCKMRYQKWTHGKHRIYCCSRNKDLNYIPNWSENCDNSLVWAIDIEKQVEKEILKISVNLSKSKPKEKKSKLEIMESQLDKEKVKLKRLYSLYADGNDTVLDMIKDLELKIDGMKMKIAEEAKSPLNTQKKEFVYENIKNLADMWGHIDKAKKNSVLKSIISKIVIVNNDIEIQLKNF

SEQ ID NO: 24929 - protein, 532 aa, synthetic construct
MTTERKKKTTEEKVKRNTTKKASNTTRNTQPKKNSKKKTNNLPLALPDFQTFLESDKPLDEFLKITACYVRVSTDAQAEQGYSIPDQTAKLQAFCTVKGWENVKFYTDPGFSGSNLNRPAMQELIADAMAGRLKAVIVFKLDRLSRSQKDTLYLIEDVFLPNEVDFVSISESLDTSTPFGRAMIGILSVFAQLERENIYLRTRIGMKGRISSGFWRGGGNIPFGYDYDKDKKTLVPNADAPKVQQIFDLYIKGYSCQKIADMLGLCNDMMVRNILKRRTYCGYVNYKEEEYPGVHEPLISEETFDIAAAEYDRRSRAGLNACGANTYYLLAGLVYCGDCEARMRYMKWGKYFKIICYSHTSKASMVKNPDCPNMGFLASDIEELVINKLFGIGSGVPLEEFEVKWHSPNTREIIEKRISDATTKLKRLYGLYSESGDSVIHERIFAVRNQIRTLQQELDNEDKHSIRDSHVSYVRDRIKNVGDIWPHLTPMERQTLIRDCVDKIIIHHDGSVEIFFSFSTFDEDKQCIEDEN

SEQ ID NO: 24930 - protein, 504 aa, synthetic construct
MEDLIYARQSVDKEDSISIESQIELCLREVGNNPHRVFRDKGYSGKNTERPDFQDMMAAVRAGGVRRIIVYRLDRISRSVLDFANVISELQKYGVEFVSITERFDTSTPIGKAMLMIVMVFAQLERETIQQRVIDAYRSRSRKGFYMGGRVPYGFELENTVMEGIKTCMYKPIPEQIQVVQLIFSLYAMPQVSFADVVRYLSQNGIKNPNGKNFSRMRIRDIITNPVYAKADASIFEFFHGQGTEIINDISQFIGTNGAYLYTGNKAAKRKSISLDGHVLVLAPHAGCIDADTWIRCRRKCLNVRQIAKPVKAKNTWLAGKIKCIDCGHALSLKSYPRKRSADARYYICNSKYVSASCDGVGAIQAAGIEDIVFDEMSRKLKEFNKLSYKEKHGDPIELTKLKIRAEEIEKEIATLIDKIVSASTATMEYINERIDALDEEKKTVKEKIAQMSAEMYDRQNIGVISDYMSKWNDISIDDKLTVVDTLIESIHVGHGKVKIAWKI

SEQ ID NO: 24931 - protein, 574 aa, synthetic construct
MRKKKIDAPKEKPQRAAIYLRVSTAYQVDRDSLPMQRKDLVGYCEYALNISDYTIFEDAGYSGKNTDRPAFQKMMMQIRNGMYSHLLVWKIDRISRNLLDFAQMYEELKMLGVTFISRNEQFDTSTAMGEAMLKMVLIFAELERKTTAERVTATMISRANDGTWNGGRVPFGYDYNKETQTFSVNGDESFIVLEMYDLYEKTDSLVHTARELNERGYVSRQHNPFSPVSVWTILRNPWYIGTYRYNYYKIPGRKAIKDESEWVVIPDHHTPLVSKERFDRVQKMLDSNARYRNTPGRSATQKNVNIFSGLIWCACCGAAFTASPGKLHASGYRSAKYGCPNVRKTKTCNAKYTSDTVLGEFLLNFILNVTNAQKSFDQIKSPADLESRLLRGDTFKNVAGIDSASVAALYEMLVEYSPADSVLLKKPTVKKNLDPELRKLRADKRKTERALTRLDHIYLYSNKQMSDKEYLIKKNDLMNDLKEQDKSIGLLTSESWAQSLSDDDFLEQASSFIMSQRLQECEYIYFQGLAECTEPSVLRSFFLSIVDSVRMRNGHVEMLTFKNGISHKFTYKAI

SEQ ID NO: 24932 - protein, 560 aa, synthetic construct
MYHQSNTAAALQFPYNAMSVEAVTALYCRLSRDDELQGDSNSIINQKKILQRYALDHGYKNYRFYIDDGISGTTFNRPGFQQMIADIEAGLVKRVIIKDMSRLGRDYLQVGMYTEIMFPEHDIHFIAVNDGVDSTQGDNEFTPFRNIINEWYAKDTSKKIRAVMKVKGNAGEHLTTLPPYGYMKSPDNKKLWVRDEEAAAVVYEIGLYVMDGFGPSQIARKLTERRILTPAAYYASRGRKASNIKRGLPYAWDASTVADIMDRWREYLGHTVNFKTRKKSYKSKKVIHNPESEWLIFENTHDPIWTEAIADAARAARQTRRRPTKMGEMGMFSGMMFCADCGSVMYQCRATNFRREQEYYLCAGYRKSRDFCGQTHSIRTVILEELILENLREIVSFASRSKDEFVRLVMDSDLRQRDRDLAKRKRQLADSEKRITELDAIFKRLYEDNISGKLSDERFQKLSTDYEKEEQDLKVLASSLRKEVELEESKSSDVDRFLSVVERYTDIPELTPCILHEFVEKIIVHAASDPKGKNRTQEIDIYYKGIGVLEMSKVTASTEK

SEQ ID NO: 24933 - protein, 535 aa, synthetic construct
MKKEKAKTPENNRAAVYARYSSRKQGEQSIEGQLSEAYKYAETHGYNIIHEYIDRAKSGRTDNREAFQEMLRDTAKGTFSTIILWKLDRFGRNREEIAANKYRCKKNGVKVVYVAENVPDSPEGVILESVLEGMAEYYSLQLSQNVRRGMHANAEKCQSTGGTTPLGYAVDPATKKFVIDPNTAPTVRRIFDMYAGGTKISEIVRTLNDSGIRTARGSRFKVDSLYTVLRNVKYTGIYTYNGDVRIENGIPAIVDRATFEKVQEMLKVNKRKPSKLWDTFDYILTDKLFCGMCGSKMIGESGTSKNGTKHSYYTCVKKRRDHACKKKAVRQYYIETLVLDRIAAILDDDSLLAFIADNVYSYYAKLQNDDDMTDALKKRLREVEKAQINILRAIEAGVFNDMTKARMDELDEQKSELQAQIAEEEYAKTGLATRDTILAWLYSQREKDLNDRASQRQLIETFVNAIYVFDDRIEILFNYSRDRRSIKFEELSDLYEYGDVFVSSALSFTSPEAGQPRIMEAGLSLFPYRPMGDWF

SEQ ID NO: 24934 - protein, 493 aa, synthetic construct
MINDDFFRKGAISVRVSTEMQTKYSPDSQIKMCLEYAKSHNIYVNDENIYRDDGISGKCAEKRTEFQRMISDAQKQPKPFDCILVYDFSRFARNKEESVMYKAMLRKKYNIEVISITQPLADGKERVILESMYEAMDEYYILNLSENVKRGKLEKASRGEYQGRTPFGYFYDKNQQNLVINPETSKIVKYIFDEWLKDDTTLNGLTKNINNMGIKTVQGNRWCEGSLKYLLNNPLYAGYVRYTDGGMKKYFNNVNTKVIKGNHEPIITEGTWEKVKEKNQMHEKNWFKYKKPSVKHEYWLRGLIKCSSCGKNLIMIQRKSGKKTKPFFQCNGYNKKMCPDSHSILQEKLENALLTEIEKIFTKKINITISDNQNNTTKTNLFESAIKKQKDRLDRIEIAYMDGIDTLAEYKEKKVFINQEISRLTNELERINSLKFQNDKSEKVYNLCEYAHRILASPDIDFKIKDKIAHELFKEIIYNKKENSLIITFNELS

SEQ ID NO: 24935 - protein, 543 aa, synthetic construct
MKKFKFPIDLSMLTEEEINQFREDPSTLFQGDTDVCLYLRFSSERQKEQSIEGQLRDCIAYCKRKNYRIVAIYVDRATTARKDVEKRVHFQEMITASVHQTWKLVIVWKLDRFARNREDSAVFKMRLRKNGVKVESATEGISKNPEGIILEAVLEGIAEYYSADLSQKITRGMRESALKCHSIGGHVPLGYKIEDHKLVINPNTAHIVQEAFELYANGETVADICRMFNAKGYRTAKGAEFNRNSFKSMFRNRRYIGVYRYKDFEKEGGVPPIIDKDLFETVQKRLSANAEAPARGKAKVDYLLAGKLFCGHCGGSMNGESGTSKTGAVHNYYACYTRKRQHSCDKKPLRKEWIEQIVAQDAMELLTDDAIQEMADMAISQTEKDLRENTRIPELSERMKETESGIANITKAVEKGIASDALMSRLVELEKEKKNLLRLIAEEEKYVCKIDRDQIVYWLTKFKDGNIEDENFKRIIIDLMVNSVTVWDEPDGFRITTAYNLTSCKNKTFRIPSSSDKGFGFEGLESTIKITTPKGVVIFMDAL

SEQ ID NO: 24936 - protein, 527 aa, synthetic construct
MNIAAYCRVSTDKSDQLNSLETQKEFFLEYTKRTGDNLIKLYADEGISGTKIKNRKEFQRMLADAEKGLFDMVVVKDISRFARNTVDLLQSVRKLKSLGIETQFLTANMTSMGNSEFVLTIFGALAQEESANTSKRIKFGKKMNAEKGRVPNIVFGYDKTIGDYFKLSINENEAKAIRQIFQWYIEEGYGGSKIANMLNERGIKTKRGNNWSQNAVCRILTNEIYTGKIINGKEEIADFLTGQRKEKDESEWLVTIRPELRIIEEEVFDKAQDILKGRHDSFKITHERQSNKYLFSTLIKCKECGWSFRRTVRQYKNTYVRWVCSGHNGKGADSCPNAVTVDEEELIQALQEYFQEILSKKKKVINYVIKEFQRVYKAKDENIEYEKQLNAELNKLHKSREKYMDMYTDDLISREELNEKIGGMRKEIERLENELKMVSYHLTKGEQLEAILNSTFKQLEDITDVHEMTNAQLKRLINKIEVDKDGNVDIYLHLIGDLGLDETVLIEGDKNTEEKGTKKVPNSYNHT

SEQ ID NO: 24937 - protein, 486 aa, synthetic construct
MKGVIYARYSSDNQREESIEGQLRECKEYAERNDITILGTYIDRALSAKTDNRPEFQHMIKESAKGLFDVVLVWKLDRFARNRYDSARYKNLLKKNGVKVISARENISEGSEGIILEAMLEGYAEYYSAELSEKVIRGLTDNALKCKYNGGTVPMGYYIDEQQYYQIDPKTAPVVLEMFTKYSEGATMQELVNLLNSRGMRSIRGGKITLNIMNHLLKNRRYMGEYSYRDVVKENGIPAIVPKELFERVQERLAKNKKAPARHKAEDDYLLTTKLYCGKCGSFMVGESGTSHTMKVHRYYRCVNTKKKKLCDKKAVKKDWIEDLVVNYTMKAIMNDEVMERLIDTLMELQKKESTDLPLLKKQLAETEKGINNMLNAIQAGIFTPSTKQRLDELEETKSQLEVSILQEEMHKPLLTREQIAFFIYRFRKFDVTKREQRQRLIDSFVNAVYLYEDKIILTFNYKDGSKTITLAEVEGSDLSVLGAPY

SEQ ID NO: 24938 - protein, 543 aa, synthetic construct
MPVAVYCRVSSEEQAERGTIEIQKEFAAKYVDLYQLEVFDYYCDDGISGTIPVEARPEGSRLFRDAREKKFDTILFYKIDRLGRKVRVILNAVHDLEELGVSIRSMTEPLETETPTGRFMLTSLAGISELERDTILSRMWAGSQRAARLGNWLGGIVPFGYHVVDKQLQISDDIMPGCNLSEADVIQLIFDLSGNQKMSAIKISDYLNALNIPTRYDLNGINGKRKKNASSIWYPSRVLSIIKSTTYKGTHKYGKRATNKNSKIILRPVPAIVSDELWEKANEALKTNQITAMINAVREYLLRGIIKCGNCGRTYMGTAYSGSGREKIPYYVCNAKNSYLAHNTEKCISKNVRADWLEHLVLEDCIKILKSPNKILNMDPEKEQQSLADEVKKEHDQIKASLKKISEERASIIELYRKKIISETDLSCQLEKLSTEEATLQERLKMKIDSRKSAATKQNKEKAISLLKKFTDKCQNLDPEKLSFETKRAIIELIVEKITVTTESAPEKYYPEISVDIEYRFATTPNHIAYVEDCTVTGSALCT

SEQ ID NO: 24939 - protein, 566 aa, synthetic construct
MNVVIYARYSSHSQTEQSIEGQLHTCYEYAKNNGYLVVGEYIDRAQSGTTDSRAEFQRMIADSDKHTFEGVLVYQLDRFAHNRYDSAINKAKLKKNGVRVISARENISDDASGILVEGVLESMAEYYSAELSQKIRRGMDINAEKCLSNGSNPGLGYRVDEERRFHIDPEGAAVVREIFEQYASGKTVTEIIQSLNARQIKTSQGKVFNKNSLHRLLRNRRYIGYYIYKGVETPNGMPRILEDELFERVQHILNRNKKAPARSRGREEYLLTTKLFCGYCREMMTGYGGTGKSGKAYHYYACNNFKRRKCKKKVINKEKIENRVVLECRKLLTDSNIEHIAASVAAVCESDWDTISVKRIKAAIQETDTAIENLWKALEKGQAADMITERIEKRQKEKEELQAQLAIEMNKQVRLSAPDIRAYLYALKHGDKNDENTKRGIINIFLRAVYLFDETFTLILNGSDKPIVIDDILLDEIEEGLDDDLANHNLCSSLVADAPPKRKTRRKSCLSFCVQSADVGTSNYDTPRIPCSGTETLKGIIMYNFESILSLGVFWYTAKDLDYTKK

SEQ ID NO: 24940 - protein, 529 aa, synthetic construct
MDEQKKTSGSLALNSTPQVITIPPSDPVRVRKLRVAAYARVSSSSEDQLNSFAAQNAHYTELITANPEWEFVDVYADKGITGTSAEKRDDFQRLLADCRRGRVDKILVKSSSRFARNAKECLEAVRELKALGVGVCFEEQGTDTSELAGEFLTAIFAMMDQKESENISDNLRWSIQRRMKNGTYLPPSVPYGYALVDGKITVNKQQAALVRQIFRRYLIGENLQEIADSLNAQEITKRGALKWYSASVRYILSNERYTGDSLWQKTYTTNSMPRVMRRNHGEQEMYYAPNTHPAIISKEEYNAVQTLIKCRAMRKQVQERSPFDKKIFCEKCGLSFRKKVSHEKLFWICRSHANDAKSCTVTQILNTEIEQAFLHLYHKLRHQGISILTQLLTDLQSARKGKLLWSLDIVALNQKIADITRQDQLLAQLKQQGLVDPDIFISRQNELAEQLRAVKLEKERSLEAEEDQTIQQIQELIEALEAGPDFLDAFDGELFRELVDKIIVESNDRLRFRLVNGLELTEPIERTVR

SEQ ID NO: 24941 - protein, 548 aa, synthetic construct
MNDTAPNVIVIPAKVETPQEQEKRRHLRVAAYCRVSTDSEEQLSSYENQLAYYTKKIMKEPGWTMAGVFADEGITGTSTCKRKEFLRMIRQCRQGKIDMILAKSVSRFARNTVDTLNFTRELRGLGIPVIFEEQNINSIYPESEFLITLHGAFAQAESESTSSRVRWGKRQAMKSGHVTMQYKQLLGYEKGPDGKPRIVPEQAEVVRFIYDRYLAGDSIREIKAALEGREIPTVSGKTKWMASHIRSILANEKYCGDVLLQKTFIQDCISKKVIPNTGQLPKYLIQNHHEGIVSREIFDAVQLEMARRNAKAGATRKSTPTGRGKYSGKHVLSNLLFCGECGTAYRRCVWTQRGVKRPVWRCVSRLDYGKKFCTQSPTLDEEPLQQAILAAVNAVMLDRDTLARQLAAAMEWELAPVLGERMSLADIDRALEELSGRFNSLLAEASANPAEDYTGRFRELSESTAHLREQRARLEGVYQENQKVNQRLRTVSAAMEHMSAALTEWDEEVIHQLLEKVTVLSREKIRVTFRDGREIEQYVAQPKRRKLA

SEQ ID NO: 24942 - protein, 459 aa, synthetic construct
MSTTHFYSHYPTIEYKTCALYVRCSKEEQAKFGDTIEAQIEDLKAFAKLHHLKIYAIYVDEGHTARKKYNKRKEFMRMLQDVELHKFEYIIFTKLDRWFRNIADFYKIQEILDNNGVTWLTALERYEMETTNGKLNVNIRLSVAQDEADRDSDRIKDVFRLKVKKGEAITGSLPIGLMVGENGKVDIDPDTVQIAYDMFDYFEAHNSKRGTLLYLIDKYNRYFCYETIARALRNPLYKGEYRGNPDYCPKIIDPARFDRIQVLGKRNVKVRKNNRYYVFSGLAQCKECGHALVANTTVQKRYSREYTQYRCNYYSNSHLCTHSHGTNEKVIEKYLLDNIKPELEKYVTAYEVKQNAPTKKADPSKIKTKMQRLKELYVNELIDLDDYRIEYEQYKQELDRLTSTAAPEVKDLSAIRSFLALDLQSIYDSLTPQEKRTLWSSIIDKIIISDSGDIEIVFL

SEQ ID NO: 24943 - protein, 556 aa, synthetic construct
MARKKKQASGDAVIYARYSSHNQREVSIEQQIAECTKHAAALGLRIVGTYEDRAISGRTDNRPAFQRMMNDAEDGKFCYVLAWKSNRMGRNMMQAMVNEARLVDCGVKVYYAEEDFDDSAAGRFALRSMMNVNQFYSDNLAEDVRRGLMDNASKCIANGKQPFGYKRGSDGKVVLDEPAAAVVREVFTRVASGETNTSIARDLNRRGIKTGSNGEWNKCSFHGLCTNERYRGIYIYGETRIEGGVPRIIDDRLWHKVQEAIRMRNRRKNGRHRPGEDDYLLTGKLRCGHCGGYMIGMSGTSKTGTIHHYYACQNRRVGRTCDKKNIRRDIIEPAVAQAIKQYCLTDDVIEWIADKTIEYWEDDDRKLQITSLENELADIKSSISNVMKAIEQGVITSTTRDRLIELETQQSDLSAKLNSAKEDLVHVDRKNLISSLLLFRNGDVYDRQYQEDLFNTFLVAAYVYDDGNRLKLVFNCFGDSNTVDLDLCSDENNDNSSISNEANCGNLFAQALKQSTKSHLMKIRWFFCFPQPPLFTPFSSADTGHTRRTSPAGRRW

SEQ ID NO: 24944 - protein, 512 aa, synthetic construct
MNAVIYARYSSHNQTEQSIEGQLRDCYEYAKRNDLAIIGEYIDRAISGKTDERPDFQRMIKDASKRQFERILVWKLDRFARNRYDSATYKHKLKQYGVKVISAMENVGEGDESVLLEALLEASAEYYSLDLKKKIARGMRESALRGKFVGGTLPWWCRVDDEQKLTVIDERAAIVREAFIRYDSGEGSKSIVSDFAKRGLRSNRGVPVTLSWLLSILKNRKTIGEYTYNGIEIPGGLPAVVDKPLFGRVQDRIARNRRTGGGEARAKTEYLLQGKLFCGLCGSPITAECGQNHKGVVYNYYACSLKKKKHQCKKANERKDFLEWYVVEQTLDYVLTPARTEYIASAIVAEYEREFDKSGIRVLEQKIALTEGEIQKTMDLCIQATTDAMRDRFMKRCEELDAKKADMEIDLSKLRVAASIVYTKDEVCAWLRQFCTGDCFDPAFRRRIIDVFINTVYLYDEKLIIYYNLRDSRQVSYIEAIGASSEIENLLPVPDNKKSAAECSTADGDGGA

SEQ ID NO: 24945 - protein, 523 aa, synthetic construct
MAKSVTTIPATLSRFTAAPINSTKKRRVAAYARVSTDNEEQLTSYEAQVDYYTNYIQGRDDWEFAGVYTDEGITGTNTKKREGFKSMVADALAGKIDLIITKSVSRFARNTVDSLTTIRSLKEHNVECYFEKENIWTFDGKGELLLTIMSSLAQEESRSISENCTWGQRKRFADGKVTVPYNRFLGYDMGPDHNLVVNPEQAKLVKRIYGMFLQGQSPFQIARTLTEEGIPSPGGKDHWNPSNIKSILTNEKYKGDALLQKTFTVDFLTKKKKANEGEIPQYYVKDNHEAIIDPETFEMVQTLMATRKKGRNRKSSVSIFSSKVKCGDCGSWYGPKVWHSNDAYRKVIWQCNHKFDGQKCATPTLTEDEIKELFLWAANQVIDQKEQFIAIYKQVLSRSLDTTALESELSDLEAEINIAAELIDECIKENAHVAIDQAEYQKRYDGLVARFDKAKARHTEVTDLIAECTARRHQIETYLRELRNREPLTEFRETDWLAMVDYITVHSKNDIRVTFKDGTEIKA

SEQ ID NO: 24946 - protein, 590 aa, synthetic construct
MKTVEKIERKLPVLKTRKRVAAYARVSMESERMQHSLSAQVSYYSALIQKNPEWEYAGVFADYGISGTGTKKRDEFNHMLAECEAGNIDIILTKSIQRFARNTVDLLNTVRHLKELGIEVRFEKEKINSLSGDGELMLSILASFAQEESRSISENVKWGTIKRFKQGIPNGKFSIFGYEWQDDKLVIIPEEAEIIRWMYAEYMKGASRIEIGRALMDRGIYTRQGKPWVDSNVKVILTNITYTGNMLFQKEYCEDPITKHRRKNYGEMPQYFVEDTHEAIIPMDEWQAVQAEFKRRRDLGPFGNKSLKLSAFSTKITCGCCRKHYRHSGKRNTAGEVYYIWICQTKSQKGVSACPSKNIPEKMLQNTAAEVLGLDEFDEDVFSQQIEEVIVIGDDTLTFRFYDGHEVTTKWQSTAKTDWWTDERRKLWGERHKRKDTNPNRNTFYEFTGFIKCGCCGANYRCQSGKRKDGTPTRSWYCTGPRSECRNPAIKDDTMKRLVADVLGLDEFDEAAMDARIENATILDHTVTFHFRDGHTESRAFLDKRHGTPWTEERREKARESMKAAWTDERREAMSERIKKIRSEKKWPNP

SEQ ID NO: 24947 - protein, 536 aa, synthetic construct
MPRKKKLQEVGGLRLVAYYRYSNGGQQTEQSIEGQRRDCEAYAKAHGYKIVHEYIDRHISGKSDSRPAFQQMISDSDSHLFDAVICWKTDRLARSRYDSIIYKTRLRKNGVKILYAAETVVDGPEGIIIEGLMESLAEYYSAELAQKLRRGQRESALKCIALGGNRSFGYDIGPDKHYCINEKQAPAVRYIFEQYAAGATAADIVRELTARGYRTSRGNPFNKNSICRIITNEMYLGVYKYADIRIEGGVPAMIDRELFNRCQTQLAFNRAHGGGKGAPRADYVLVGKLDCGLCGHAMKGASATGHTGSKHYYYTCTQHVEKKCPKISIEKNYLEQVIVDGVAKYVLTPEKISQIVDCMMELQAKEQEPKGNPEKDALEADLAECRRKQNNILEAIEEGGSARLAARLRALEEQESQLTFAIGEINNAPAPPQFSREALTFMFEQFRREEDEVDEEYRRRILDTFVSSILLYEDRAEVKFNITDQKTGDFERVILPISANKKPPEDDDITSNSEGSTALRLVEAMGVEPMSEKSSA

SEQ ID NO: 24948 - protein, 518 aa, synthetic construct
MLSFNNIIIYLRKSRSDDPTQSVEEVLARHEHILQEYCMKEYGECIPENRIYREVVSGETIQDRPIIQQVLRLLESGSIDGVLVVEPQRLSRGDLENCGHIVNSFRYTNTLVITPTKTYNLQDEYDRKFFEMELTRGNDYLEYTKKILARGRLASVMQGNYINAIRPYGYNKVVIGTGKDKIHTLEIFKEESDVLLLMKHLYLDENYGLVRIAHTLDDLSIKAPKGDHWSASTISRILSNPLYNGKIVWNKRKTVVKWKDGKKVKSKPLNRGDDVIIVQGKHPAIFDDETFNAILKRMENSPKVKRSNKLRNPFAGLLFCSTCGSAMILRRSGRKSGVYSLTCNRQSICHTKSVQYKAVLLKVKQSLAEAISDFEVKMSNNNTTASELHAINISTLENELEQLYRKDLIQKDAFEDGIYSKAEYMQRNAQLQTQIAAATDKLNRAREDAPEPVSYEERIVCFRDCLNALDDDTVSAEVKNTLLKACISKIVYYNDSPSISGIGRYVDNPFRLEIFLKL

SEQ ID NO: 24949 - protein, 516 aa, synthetic construct
MQRAVIYARYSPGPNQTEQSIEGQVRECTKYAELHDLRIVGTYVDRKISGKTDNRREFQRMIDDSEKHIFDVIILYHTDRFARNRYDSAIYKHKLKENGVELRYATTDIPKGPEGIILESIMEGWAEYYSAELSRKIKRGMRESALKCHSTGAGRCLGYRTTEDKSLVIEPEGAKAVQTVFDMYIKGKSHADICRYLNDCGFRTAQGKLFNKNSVTHIIRNKRYIGVYTYDDITIEDGIPAIISKDTFHLAQLEAARRKTAKRPKEPKAEYLLSGKAFCGHCQKPLVGVSGTGKSGNKWYYYYCQESRAKRGCTKKPVKRAWLEREVVKRTVAEVLQPEVIQHIAKKCYDLQMEYRQDNSDVLFYELKLKDVRKAIKNTMHAIESGVKTKTLPARLQELENEEEALEAELAIAKASDFVITADQIEFLLTQFAEPWECESEEEYHRRIIKCFVHKVFLFDDKLLIYYNVSRDGKTREQSEAELLEEALGEGFDKRSSGSTMQKRHPIWDGVFAWLR

SEQ ID NO: 24950 - protein, 526 aa, synthetic construct
MPKVTMIPATVNSLTHLPKASVQKRRVAGYARVSTDSDEQFTSYEAQVDYYTRYIQSKPEWDFVRVYTDEGISGTNTKRREGFKEMIADALAGKIDLIVTKSVSRFARNTVDSLVTIRKLKENGVECYFEKEGIYTFDGKGELLITIMSSLAQEESRSISENITWGQRKSFADGKIHLAYKHFLGYKKGEDGRPAIVEEEAVVVRLIYRLFLDGKTQAGICRYLEDLEIPSPSGKAKWSKTTVTSILTNEKYKGDALLQKSFTVDFLQKKTKLNEGEVPQYYVEGSHPAIIEPDEWNHVQAEFARRKALGNAYSGKSVLSAKLVCEDCGGFFGSKVWHSTDRYRRTVWQCNNKFKGGERCLTPTVDTETVQQLFIKAYNQMMGNRKQIIEDCELMRKKLTDFKSLDADIERHLEETQIVAELVKAAVKDNAVTAQSQEAYLKKYESLTKRYETEAAELARLQNLRTLRSQKDKAVALYIRTLKKQPTVLSEWNDTLWTVMVEKAIVHRNSEITFVFYNGTKVKVRQ

SEQ ID NO: 24951 - protein, 433 aa, synthetic construct
MSGKIIIVSKPPKLERKKRVAAYARVSSGKDAMLHSLSAQVSYYNDLIQNHGDWLYAGVYSDEAKTGTKDSRSGFQNLVADCRAGKIDMVITKSISRFARNTVTLLQTVREFKALGVDIYFEEQNIHTISGDGELMMTILASYAQEESRSASENQKWRIKRSFESGIPWDRTLMGYRMENEHYVIVPREAEIVRRIYNEYLSGSGYQLIAKRLNEEGVPSRFGGKWNQSAVSRILSNHTYTGNLLLQKTFRENHITKRKIFNNSELPKYLAEESHEAIVDEKTFQAVQEEKSRRAARFNKKSVPKKTYPFSSLMVCDNCGKNYRRKITKTGAVWVCGTYNSLGKAACASKQIPESTLQQVTADVLGQNDFTHEWLCHRIQHIRVCNDNTLIFYFKDGSEITRIWKDRSRSQSWTDEMKEAARQKTLERSKHNA

SEQ ID NO: 24952 - protein, 446 aa, synthetic construct
MCQKIVVTLPNNLRIRVALYIRVSTEEQAKHGLSLADQREALIAYAAAHDMEVVGIYEDAGISARKPYKKRPALMRLLDDCRAGKIDTILFVKLDRWFRNVAGYYAVQEVLDKNHVDWQAIREDYETRTASGRLKVNIMLSVAQDEADRTSERIKAINEGKRAKGQPTNGKTPIGICVKNRRYDIDEETADAARDMFPAFIRLQSILALRRYMATEWGIKRSYNKYKDALRSRLYLGEAFGVENALPALVDRETFDLAGKILERRSQRNASADRIYLFTGILRCRECGRNMQPETVKQVYKYYRCRTHTLDPADCPHILRIREDVLEDYLLREFEGIAKKYYSKSKTAEKKPPKTAEQIKRKMQKLKDLYLSDLIEIEEYKKDYTELKQQLAAINPEPIKEFDLETLRRELKEYPDLDRQAKKEFWVRTIQRIDADNDGAFFVTPS

SEQ ID NO: 24953 - protein, 502 aa, synthetic construct
MEIQIREGSREQKRKLKVCAYCRVSTDADEQENSLENQVRHYETVIKANPDYEYAGVYSDFAISGFKEKRPGLQKMLADAEKGKIDLILTKSVSRFARNTSIVLEATRKLKELNVGVFFELQNINTLSGEGELMLTILAAFAQAESESGSAGAKMVYQRKYEAGIPVQYLERSFGYTKDERGVFVADEAEAVWVRKIYKMAAEGYTPASIKRYLNENGIKTVGGVQWADSTVFRLLENEIYKGDYIMHKHFVNEERKLVRNRGEVDAWYIEDDHEAIVSPELWQKAQDALAAKRDYLAEGSVIEEFTEENYPYMNKIYCAKCGYPLYKRVYSKGNRLNWGCSGTKRYGKTFCDGINIPDGVLRSAWHFKENTYIAEKASDKGVKEFTYLKEQSWKRRHKKKQPPAIPENTEAEYPYREKIFCALCGSRLVRYVNPQSHKVTWVCSRRKRKGKDACDGTRVPDTIIKGWGEIKKDIYIQRKDDKNGKKRYSYTSKKPEGADRA

SEQ ID NO: 24954 - protein, 464 aa, synthetic construct
MARSVTVIPARSQKVRTGHKAVQEKKIRVAAYCRVSTDQEDQLHSFEAQVEYYTKYINEHENYEMAGIYADEGISGTNTKKREQFKKMIADCEEGKIDLVITKSISRFARNTQDCLAYSRKLKNLGIGIIFEKENINTLDSTGELLFTILSSLAQDESRNISENCKWGIRTKFKNGEMHLNTFKFLGYDKDENGKLVINKEQAKTVRRIYRDFLIGINPAQIAKELTEEKVPGCLGQTKWYPSTVIGILKQEKHMGDALLQKTYTADFLTKRQVKNNGEIAQVYVKDSHKGIIDKETWNAVQEEFERREKFMQKHGTDRYSYGSEYYPFCEKIFCGECGSLFTRHSWKSRGIIQWQCKNHRKDGKVACTNAYVDNADLEKGFVKAFNRLVGEREKHIERWNSMKLDGTPLEKIRAGQMMEATESGQLQQYVPEAAQLVLEEITIFSAKKYEFAFLEGSRVKVSV

SEQ ID NO: 24955 - protein, 517 aa, synthetic construct
MRKITRLEPKKTALPTRKKVAAYARVSKDTERLLHSASAQVSYYSELIQKNPEWEYAGVYVDCGITGTLTYKRDEFKRMLTDCEAGKINIILTKSISRFARNTVDLLETVRHLKSIGVEVRFEKEGIHSFSEDGELMLSLLASFAQEESRSISENVKWGIHKRFKSGEIGVANKHILGYQYDEEQKKYIIIPEEAESVRWMFQMYIDGVTLRDIADNLNNAGICTILGNDFQEASVRQLIFNEVYAGDIRRQKCYVSDPIKKDKVPNRGELPQYYMADCHEAIIDRDTYAKVKAEMERRASLLNPTYCFTKKIRCGTCGAQFTRKKGKVRGKTYVYWICRSKKETGMTCSSVNFSEEELKNICADVLETDSFDEEIFESRVKDIIVLKNGDIEFHLVGGETRRWKNLHLNPPRHKVTLTDAFQGKIRCAKCGNTYHRVNSANKWVYWYCMGKKKKGMTCDNINYTDFQLRQITAHILGLEDFDEQVFSEQIEGITVLEDGNLEYHFYRGRTEKWQRV

SEQ ID NO: 24956 - protein, 524 aa, synthetic construct
MAKSVITIPATKSKYMATPLSCKKKRKVAAYARVSTDHEEQQSSYEAQVDYYTTYIQGRDDWEFVSVYADEGITGCNTKKRDGFNSMVEDALAGKIDLIITKSVSRFARNTVDSLTTIRKLKEHGTECYFEKENIWTFDGKGELLLTIMSSLAQEESRSISENCIWGQRKRFQDGKVTVPFGRFLGYDRGEDGNLVLNEDEAQIIRRIYGLFLQGRSPYAIAKVLTSEGIPTPGKKKTWSASTVKSILTNEKYKGDALLQKVYTEDFLTKKKIKNDGQVPQYYVENNHPAIIEPGVFDRVQKLMAVRHPGQNRNSSISPFSSRIKCGECGSWYGSKVWHSNDKYRKVIWQCNHKFDGDCKCGTPHITEDEIRSLFIKAMNILITEKDALIEDFEAIKDTVFDTSALVQERTDLQVDMNTVAGLIEECIAENARIAQDQGEYQKRYDSLAKRFDRTKDRLEAVERSIAEKQAHREMVEQFLSELAKQDAVTEFTDELWYSMIDHVTIHSKDDIRFTFQSGTEIRM

SEQ ID NO: 24957 - protein, 514 aa, synthetic construct
MAKRKFNKGGEVRLVAYYRYSGGSGQTEQSIEGQRRDCETYARLHNMTIQKEYVDRHISGKTDDRAAFQQMITDSDKGAFDMVICWKTDRFARNRYDSAVYKKRLRDNGVEIVYAAESNIAGAEGIIIEGVMEALAEYYSAELAEKMRRGMRESALKGQAISRCRALGLKTDEHKRFVIDEETAPTVRFIFEHYAAGESATSIVDKLNAKGLRTSQGNPFNKSSIPRIIQNEAYRGVYVSKSYDVRIEGAIPAIIDDELWERAQTMLKLNRQLKAKNEPKADYILSGKLYCSCGSLMRGMSGHSATGEVYRYYTCPNKNCHLRNIPKDDLEGKVMQSISDHLLQPEAMEALAEAMVEVQKADAEKPNAERVAIEQSLADVRRRSKNILDAIENGTANAQLCARLDDLSEQERTLNFQLSALEKEKPVVFTKEQYLFLLEQFLVEPSERTPEYGRRLVNTFVTSMVVSDRELVINFNVSDETVNKNKKTSQTNLQKESSSGMRLVRVARIELTAS

SEQ ID NO: 24958 - protein, 510 aa, synthetic construct
MSYFIYARKSRKDADLEALGIDVLERHITTLLELAKTLSLPIGAIYREVVSGDSIDSRPVMSQVMAEVESCMWDGCLVMDVDRLARGDTIDQGRVQRAFFYSNTKIVTPNKTYDPANEYDNEYFEFSLFMSRREYATIKRRMQRGRERSSSDGYYVGNIPPYGWRRVIAPDGKHFSLAPDPTESPVLDLMYDLCGNKQYGYQKACTHMAEMGILSRSGRPFTPSTLKGIISNPANIGKVRWGHRKTVRTVKDGKISRSRPHSSDYILADAVWPPRISADLFQRANHPKGSCSAPVRDDRPIQNIFAGLVRCSQCGRLMVRKKAHTKTPYDILICQYTECPTVGIRIDELELALLEWLRNYIDKYELTDALPEDVENVAAKEAIVKNFEKEHETLLKQRESLFDFLEQGIYTKEIFIERSNALERRVKECMEHIISAQNDLHATLALQANRKNFVPRCKNLLGEWGRLTIPEKNSALKVLIEKIMFTKTKRNKKGQDRSDFEIDVFPKVPK

SEQ ID NO: 24959 - protein, 502 aa, synthetic construct
MKTINAWLYLRKSRADEPNEDIGETLRRHEEILRDFAGKQNIAIVGVYREVVSGDSLYARTEMLRLLEDLEHDPCDAVLCMDIDRLGRGSMSDQGIILDAFKNNGVTIITPRKVYDLNNELDEEYTEFETFMARRELKSIKRRLQRGIKKTIEEGGYIANAPYGYTKATVDKKPTLVINEEEAKIVRLIYDMYVNQHMGCQMIADAVNSMGAKPHRAEAFGRTSIMHILKNPVFCGKVAWNRRHHVRKGTRGNEKHITIYNDPADWIVVDGIHEPIISSELWDQAQEIIKYRYHPPCNTGAARSPLAGVLRCRVCGRTMVRMPFDNRRKNGVDNLICPTRGCCSSTRLDRVEASVLSSLNDEMESFKAQMRELSESRENDYSAAARAIRKELDTAGKQMDKLHDLLEQGVYDVDTYLSRSVALKERIAELEDSLDQAEEMARRNSAEHLAERIARIEHALAVYDSSDVAEKNHLLRSVIDKGIYYKEKGWVSTRFELELTLK

SEQ ID NO: 24960 - protein, 598 aa, synthetic construct
MRKINKIEPLMPTLPSRKKVAAYARVSMEIERLQHSLSAQVSYYSELIQSNPEWEYAGVYADDGITGTKSTRAEFQRLLQDCEDGKIDIILTKSISRFARNTVDLLETVRHLKELGIEVRFEKERINSLSGDGEVMLTLLASFAQEEVISLSNNVKWGTRKRMEQGIPNGHFRVFGYRWEGDQLVIVPEEAAIVRRIFQNFLDGKSRLETEREFAAEGITTRDGKRWVDSNIKVVLTNVTYTGNLLLQKEYIEDPLTKKRKKNRGELPQFYVEDTHEAIIDKETFDYVQAEIARRKELGAFANKSLNITCFTSKLKCCHCGCSYVRNQRSNRTKHTSTYDDTIVAWGCGTTKKKGGRCSNKDIPERVLREACATALGLDEFDEDIFLERVDHIQVLEGQVLEFHFYDGTTALLEWVSTAKKDCWTDEHKDRQREWMKNYMANNSDGRYAEFTTRIRCEHCGSTFRRNTQPSKSANGGKMHYWRCPTSGDCVTTGIREDRLKDITASVMGLAEHDADAFKEQVEYISVSSDMKLTFHFFDGREPVVQYNTKRQGTPWTEERHKKFSASMQGKYTEERREAMSQKMKQIRSEKHWSSKRK

SEQ ID NO: 24961 - protein, 527 aa, synthetic construct
MVVQKKVTTIPASLTRFTATPITELKKRRVAGYARVSTDHDDQFTSYAAQIDYYTNYIKSRDDWEFVDVYTDEGITGTSTKHREGFKRMVADALDGKIDLIVTKSVSRFARNTVDSLTTIRQLKEKGIEVYFEKENIWTFDGKGELLLTIMSSLAQEESRSISENCTWGQRKRFADGKVTVPFNRFLGYDRGPDGNLVVNPEQAVIVQQIYAMFLQGMSYHGIAKKLTADGIPTPGGKEKWSISTVRSILSNEKYKGDALLQKSYTVDFLTKKTKINEGEIPQYYVEDNHEAIISPDVFAMVQREMTKRGRGKNYHNSVHAFSSKIRCGHCGSWYGSKVWHSNSQYRKTIWQCNHKFDGDERCDTPHLCDEDIQRLFLSAANKLLVNKDEVIANCREMMDLLFNTTELEAEQTTLLEETQLISDMVQQTIYENAHVALDQTEYQKRYEGLTQRFETAKQRLETVMAELDRMQTQRADIEAFIESFEALPETLTEFNLENWHSLVDYVTVYSLDDIRFTFKHGQEVQA

SEQ ID NO: 24962 - protein, 543 aa, synthetic construct
MPVAVYCRVSSEEQAERGTIEIQKEFAAKYVDLYQLEVFDYYCDDGISGTIPVEARPEGSRLFRDAREKKFDTILFYKIDRLGRKVRVILNAVHDLEELGVSIRSMTEPLETETPTGRFMLTSLAGISELERDTILSRMWAGSQRAARLGNWLGGIVPFGYHVVDKQLQISDDIMPGCNLSEADVIQLIFDLSGNQKMSAIKISDYLNALNIPTRYDLNGINGKRKKNASSIWYPSRVLSIIKSTTYKGTHKYGKRATNKNSKIILRPVPAIVSDELWEKANEALKTNQITAMRNAVREYLLRGIIKCGNCGRTYMGTAYSGSGREKIPYYVCNAKNSYLAHNTEKCISKNVRADWLEHLVLEDCIKILKSPNKILNMDPEKEQQLLADEVKKEHDQIKASLKKLSEERASIIELYRKKIISETDLSCQLEKLSTEEATLQERLKMKIDSRKSAATKQNKEKAISLLKKFTDKCQNLDPEKLSFETKRAIIELIVEKITVTTESAPEKYYPEISVDIEYRFATTPNHIAYVEDCTVTGSALCT

SEQ ID NO: 24963 - protein, 512 aa, synthetic construct
MRREQLEDYHRRGRLVRSSIYLRKSRAEEHMSLEDTLARHKAALLAYAQRYGYQIRPEDIYEEVVSGESLFARPQMLRLLEAVSAGKYEAVLCMDMQRLGRGGMYDQGFILDTFKSTETLIVTPDRLYDLTKELDEEAAEMQTFLSRSEYRMITKRLRRGTLQSVQNGAYMANAPFGYRKIRINKIPSLEIVPEEAECVRQIFQLYASGNGCTRIEQAVNAMGYHGRRGSRFNRNTIRLILDNPVYIGKIRWNKTNTVKTGIGADRQKKVIYNTPDRWTLLDGHHPAIISQELWDAVQARRKSRYFYVDNKHVASPLAGLVHCSKCGRLMNMMGKHKGVPYLLCPTKGCSAGAKFAFVEQAVLNHLEEMAKSLEIEIEQNQPPDTSLLQDALDKMKAQQVRLEDRRNRLYSLLEDGTYTREVFAQRMQVLTDEENTLQASVAGLENDIHIELSKNKEKQLERIRSVLDQYGASSLSGRKELLQSIISDILYTKGKKTKPADFVLSIKLKDFI

SEQ ID NO: 24964 - protein, 527 aa, synthetic construct
MNTAVRTVTVIPPSINPMTHLTDTPLYKLRVAAYARVSTDSDEQFTSYEAQIDYYTQYIQRNPEWTFVKVYTDEGISGTNTKHRAGFNEMIEDALAGKIDLIVTKSVSRFARNTVDSLVTIRKLKEKGVQVYFEKENIYTFDGKGELLLTIMSSLAQEESRSISENVTWGQRKRFADGKVNLPYKQFLGYRKGADGFPEVVPEEAVIVRRIYTRFMEGLTPGAIAKELTADGIPTPSGKQRWQTSTVESILQNEKYKGAALLQKCFTVDFLTKKRKVNEGEVPQYYVEHSHEPIITPEEFDKVQTELARRKRISRQYSGKSIFSSRIVCGDCGSYFGSKVWNSTSKYRRVIWQCNGKFKGEHKCETPHLDEETIKARFVAAINAIIDSKDNILEDCRLMQTTLTDCTGIDAEIESLLEEIDVVAELTKRCIAENSQTAQNQNEYAARYNGFVERYEKAKAQLEQLRATKVALEAQAEAIGAFMFEVQELDALTNFDDKLWLTVIDTVTVHADGRMTFKFQGGTEIEA

SEQ ID NO: 24965 - protein, 427 aa, synthetic construct
MDRIIKRVDFPKIMQPQFLKVCAYTRVSSGKDAMLHSLSAQVSHYSEMIQSHTGWVYCGVYSDEALTGTKSDRDGFQQMLTDCRAGKIDMVITKSISRFARNTVTLLETVRELKSLGVDVFFEEQNIHTMSADGELMLTILASYAQEESRSVSENQKWRVKRNFEAGIPWNGRMLGYRMQDGKYYIIPEEAELVRRIYREFLDGMGRNRIAAKLNDEGIQPTRYGEEWHPQTIAKILRNYAYTGNLLLQRFYCESYITKKTVPNNGQKTMYHAERTHEAIIPLEEWKAVQTEIERRAEQHKSKPPAQPSFFYTGRIQCAKCGKNFRRKTTAARVVWICATLNTKGKKHCASKQIPEATLDELVRQVTDDPFSVKKIIADDGNTLHFHFSDGSVVTRTWTDRSRAESWTPEMKEKARQQSLARRRQKS

SEQ ID NO: 24966 - protein, 516 aa, synthetic construct
MPTVTIIQPTIAAEQNTKIRCAAYCRVSSDSEDQLNSFMAQTRYYEKAFEKSDREQLIDIYADEGITGTREDKRDEFQRMISDCRKGRIDRIYTKSISRFARNTKDCLKNIRELKSLGITVLFEKENIDTADMTDEMMITIMGGLAQEESTSISQNLRWSCRKRMANGTYELSCPPYGYKKVNGKLVICPEQAKVVKEIYDSYLSGIGMISIMKNLNERNIPCCKNSERWHMIGVSYILTNEKYTGNTLLQKTYSTNTLPVRRFKNNGNADQYYVRNTHPAIIQQETFDKVQRLISEKNQKQPRGTPHNSALHKHIFCGSCGSILIRKSCRKKYYWSCRKHDLAAVDCPTKQISEDKIHSAFIRLYNKLVYNFKPVLTPLQQALQDLKYKNTKSGTTIIEKYKEIAKLKEQTHVLARLKTKGFLDEAKYLEQTTELNSKIAKFQTEIKKLNVSDEEDETLEQLDMLIGYFEKRQKLMVEFEELAFESIVDKIVVKNQNELEFHLIGGLELTEKICS

SEQ ID NO: 24967 - protein, 538 aa, synthetic construct
MSTAPNVTVIPAKVQTAESRSKYHQLRVAAYCRVSTEQEEQQNSFAVQVAYYTDLINKKKEWTLAGIFADEGISGTQTKKRTEFNRMIRMCKKKKIDLIITKSISRFSRNTVDCLQYIRQLKELGIGVIFEKENINTLTMTSEFMIALYGSFAQAESESISKNILWGKEKAYREGKVNFQYKHLLGYKKGADGKPEIVPDEAETVKLIYKLFLDGYSMKGIKNVLESKKLLTSMGNKIWNESFIRSILKNEKYVGDALLQKTYTLDCITHKVVKNYGERPMYLVTDHHEPIIDRDTYNRVQQELARRSSKRKISDKTTTEQGKYSSKYALTELLICGKCGTPYRRTTWTSRGKKQIVWRCISRLEHGKRYCPDSPTIKEEQLHKAIIRAINNYYSCGNDVEKILKANIGNVLECHGQEEIAAIEKRLKEIDKARNDLISLIAAGGCDEDKLDSEFEKLYKEEQSLSERLAMLKSKNQTSAETQAKLDKIIDMIEHEKFELETFDNVLIRKLIECVKVLSKTEILVIFKGGYEVRTEIE

SEQ ID NO: 24968 - protein, 590 aa, synthetic construct
MRAGEGKIAIYSRKSKFTGKGESIGNQIELCREYIRANHGQADADAATVYEDEGFSGGNLERPAFKRMLRAARERKFKAIVVYRLDRISRNISDFSGLIEELSRLDIAFVSIREQFDTGTPMGRAMMYIASVFSQLERETIAERIRDNMHELAKTGRWLGGTTPTGYCSKSLRTVTVDGKAKKACMLELIPEEGETVKLVYALFAETHSLTATETELLRRGGTTKNGKTFTRFSIKGILQNPVYLIADQAAYRYFIQRQADVFSNEKEFDGVHGVLAYNRTDQSKGKSTVYLPVSEWIVSVGKHRGLISSEVWLEAQAALEHNRSKAYRRPRSNEALLTGLLFCRCGGRMYPKLSKRSLADGTRSYTYVCREKERSRRSLCDGKNADGNMLDSAVLQAIGALAEDKAGFAGRLAQSKGGSMGGPGLAGEKLSALRKELGGNAKKIDALVDSLAQAGAGAAREHILKRIGTLHELDRELRKRIGELERFAAQNVLGARELEAQRRLLAAFPESMETMRLAQKRAAVQALVQRVVWDGESAHVVLAGTAEVPADFLCAEEGRTEREERSEAHGDGNTQFVNTPAPHWREDSK

SEQ ID NO: 24969 - protein, 611 aa, synthetic construct
MSTSNTGCDNRKYAIYARKSKFTAKGESINQQIDRCKLHLSSMNVDEEDIIIFEDEGYSGGNTDRPQFKEMMDMCEDNKIQCVICYKLDRISRSVSDFTNTFNNLEKHNIRFISVSDGLNGTNSPMDKAMIQLVAVFAELERNIIAERIIDNMTELAQKGRWLGGTTPTGYKSVETFGSTNKEGKVHYARKLEIVPEEMELVKRIYKLYLKTESLTAVQAILLNDNIKTKMDNEYSRFAVKVILRNPVYAKADNAVLKFFENKGSTIYADDDAFDGTKGMMVYNKTKQEKNTSHKVKPYNEWIVAIGEHDGVIDGADWVRVQNILDKNKDKNYNRPRSHCALLSGLLRCKCGSIMYPRVAKTYNERGERNFAYACKMMLNSNRQRCNVKRINGNFLDDLVWEQIKALTSDKSELAEQLKKAQGNFESDEQPVLKELEQMKRRLNDNKQKQKNLINFIANNGSKMSPEMSNDANEQYRKLENSNKEISSKIIKLEEVVAQSEQAFANFKDLATRLSEFSAALDTQTTFEDKRYAVRQVIEHAEWDGKNVKLFFAGNRTVELQDIKDELADYKKAHRKRAKTSSDENTTLGDDSERDTNALPLPEKVCQRYPL

SEQ ID NO: 24970 - protein, 530 aa, synthetic construct
MAKKQTDGNLALEQQRVIVIPAHDEVVARKLRVAAYARVSSSSEDQLNSYRVQNQYYSELISSNPDWEMVDIYADEGITGTSVEKREDFQRMMQDCRKGKIDRILVKSISRFARNTKDCLAAVRELKELGVSVQFEEQGIDTSKVSSEMVTAIMASLAQKGSESISGNVRWGVQNRMQDGTYMTASVPFGYELCDKKMKINQEEAQIVRQIFDLYLSGVSIEKIVLELNAGCHEISDKKIWCKTAVSYILGNERYIGDRLLQKFYMTDTLPTKQVRNNGEKAQYYVENTHPAIIDRERFHAAQALRVCRKKRNGCAITMRQSNLRGNCFCGMCGGKLRSKEENGIIYWVCKTHSKDKKSCANSPVQEKIMEQAFCRMYYKLKHHGGPIFTQMLSNIQKIRYSRMLWSEDVISLNKKISDVLSQVQFLTQLQQAGGVDPDTFITSNNKLSEQLRRLKQEKAKLLDTDSDDLADRTRDLMDVLEDGPDFLDRFDAELFDALVEKIIVDSNERLRFRLKNGIELTEQIERTRR

SEQ ID NO: 24971 - protein, 541 aa, synthetic construct
MTDEKPRVIIIPPKPELQQTAAVTKQLRVAAYCRVSTKEEEQASSYEAQCEYYTDKIMSNKEWTMAGIFADEGITGTSTKKRTEFLRMIRQCKQKKIDLILTKSIQRFARNTLDCINYTRILRQLGIGVLFEKENINSLPPDSEFMITMYGAMAQSESESISGNIRRGRQMHAKVGTLKVPCYRLYGYEKDTEGKFRVIPEQAEIVRELYKRYESGASLRNLQDWLEENQIKTVLGESKWTATSIKSILTNEKYCGDVLLQKTFRTDVISKKVIKNVGQMAQYYMPDHHEAIVSREQYNAVKAEMARRSALRSPSKQAVTGRSCYTSKYALSDRIVCGECGTLYRRCTWTSRGRKYPVWRCTSRLNYGTKYCHDSPTIKEEPLQNAILSAINAAMSDKPVLLDRIKNAVSLELLPVQGQTRSFADIERRLAQLDEQFQQLLTEAIDAEDKEACNAQFAEILAEQTSLKRQKEAILQSSTDASRVCTRMKQAEQAIENTTQTITEWNENAVRQIVERVTVLSTDEILVQIKGGAEIKQTINK

SEQ ID NO: 24972 - protein, 537 aa, synthetic construct
MALLPRKPAKHPAKPKRGKKLEVEEPGVLYGRYSSHNQKDISVEQQFEKGYELAAEYGIRIIDTYADRAVSGRTDKRRDFQRMMTDAAKGKFRYVIAWKSNRMGRNMLEALINEARLQDLGVRVLYVEEDFDDTAAGRFAARSMMNVNQFYSENMAEDIKRGLYDNAANCMVANGHLPYGYKADETLHYAIDEPKAAVIREIFTRVSCGEAFVDIMASLNARGIKTSYGRPWGRSSFQRILSNERYRGIYIYGDVRKEGGIPRIVSDELYFKVQEVITTKKNPQGRHRVNGDYLLTGKLFCGHCKSPMTGISGTSRSGNLHYYYVCQKRRTEKTCEKKNLRRDDIELQVAKAIKRRTLDDDTINWIADSVVEYSQHQESASGIGLLEDQLKDTQRSIKNLMAAIEQGIITPTTKARLMELEKEQSDIDRKITMAKADVIPVNRDQLVGWLKKLQAGDVHDKKYQAELFDTFLIAVYVYDNPDGQDYMKVVFNYAGSKNTVEIPLDPSVIDNVENIETGAVRLSSAQVHQKVATIRIF

SEQ ID NO: 24973 - protein, 575 aa, synthetic construct
MKKKFSSVPDPDIQDAVIYARYSSHSQRDCSIEQQVADCELFAQQNGLRVVKIYADRHLSGTTDNRPQFQQMLKDAAHGHWPFVICWKIDRFARNRYDSATYKYKLKKAGVRVLYAKESIPDGPEGILLESVLEGSAEYYSASLAQNIRRGMRFNAENCKVNSGSIPFGYCKGPDGRFAIHETNAEIVRDIFRKAAAGVPFVDIATELNNKGLKTSRGGRWNKNSFVLLKNESYIGVYHFSDIRIEGGMPAIIDLGTFLAANERMNANRRVRGRHHDGGDYLLTGKLKCAHCGSYMVGFSGTAKNGESHYYYGCQKRRRERACKKANIPREWIENVVVKAALDYVLRPDVMEWITDAVMEYQEREAASSQLAALTAELEENQKATDNVMLAIEAGIITATTKQRLLDLETQAKDLKRAIELEKLSHVRLEREQILYWLEQFQGGSLQSQEFRRKVIDTFVSVVYLSDDHLRIAFNYSGQNRSEADFNLIMDAETASADYPINSLSLPLCPPHKKNPNLFPSGKGSDFFVCRISYRIIFISSLSSAAFLSMPPAYPVRLPFVPTTRWQGMMIEITL

SEQ ID NO: 24974 - protein, 498 aa, synthetic construct
MEIQIREGNSRQKRKLKVCAYCRVSTDADEQENSLENQIRHYETVIKANPSYEYAGVYSDFAISGFKEKRPGLQKMLADAQKGKIDLILTKSVSRFARNTSIVLEATRKLKELNVGVFFELQNINTLSGEGELMLTILAAFAQAESESGSAGAKMVYQRKYEAGIPVQYLERSFGYTKDERGVYIADESEAVWVRKIYEMAADGYTPAAIKRYLNENGVKTVGGTKWIDSTVFRLIENEIYKGDYIMHKHFVNEERKLVRNRGEVDAWYIEDDHEAIVSPELWQKAQDAIEAKRDYLAEGSVIEEFTEDNYPYMNRIFCAKCGHPLYKRIYSNGNRLNWGCSGTKRYGKSFCEGINIPDGVLRKAWHFDGNMYIDEKPSVKGTKEFTYLKESSWKRRHKKKVPEAIPENTEEAYPYRKKIFCGRCGSRLVRHVNPKSHKVIWICNGAKRKGVAFCRGTRIPDSVIRGWGEIKKDIYIQRKDDKNGKKRYSYTSKKPTA

SEQ ID NO: 24975 - protein, 464 aa, synthetic construct
MARSVTVIPARNRQRETGHRAVQEKKIRVAAYCRVSTDQEDQLHSFEAQVDYYTKYINDHENYEMAGIYADEGISGTNTKKREQFKRMIADCEGGKIDLVITKSISRFARNTQDCLAYSRKLKNLGIGIIFEKENINTLDSTGELLFTILSSLAQDESRNISENCKWGIRTKFKNGEMHLNTFKFLGYDKDENGKLVINKEQAKTVRRIYRDFLIGINPAQIAKELTEEKVPGCNGQTKWYPSTIVGILKQEKHMGDALLQKTYTADFLTKRQVKNNGEIAQVYVKDSHKGIIDKETWNAVQEECERRERFMKDHGTDRYSYGADCIPFCEKVFCGECKSLFTRHSWRSRGIVQWQCKNHRKDGKVACTNAYVDNADLEKGFVKAFNRLVTDRDKHMERWQQMKSDGTPLEKIRAGQMMEAVGNEPLTRFVPEIAQLVLAEVTVFGAKKYEFFFLEGSRIKVSV

SEQ ID NO: 24976 - protein, 485 aa, synthetic construct
MPTSDLKIAAAYIRVSTDDQEEYSPDSQVRLIREYARKNGYLLPEEYVFQDDGISAATARKRPAFNRMIALAKEKERPFDAILVLMFSRFARNREESVLYKGLLRKQGISVISVKEPAVDGPFGTLIESIIEWFDEYYLINLSAEVKRGMSEKFLRGEAMGTAPFGYRIDSANKTFTVDPERAEIVCDVFRSYADGAGLRDIAVQLGDAGITTRRGNRPDSRFVEYMLRNPVYIGKIRWTPGHKTRYSRVHIADGVEVVDGKHPPIVSMDLWEAVQRRMDQRKAAYGKYQRQAPAAWMMRGLVRCSACGATLIMAGRSSSCPFLQCHSYAKGSCHMSHSLSLRRANAAVLAGLQRSVGTLTFHMVPHLTSAPSRAADYGRLLEQERRRLARCKDAYQAGVDTLEEYRDNKARLEERIRRIEEQAASAAAAPESFDKAAYGKKTADILRFLETSADEGAKNEVLRSVVDHITYEKASRHLAIYFYT

SEQ ID NO: 24977 - protein, 572 aa, synthetic construct
MASRIAEKLAAKKAAIYIRVSTHWQVDKDSLKVQRRELIAYVTLVLGITDYVVFEDPGYSAKNTDRPEYQAMMDRIRTGEFTHLVVWKIDRISRNLIDFAAMHDELQSLGVTFVSKNEQFDTSSAIGEAMMRIILIFAELERKTTAERVTAVMLSRASDGQWNGGRVPFGYSWSKETKTFSIVPEEAKAIRRMAELYEQYQSLLYVAKYLNDAGIVTKTGGQWTPTTVRTILTNPWYIGQYVYNVHSDGKGIEKRDSDEWITVENHHEPILNEDVFCRMKFLLTRNKRGGVPSHKTYVRKNIHIFAGLLRCGQCGSNMTANLDRRRANGFRPSQYACGSRRRKGTSCTNKYISDTTLGPFILNYVANIIRASKNSSDTTTPEVLERKLLRGEAFEDVASVSTDALGQLLDAFRSAGDAVEYRPQIAFSGDDNSIREIDTLRARRRKLDNALARLNALYLYDDEAMPEKDFVMQRGQITKQLEEVNARIEELQNQESSEELGDDFISKASYYIMANKLIEDRYIDYEKYIRAIDPSIPRSFLQQIIDHIVVNDGRVISITFKNGSTHTFAYKT

SEQ ID NO: 24978 - protein, 468 aa, synthetic construct
MARQIVHIPAQRNIANRAVAQNTKIRVAAYCRVSTEQDEQLNSFENQVTYYTEYINRNPNYELAGIYADEGISGTSTKRREQFNRMIADCEAGKIDMIITKSISRFARNTQDCLNYSRKLKDLGIGITFEKENINTMDSTGELLFTILSSLAQDESRSISENCQWGIRSLFKQGVVHINTNRFYGYDKDEDGRLVINPEQAKVVRWIFESYMDGINPDIIARRLMEQGVPGCMGEPKWTVDTIMGILQNEKHMGDAILQKTFTADYLTKKQVKNEGQLAQYHVKDDHEAIVSKELWEVVQLEIQRRKEYMKRYGLRTMGRNTDEQPFTNRVFCGVCGQLFWRRTLYRLNGSIKAWMCASKCKGKEVKGCINDTLLETDLHKAFVMAWNAMLENRDDFLERWKTQLNDQNPLVVFRAKQFIELTEKAKPMKELDVSIVSKTLDHCDIKPLGVIDFYFLDGSHIGLVTQD

SEQ ID NO: 24979 - protein, 412 aa, synthetic construct
MRIKVIKPTAATENKRLKVCAYVRVSTDSLEQEDSLDNQTAYFQDYIRSNPAWEFVGIYADQGISGFKENRPQFQQMIADARAGKIDLIVVKSVSRFARNTETVLKFSRELKSIGVGIFFELQNINTLSGAGELMLTIIAAFAQAESQGASDNANLTFKRKFEAGIPVHDLKYTFGFDTDEGGNTYIVEEQAKTVRLIFDLAHKGVWPSKIRQYLNKHGIKGCSGGKWDDTGVHRVLHNPAYKGALVLQKTYLDSNRIRHKNEGQKDQWFIADNHPAIVPPEQWDEVQEILLARSESLAPKPPQKPPKPRSSRNQYPLTNKLFCPLCGQKLHHKWSNKGRNEYWVCSTNIKVGAKACKGIWLPAEIANSWGEINEPTTVIGYKDEYGMQQFTAYPKAEYELSDECPYTRKED

SEQ ID NO: 24980 - protein, 448 aa, synthetic construct
MERIIQKVTPPARKKAPKLKRVAAYARVSSGREAPLHSLSAQISQYSGMIQKTPGWQYAGVYADEALTGTKDSRGEFQRLLADCRAGKIDMIITKSVSRFARNTVTTLRTIRELRLMGVDVFFEEQNIHTMGEDGELLLTLLAAYAEEEARSVSENQKWRIKSNYEQGLPWSITMYGYRQINGRLEVVPEEAEIIRLAADLYLEGYGRCKLEDAFAAVNIKGRHGANMGGNSIVDLICNEKIVGDMLLQKTFVVDPITKEVRKNNGEKPQYFVEGSHEGILDRETYEKVLAERARRASAYKPRSGSYERNRFPFSGKIHCGKCGKSFTRKVLNGNTPYEKRGWLCRTFNQKGKAHCDAKQIPEEILKRVSAEAMGLPEFDEAAFAAKVEEIQVPENGVLVFVFYDGHTVTKTWDNPSRRHSWNPENRQRARELALRQAAERRLAKCQQ

SEQ ID NO: 24981 - protein, 537 aa, synthetic construct
MPAVTAARVTVIPAKKDRLPINVLSSEARKLRVAAYARVSTNNEEQLTSYEAQVDYYTRYIQSKDEWQFVEVYTDEGISATNTKKRDGFNRMVADALAGKIDLIITKSISRFARNTVDTLTTVRKLKEKGIEVFFEKENIRTLDGKGELLITIMSSLAQEESRSISENVTWGQRKRFADGKVSLPYRRFLGYEKGSDGLPVIVESEAVIIRLIYRLFLYGKSPSAIATYLTDEGIPTPGGKKVWRAKVVESILTNEKYKGDALLQKKFTVDFLTKKQKVNEGEVPQYYVTNSHPAIIEPELFDLVQYELKTRKTDGRFTSCLHPFSGRIICGECGGIYGSKVWHSNTENRSLVWQCNEKYRGQHCSTPHLTEGEIKAAFLAAFNIVLGNRDEIIEAYEEVIAALTDTADLDAEQETLENESEVVLGLIQKIISENAQTAMDQEEYNRRYDAYSERFEAARKRLAEIAELRQERNAKKTRIRLFMENMNSHQELVQSFDEELWYSTVDYVTVYEDKRLVFTFRDGRQVEITAELWRAA

SEQ ID NO: 24982 - protein, 572 aa, synthetic construct
MRKRIVGYARVSTEKQDLERQKILIREYCSNNNYDLVKIISEKVSGAKKDRESINELLAVTKDTADMVVVSELSRISREKECLTVLNTINDILENGLDVLFLDDTSKVYSAYTELNVIDIITLTVKAHSAAEERDKITARMRTGKITKLNINPYMYTGSLVPYGFKVIDNPDYKGQKCNIPARKLMVIDESKTKDVQFIYQLVLNGTTLRDAAEEVNKLGLRTQLNKPFCETSISKMIKNPIYNGRRRFKGLNLPLMDKIISDNDWNRAQICVSQNQLFKGKTTKNFNPLKGLVFCPCGYALMLHKMIRKDGSGYFVMTCCKKNDKEYRKKCRNSGIVSHVLLPTVWKCVKDTLLLSEYTTKTTSEVHRINGIIEGLEDRISGLIDEIDSHKKEMARLSKAITLVTVKGLITQYENEYVTEEAKVTEIEAKINNIRDEISNYKANITKINSITYNSQLTNLTDQEKASVYQKVLSKVVYYSIDYFRGFIVISYKNGLENIIAINKTTTGYISPLPSSFSFNAETRKIRVTIGKKQTSIKEFSLSDIENIEYSFKELEANFNPQQWDIQSQIL

SEQ ID NO: 24983 - protein, 500 aa, synthetic construct
MRMCGYARVSTDEERQLDSLEHQMEFFSDFAKQNGHHLVNVYTDEGITGRQLKKRDAFNKMLSDSKLGLFDLLVVKDVSRFARNTVDLLTSIRQLKSRGIDVIFVNNSQKVLGESEFIITLLGAVAQEESSNLSKRVKFGKNITSKKGRVPPRIFGYDRIDNFTMEINEREAEVVREIYHLYIDEGLGCRLIAITLAEKQMKTKFGNDWNQRNIRRILENPIYSGHYINHRYTVVDFLEGTTKALPKEQYYHHDRPEWAIITPERFQQAQEILEQRRKQYATEYTHFTGRYSNRHLFSTLIRCKECGRAFSRRVTHYPNSDYIYWRCPTNNQYTAKRCSNNTIVREDDLIETLSTYLREVVSNKESIAQEIARKFKEANAVEGSKPDAQTLEAKKVKLKAKLEKYMEMYANDVITMEALKSKTAEINESINVIDDQLILLEGQRTQERTIESITNEAMTEIERFLSLQSATNMDLRRIIDSIIVDDKKKVKINLKITGNL

SEQ ID NO: 24984 - protein, 527 aa, synthetic construct
MKKFKFPIDLSMLTEEEINQFREDPSTLFQGDTDVCLYLRFSSERQKEQSIEGQLRDCIAYCKRKNYRIVAIYVDRATTARKDVEKRVHFQEMITASVHQTWKLVIVWKLDRFARNREDSAVFKMRLRKNGVKVESATEGISKNPEGIILEAVLEGIAEYYSADLSQKITRGMRESALKCHSIGGHVPLGYKIEDHKLVINPNTAHIVQEAFELYANGETVADICRMFNAKGYRTAKGAEFNRNSFKSMFRNRRYIGVYRYKDFEKEGGVPPIIDKDLFETVQKRLSANAEAPARGKAKVDYLLAGKLFCGHCGGSMNGESGTSKTGAVHNYYACYTRKRQHSCDKKPLRKEWIEQIVAQDAMELLTDDAIQEMADMAISQTEKDLRENTRIPELSERMKETESGIANITKAVEKGIASDALMSRLVELEKEKKNLLRLIAEEEKYVCKIDRDQIVYWLTKFKDGNIEDENFKRIIIDLMVNSVTVWDEPDGFRITTAYNLTSCKNKTFRIPSSSDKGFGFEGLEST

SEQ ID NO: 24985 - protein, 540 aa, synthetic construct
MEQKKRVNCLYRVSTIGQVEKDDIPMQRQFCREFIASHPDWVLQDEFYEKGVSGFKKSAKERDAMQELQQEAVAGSFDILLVYMFDRLGRRDDETPFVVEWFVRNGVEVWSAVEGQQRFDNHVDKLLNYIRYWQASGESIKTSVRVKTRMEQLTKDGCFTGGIVPFGYKLQKQGRINKKNQEVNDFAIDEDAAEIVRFIFYKYVNEGYGAQRISHYLLENGIRRADGSMIPNTTIVRMIKNKLYMGVISNGNAESEIIPELQIVDEATFRRAQELMEKRTTHHADTPLNLRGSSLLVGNIFCGHCKNRLTLTTSGKKYIRKDGTVRNQVKSRYQCHFKARHPDLCDGQSGYGVIKLDEIVDALVRYQLSRIRVSAKDSLIAEQHEKAAALARSRYKMSAMRLVEKQKELSDYEAETINVIRGKSRLNVDLLNSLVAKCKEEIAELSQEVDAQKADMEHQLESAAQEQAEFEKLESWADLYDNCTFEAKKMIVSQLIKAVYVYRDYRLEVEFRVSFEDFRRLCVGCEPNGGKIATVESARF

SEQ ID NO: 24986 - protein, 572 aa, synthetic construct
MASRIAEKLAAKKAAIYIRVSTHWQVDKDSLKVQRRELIAYVTLVLGITDYVVFEDPGYSAKNTDRPEYQAMMDRIRTGEFTHLVVWKIDRISRNLIDFAAMHDELQSLGVTFVSKNEQFDTSSAIGEAMMRIILIFAELERKTTAERVTAVMLSRASDGQWNGGRVPFGYSWSKETKTFSIVPEEAKAIRRMAELYEQYQSLLYVAKYLNDAGIVTKTGGQWTPTTVRTILTNPWYIGQYVYNVHSDGKGIEKRDSDEWITVENHHEPILNEDVFCRMKFLLTRNKRGGVPSHKTYVRKNIHIFAGLLRCGQCGSNMTANLDRRRANGFRPSQYACGSRRRKGTSCANKYISDTTLGPFVLNYVANIIRASKNSSEATTPEVLERKLLRGEAFEDVASVSTDALGQLLDAFRSAGDAVEYRPQIAFSGDDNSIREIDTLRARRRKLDNALARLNALYLYDDEAMPEKDFVMQRGQITKQLEEVNARIEELQNQESSEELGDDFIGKASYYIMANKLIEDRYIDYEKYIRAIDPSIPRSFLQQIIDHIVVNDGRVISITFKNGSTHTFAYKT

SEQ ID NO: 24987 - protein, 446 aa, synthetic construct
MDRTVQKVQFESPRPIELIKVAAYSRVSSGKDAMLHSLSAQVSYYSELIQNHDGWLYCGVYADEAVTGTKEDRTEFQRMMDACREGKIDLIITKSISRFSRNTVTLLNTIRELKLLGIGVIFEEQNINTLSADGELMLTILASYAQEESLSVSENCKWRIRSDFKQGILPMFVQNIYGYKRTKDGGLEIIPEEADIVKRVFSMYLDGLGTLKISKILTESGVSGSNNGKWSEKKVRYILSNEKYVGDLLLQKSFSTDHLTKHRKRNQGEKPQYYVQDNHEPIISRQTFDAVQLEIERRRKRYCRMTETKKYEFTGKIECGICGKNYRRKVTATGIVWICSTFNNMGKKECASKQIPDETIRMVTAKVLGIEKFNTEVFEEKIDKIIVPQANRLLFLFNDGHTIEREWKDRSRSESWSKAMREKARQKALERKTDNGKNSNGYTGND

SEQ ID NO: 24988 - protein, 531 aa, synthetic construct
MAKTVTVIPATINPLTRLPAFSIQKRRTAGYARVSTDKDEQFTSYEAQVDYYTKYIKEKPEWEFVKVYTDEGISGTNTKKRDGFNLMIEDALNGKIDLIVTKSVSRFARNTVDSLVTIRELKSKGVEVYFEKENIWTLDSKGELLLTIMSSLAQEESRSISENITWGKRKSAADGKVSLGYKNFLGYDKGENGGLAVNAEQAVLVKRIYREFMHGKTSCMIAQELSSENIPTPSGKSTHWRVSVINSILTNEKYKGAALLQKSFTVDYLTKRMKTNEGEVPQYYVENSHEAIIPPEEWEQVQKEFVRRKAMGRKYSGNSIFATKLICEDCGAFFGPKVWNSTSEKYRRTIWQCNDKFKGEDRCKTPHVTEESIKDAFVKAFNILFDCKPEIVANCRTVAEHLTDCNLIDEKIMNLKQEQEVVAELIRKCISENASLPQDQKKYLKKYNDYAERFESISAKLADLNNEKILKKARRDAFNKCLKTLSEIDGCIEVFDDELWLATVDKVIIKSDGEFKFIFRNEMEIEVMSTK

SEQ ID NO: 24989 - protein, 567 aa, synthetic construct
MRQSKNKKREVTAALYVRLSRDDNLEGDSYSIGNQKKLLTKIAKEKGYTNLLIFCDDGISGVTMDRPDYIRMIEAIEGNKVSAVFVKDLSRLGRNYIEVGKLTEEFLPEHDIRLVAVSDNIDTAEGENELAPIKNLFNEWYARDISKKRRISNKIKGNAGEPMGMPPYGYMKNPDGSKSWVVDEEAAAVVRRIFSMTMDGIGPHQIADILASENILIPTSYWQSKGIGRPGTKNTLSCQWKSSTIVSILTKQEYCGDVLNFKTYSKSYKNKKRIVNDRENWVVFKDVHEPIVDRSVWETIQERRSRKTRKKQKSDGEKNMFAGLLVCADCGSNLWYHFNQANPEIEYFNCSGYNKGKRKICNSTHYIRVDFLEKVVLGEIRRLTKLATQYESEFAKIVMGHSIKAAEQERQLKQKELNILNARNDELDNLFEHIYEDNVSGKISDDRFAKLSVKYESEQKEITARIKELETELNTEKSKAVTADMFTASVRKYTRARKLTPRMLNELIEKIEVHQSEKIDGKTVQQLTIHYNCIGNIEIPDLEKLPENNVSVHTRQGVDVHFAACAS

SEQ ID NO: 24990 - protein, 628 aa, synthetic construct
MKAAFLIRCSTKNQDLNRQTRDLTRLAKSMGYEYDLENLVYGEKITGKDDVTKKNRDSIDRLLRAAKEQRFDVVLVSEVSRMSRDPASGRIYVRLLINMNIPVYFKDIDLWTINPETGKKVRDAELVIGAAFDAAWKYLKSMKTQIASARRNELDNNRISIGQPYFGYKRYEGTDKSKKNQIVVNEEEAEVVQAVYNEYLKEGATLKSTALAITDKYGEKLNRKFSLGTIEHILTYESYATGIKKVNLKDPDTDEVEVFDVSTPIIIDKELYEAAANKRKKNRVKDEPYPNQQVYLLSKLIKCPDCGYTLTPRRKAGEFGQTYRLVNGKPAVSWLCMSGINNITDCTNRTSIANEKLEPIIWELVKKELIGYANMNDEKREEQIRECEEKIEYQNYSIQNFTKEIDKLKKRLSTAYQFSINAAEMAGDDEDMRTMAMEEFNRTAKGVRQEMKNFEKSIEQAKGELEKLRDLKTFYSQPTLPKDYLEQIEGNFTEKRNLVKQLITKIVPYRITTFKKKERESGVKTCNKMITVKNGAVLLEVYTIGGVYNVFYNANSKFQVKTAYYVHGEYATFQNGIRKYPAYNEGEYFVISNANMVMETDDIDEVVTVNEFVDIAIANNWVIEYQYQ

SEQ ID NO: 24991 - protein, 494 aa, synthetic construct
MRVVGYARVSTREQADHGYSIGEQNSRLRAYCQAKDWTLLRVIEDPGFSGAKMQRPGLQQVLEMVRRRECDAVLVWKLDRLSRSQKDTLYLLEDVFLANGCGFVSMLENFDTSTAFGRAMVGILSVFAQLEREQFKERSAIGRVGRAKAGLFHGGGYAPIGYDYYTKEDGGQGLVVNEYEAMQVREVYRLYLAGWAVHKIQVYMHERYTTKNGCWASDTTVRSVLSSPIYLGRITWAGKTYEGQHEALISQNDFDQVAARRESLKWQPAEPRAACDLIKNSPFRSTHILGGITWCARCGARYFASGNYSGRGENRKYWPYYTCYSVAKSSKKMIKDPNCKNKRWAVGKLDAIILAEISRLEFDPAALAKAAGPVDVSGVEEKRRVLEARVAEVRPQMERLLDLCQTGGLPVASVSGRLAALQKELDALNRELSGLAVPETVDRLAVAQEMLAGASAVIENGTPEQKRALVHSLIGRIDIDGEDITIHWLFAPEN

SEQ ID NO: 24992 - protein, 545 aa, synthetic construct
MNIAIYPRKSKFSPTSESIANQVAMCREYCDRCFDDPHYLVYDEDEGFSGKSTNRPAYTQMIEDMRAGKFQVLCCYRLDRISRNVRDFAELLDDLQRHNIAFVSVRNNFDTSTPFGRAMVYISSALAQMERETLAERVKDNLYEMARSGRWLGGVTPLGFVAKAQEVHRDDKKRKLLMLSPVEEELAQVRDLFDHFLRLGSVTKLLQYCLEHRIVSRNGNDYSRTTLRLLLTNPVYCTADAEAWAYFSSGDYQLCAQREDFDGVRGIQPFARTRKDDGGTVSRPTSDWIIAPGLHRGILPGAIWVRAQQILQDNRDLGSAYRAPRTENALLSGIIRCAGCGAYMRPKAYGKPLPDGKRRFSYVCLTKIDSCGARCAMPNAPGRDVDALVIKELTSLTSDGGAISTLRSEARLAQGEARRTHAEAVATHEKAIASMQKKVDKLVDALAAGAPEGARQRILCEIDRYEQEIEQHRDALSELNASVLLDTDPSALLDAAFSALESFRTSFSSLTHDEQRRAIRALVDRVTWDGKNVSIEVFGEKTLPK

SEQ ID NO: 24993 - protein, 511 aa, synthetic construct
MNIAAYCRVSTDKTDQLNSLEAQKAFFAEYTQRTGDNLVRLYADEGISGTKTKNRKEFLRMMTDAEHGLFEMVVVKDISRFARNTVDLLQSIRKLKSLGIETQFLTANMTSMGNSEFVLTIFGALAQEESANTSKRVKFGKKMNAEKGRVPNIVYGYDKTIGDYFNLTINQEEADVVRQIFYWYTREGYGSAKISILLNQRGLKTKRNCSWNQNGVRRILNNELYIGKIINGKEEVIDFLTGKRTERNEEDWLIVDRPELQIVDSETFEQAQQIMASRTELFKLSHERQSNKHLFSTLIRCKECGWSFRRTVRTYKNTYVRWVCSHHNGRGESECSNRITIDEEELVTVLQEYFANLLRFKKDVILYVIKEFQRVYRAKDENVEYEKELNAQIAKLQKSRQKYMNMYADDLITREEVNEKIGGMRKEIERLENELKMVAFHLTKAEHLEAVLRQTFKEIEDIADVRQMTNAQLKRIIQKIEIDKDGNVDIYLRLFSDLGLEETVLVNDICT

SEQ ID NO: 24994 - protein, 434 aa, synthetic construct
MERIVERVDSHIPVQPRALRVCAYARVSSGKDAMLHSLSAQVSYYSNLIQNHSGWLYCGVYSDEAMTGTKSQRNDFQRMIEDCRKGKIDLIITKSISRFARNTVTLLQTVRELKSMGIDVYFEEQHIHTISADGELMMTILASYAQEESLSASENQKWRVRKAFENGELINLRFLFGYSITADGVQINEKEAAVVREIFSRFNGGESMSSISRDLNARGYRGALGGKWCAERMRNTLSNEKYLGNALLQKRYRNNHIEKKLVANKGELPMYYAEGTHEPIIDSATFEQAQERLRKIALQTANRKKPSRSAFSGLIRCGICGNTYKRVTYRGRHFWNCTTFQTKGKSECTAKKIPEDTLVALALEVLGIDRLSTKVVKSKITEIRAEKSNVVVFCMEDGSEIVKRWKDRSRAESWTPEMKEQARQRALQARRKKE

SEQ ID NO: 24995 - protein, 529 aa, synthetic construct
MSRTAARSVTVIPPTINPLTHLSKVTMQKRRVAGYARVSTDSDEQFTSYEAQVDYYTQYIKRNPEWKFVKVYTDEGISGTNTKHRIGFNEMIADAMSGKIDLIVTKSVSRFARNTVDSLVTIRKLKEKGVEVFFEKENIYTFDGKGELLLTIMSSLAQEESRSISENVTWGQRKRFADGKVSLPYKQFLGYRKGEDGFPEVVPEEAVIVRRIYTRFMEGLTPVAIAKELTADGIPTPAGKQRWQTSTVESILKNEKYKGAALLQKCFTVDFLTKKKKVNEGEVPQYYVEHSHEPIITPEEFDKVQIEFERRKRISRQYSGKSIFSSRIICGDCGAFFGSKVWNSTSKYRRVIWQCNGKFKGDHKCETPHLDEETIKARFVTALNAIIDSKDGILEDCRLMQATLTDCTGIDTEIESLLEEIEVVTELTKRCIAENSQTAQNQEEYTARYNGFVERYEKAKAQLEQLRATKAEREAQADAIGAFMFEMQELDTLTEFDEKLWLTVIDTVTVHADGRMTFKFRGGKTLTSY

SEQ ID NO: 24996 - protein, 541 aa, synthetic construct
MKESPPKVITIPAKPEVARRQAIQRQLRVAAYCRVSTDDEEQLTSYEAQQNYYTDKIMTNREWTMAGIFADEGITGTSARKRPEFLKMIRLCKQKKIDIVLTKSISRFARNTVDCLNYIRALRELGIAVIFEKENINTLEADSEILITMLGAFAQAESESISANVRWGKRQAMREGKTIIQYNRLYAYEKGEDGKPKIIQEQADVVRSIYDQYLSGASLRMIKDRLEAEQIPNVTGGSQWTITAIRSILTNEKYCGDVLLQKTYISDCISRKVIRNTGQLPMYLVQNHHEGIVERKTFDAVQAEMARRSAGKSPSKKNAPTGMTSYASKYALSERLVCGECGTLYRRCTWSKQGRKRIVWRCVSRLDYGTKYCHNSPTLDEEPLQKAILAAINSVMSQKSTLIRQITSAMEMELAPVPGESMSLADIERRLDELNDQTRELVAEAARAEDASACTAQLRAIMNEAAALKEKRAFIEEQRQSNAQALRRIEDAAAAMAQASTHISKWDEALIRQLVDTVKVNSAEKITVFLRGGIQVEQDMI

SEQ ID NO: 24997 - protein, 535 aa, synthetic construct
MAEKLMTDGSMALREKQYRVITIEATEKPQNAKLRVAAYARVSSASDDQLNSFAAQNRHYSDLISSKENWRMVDIYADEGITGTSAEKREDFQRLLADCRRGLIDRVLVKSISRFARNTKECLETIRELKSLGVGVYFEKENIDTATMSGEMMTALFASFAQAESESISGNMRWGIQKRMQAGTYIPANLPYGYTLQDHSIRIVEEQAVIVQRIFKEYLSGKSTERIASDLREEGIPCKSGEVAWDSTAIRYIISNEKYIGDSVWQKYFSTDTLPYKCRLNRGQKVSYYAYGTHEGIVPKEDFEKANALMKSRAQKITLTKNSPYAFRKKIVCGDCQSLFRRKVVRGITYWVCIGHDKKRHGLKCGITPIAEDEITNAFIRLYYKLKHHGEPILMGMTTSLQAIRNRRMLWSLDVIELNKQISDLTSQNQMLATLKQQGLIDPDIFIAQSNELTEQLRAVKLKKERLLAVDGDNTISQTRELMEILDDGPDFLDSFDAELFGELVETIIVESNERIRFRLKNGLELSETIERTVR

SEQ ID NO: 24998 - protein, 456 aa, synthetic construct
MRNKEIAPALVRVALYIRVSGEEQKIKGLSLEAQQERLEAYARERGWVIVGIYIDAAKTARKNIHKRTEFQRMMDSVKRDEVDILLFARLDRWFRSVADYYKVMEILQAHNCDWKTTDEEYDTTTANGRLYINVKLSIAQNEADIDGERIDVVFDSKIAHGTVVSGSAPFGFRVNEEKRLEVVPEDAAIVQDAFNYFENTVSQRATVRYVRETYGVNWCDATFRRMLKEKLYTGVYDRGGRYNDQFCPAIIDRQQFDRVQALLTRNVRSAPSGKVYIFTSILTCAECGHKLVGYKSSDYFYYRCNQHFQRGRCSHNHSAREDVVEQWLFEHLGEELDRCQLEWDVEAAKKKASVARTDKVALKRKLTKLKELYVNDLIDIEDYKKDYQIYVSALNQIPEPAQEAPPDFAAVRRLLDNSFRTIYDTLTREEKRTLWRSVIKEIRIDNDQNITGVVFG

SEQ ID NO: 24999 - protein, 589 aa, synthetic construct
MKSVFKTLDRNRPRKMVFYGRVSTEHEAQLAALKNQMQWYDDQERYHPNWTVVDRYIDEGITGTQAKKRPAFMKMLEDARQGKFDLIVTREVCRFARNTVDALVSVRELKKLDIEVYFVEDNIWTLDGDGELRLTIMATLAQEESRKISERVLAGQAISRQNGVLYGTGNIIGYDRVGSTYVINEPQAEIIRLIYSMYLDGYGEKAIVNELTRRGCQNGRGEVKWDCSKVGRILKNATYKGYIGYNKSVTVDFLEHRRITNHDTSQHTLIKGDFPAIISEEDWNRCAEIRESRIQSMPQLGGGTRKFGRNPSKFLWSKKLRCSCGCSFQRFHWRTNKRDGKEVYGYQCYSHRNGASLQYMMDNGLTDEHTCQIRSICDWKLDLMAKTVLENVWIDRRAAVIEVCKILAQCGKESHQEEHQEHKRLEARAQKLKTRLQNLIEMRADGELSKEEFMSQKSEIAEQLQAIESQRTTIPVQKQPVLNVEKIRDTLNCLIDFTQPKLDEMLLDKVVDRVIPITNDHFRWELNLLSGEHNAVECSIKGRKNKASVSIEETVRSDTLSNISSEKIAPTGGPLDRPPSRTPAKGEHL

SEQ ID NO: 25000 - protein, 523 aa, synthetic construct
MRFFSYGRKSVFSDKSDSIDNQFRMNREYCESKFSGQVDSWQQFSDEDFTGANTSRPDLQRMLSFIKGGFCDVLVVYQLDRLSRDVRDFANIYALLEEHGVMFISIKENIDTTTPIGRAMMYVTVVFAQMERETIAARVTDNMLGLAKKGYWTGGNPPVGYVRKHIVVNGKKHCSIEVDPDGARYVTQIFDTFLAYNCSLQGMETRFKSQGIRTQNGKFFSTAQLHKMLTMPYCVEATPEVYDFYAAKGCIMDPGSPREMWDGSVGVIIYGRSTEKNKKHQAQPPEKWTVCLGKHKPFMPAEKWLAVQSRFTQNKCIKDAKWPVSLLKGVLRCKCGNLMQVSRKKKVDGTCSSWYYCRKRMRQGVDACDMGQIKCDLLDEEVLELFRGITADPALIQKFVKAEAPADVTDLKAAQARVSACERKIGRLAASLALAEDSAASKYIIAEMERLDVELGALKREASLAEMESHRAAASAKDAKATAAEIAKLIHGLDGFDDKEKNAIARAVIQECTWDGERLFIKL

SEQ ID NO: 25001 - protein, 554 aa, synthetic construct
MEKSKRVVGYARVSTEAQDITRQIELITAYCSDRNYHLIKIIQEKISGARKDRKSLNELLDVDDAVADMIIVSELSRLSREDDILSVLSTINELLKQGVDILFLDKQDRIYKAGTILSLYDIITLSVEAKASADERYKIAGRMQTGLRSKLAEFSNMFAGGTVPFGYKVIHNPDYKLNQTPKNLLVVDAKEAEAVKYLFQQLIDGNTIRQTVRVYNKLYPYKLSYSGICRIIRNPKYKGEIYRRGKLYGQISELQIISPEDFDRANKQMRENELFQSNAPKYYNPLKGLIFCPCGCSLYMKPNHNSYLIYRCSSSYNDKQRCENFGIKCSYVLSAVWTCVKATLHTEEYLRFNSRRSNELHEINKQIRETITQKVNIADEQKAQSAALIDKIKRLTNSVLIGELEAEYNLLQNKLKQTEQEITELNGRIAENDAEIQKSVEQKDFSQMEQSALYKEKLQKVVYHSLSAMRGILEIIFKNGMIRYVLIKKHRNGGVFLLPEFWTVDISRAVIIIPTHPSVDPEHPYTLLPTIPREYTFDTIITERDMDEYRITVS

SEQ ID NO: 25002 - protein, 529 aa, synthetic construct
MKFTSTWKIADPLAQYIIYLRKSRKDMEAEALGQTDTLKRHRAALLSLSESRGLNVVEICEEVVTGDSIAVRPEVQKVLQLVETGNYAGVIVMEVERLARGDTIDQGIIAQTFKYSDTRIITPNKTYDPNNEMDEEYFEFGLFMSRREYNTIKRRLSRGKEASLREGKWISGKTPFGWLREKLPNDKGYKLVPHPEQAPVLQQIYNWYTGDGCARIGAKAISTRLNSLGVPTNSGSLWRADSVLDILRNPANAGWIKSGGRPETKRIVDGSVVVSRPRTRQEDLKLYKGLHNGLISQEQYDKAVALSYSSASPRGKGAWGTVTSLAGLVRCDQCGRVMVRRPSSGNRRDTLLCPSYGCTTVSAWYDDVEDAVLDALRGWLRELELGEAAAPDDTPMRTALESSISADRKQLAKLEAQEARAYELVETGVYTPEIFLQRSQALSADKQVIVDRIEASQTTITELARAKQARARLAPAVRRVLETYPLAASPQEKNALLKTVLQKVLYHKQTKSYTKSGSDMHVTLYPLAD

SEQ ID NO: 25003 - protein, 527 aa, synthetic construct
MPELYDIYLRKSRADRDAEANGGGDTLLRHRTALLDLARRMDLTIFHIFEEVVSGESIANRPEMQKLLAEVEGGSIAGVLVMEVERLARGNTRDQGIVAETFQYSGTKIITPLKTYDPADESDQEYFEFGLFMSRREYKTINRRLQRGRMASLQEGKYIAAAAPYGYERVKIKGAKGYTLAIVEDRAQVVRHIYDMYINGLRQPDGSLRNIGSSVIAKQLDREGIPSPSGGRWAPYTVRDILSNPTYAGFVRWSWRPTVRKVVDGVLVETRPVNKAMALTDGLHPAIIPREQWQRAQDIMASRAYLPMPGNRTMVNPLAGLVYCEQCGRSLVRTKGRRGNAKDMLMCPNKDCTCKGSTLDEVEGVLIHSLERWLQAYRLKVKPVKGPRKRSNTSHLERTLDAARRERDTLAGQKGRLYDLLEQGVYTIDVFTQRQFELATRISAAEQAIQEAKQQLDAERQLDELRLSIIPRVERLLDVYQQLETPQEKNEMLKTCLERVEYRKTQGGRYAPSDMTLKLFPRITPIR

SEQ ID NO: 25004 - protein, 542 aa, synthetic construct
MKKQPTGGKRLVAYYRYSGGSHQTEQSIEGQRRDCETYARIHGMVILHEYIDRHISGKTDDRPEFQQMIADAGKGMFDYVICWKTDRIARSRYDSIVYKKKLRDNGVELLYAAEANVEGSGGIIVEGLMEALAEYYSAELAEKVRRGMRESALKGKAIGSSRPLGLTVDKDKKYIIDPAGAAAVRYIFEQYAAGAASSSIVAHLNEQGLCTSRGNPFNKSSVVRIIQNEVYRGVYVSPKFDVRIEGAVPAIIDDDLWERAQKMFIRNRQSRSPRNDRADYILSGKLFCGECGTAMKGVSGHSSNGEVYFYYNCPCKDCHRRNIPKDELEGLVIRTVCNDVLQPDVMDCIADSVIEAQTAELNQPNPEKEALQHELADVQRKAKNLLAALENGTAGAMLTNRLAELEQQADTLSYQLSSLESEPKFPVFSKEEVLYLLEQFLIAPSEKTKAYRRRLIDTFVSKIEVSNTELTIYFNIAEEDCGKMKKAPQSNQPEGCSTEKQMVHLLLPQSNFSIFILPTYFYIAIPIFQARKSISVESVTNL

SEQ ID NO: 25005 - protein, 421 aa, synthetic construct
MEIQIRGGSRGQKRKLKVCAYCRVSTDADEQENSLENQVRHYETVIKANPDYEYAGVYSDFAISGFKEKRPGLQKMLADAEKGKIDLILTKSVSRFARNTSIVLEATRKLKELNVGVFFELQNINTLSGEGELMLTILAAFAQAESESGSTGAKMVYQRKYEAGIPVQYLERSFGYTKDERGVFVADEAEAVWVRKIYEMAAEGYTPASIKRYLNENGIKTVGGVQWVDSTVFRLLENEIYKGDYIMHKHFVNEERKLVRNRGEVDAWYIEDDHEAIVSPELWQKAQDALAAKRDYLAEGSVIEEFTEENYPYMNKIYCAKCGYPLYKRIYSKGNRLNWGCSGTKRYGKTFCDGINIPDGVLRSAWHFKENTYIAEKASDKGVKEFTYLKEQSWKRRHKKKQPPAIPENTEAEYPYREKIF

SEQ ID NO: 25006 - protein, 538 aa, synthetic construct
MQENYIVGIYARLSRDDERAGESVSIENQKEMLSRYVREQGWTLYDYYCDDGVSGTTFDRPGLNRLVQDATDHKINLVLCKDLSRLGRDYIEAGKYTDFVFPSLGCRFIALNDGVDTLRKNNEMLVILKNVMNDLYARDTSSKIKAVKLSTFKSGKYVGCYAPLGYKKSEADKHVLEIDPVTAPVVRHIFDLRLQGHGFRKIALQLNAEKVPAPRSFYYMAEGRENLRGETPFWNDVTVKTILRNEVYIGHMVQNKTGTVSYKNHKQVSKPESEWIKVENTHEPLISQETWDAVQRMDNHPARGRSGKSGTVALFGGLLRCMDCGSSMRYMRDYRKKVSEKEPEYKAYVCNRYASGGKNACSSHYINQKVLTQIVMTDIRCKAMWAQNSRETLRTQLLAREQNASVERTRTLQAELNAIGKRLPELDKLIQSAYEDKVLGRIPESVCVNLLNRYEAERREKQERRKELTEQLAARLETESSVDAWLDMMQDYAQLEELDRPTLVRLIQKIEISERYTVDDHEERDIHIYYNFVGYIEA

SEQ ID NO: 25007 - protein, 700 aa, synthetic construct
MDSNAFLNDLMSKMKLPEAKGKKKAEQSESVAQILAAMQKVKTEKKKPPVTSYAPTKEMPVNELESMEEFSQLASDVMQECRPAIPAVKTSISEKTVRVAAYIRVSSTNPAQEDSYEMQERYFMSLLAGNAGWTSAGIYSDHGISATSREGRTGFNRLLRHCKQGKIDRVICKSISRFARNTQDFLVALRTLKENNVTILFEREAMDTADAYSEFILTTLAAIAQEESRSISANIAWSNQKRFPAGNVCNKDIYGYEFRKGEYTVNENGYRYRAVFIIPEEAEIVRMVFRLFTKEELSFTQIAQKLDALHIPPPNSGCRQRQKRKPTVLPAGALKEEDKRGWTATDVRYMIANVRYCGSVLCQKTYTDHRNGHKQKVNKGEKPKYLIRNHHPAIISEELWQEAQEVWKAYTAKYRGIEKGRNERNYSKLLLCGECGRYFQGHSTTRTTIWRCATKLAQQGQKRCRMEPIYEEQIQALLRKAFAEKFKLGEKMDAEVHEVMQMISKAPIDNARNQALKNLTEKLREIHDFDHMEQEGDFLKRQLSAVNYSIRDVHQHIRDIQAEKEALKVRCEVLGEPRDKEAVTELENRLLNEEEQLEKLEHEAQQQAEQVRYMEDYWKKLEQTHEIREKTLQWLDSLAGGTQMFLDEAVGTYVKAFVLSVTIFSPKHFRIHWFDDTCTEVECDSVFEGYQQPGMIRRKY

SEQ ID NO: 25008 - protein, 581 aa, synthetic construct
MAYAMKVPAASADDRIVAIYVRVSTGYQVDKDSLPFQKKELKAYCKHILHVDMSRVEIFEDAGRSGKNTKRPAYERMMQKVRAGLVSHVLVYKIDRISRNLVDFSLMYDDFKYNRVTFVSLNEQFDTSSAIGEAVLKIILVFAELERKLTSERVKDIMIGRANEGKWNGARVPYGWDWDSSAGWPVHSKKEAPLARAMYEMYLEVKSTGKIRDYNNAHKIPTKRGGEWTSKTVGDFLRNPMNKGDYRYNYRESARGRKKPADEIVYLEGVFDPLVDPDVWEKVNKIMDSNRDKRNMGGLHPIESNCNVFAGLIQCGLCGSGYLVGKKDKRRKNGFTPSLYYCGAKTRAIHCQNLNVSDVKIGPFVINYISAMVRVSNERRKIKSPEELEEMLLSDKAVFADIMGLSSDSLNTTFELLTGKSATGGALWRADLVDQEGAAADPAEIESLKDQIRKYERAKERLEDAYYFSDDGMSEKEYLEKKNRFDSMRVAAENKLKELTETHIASGVDESAFMKSASAFLLTHKIRAGSHIVYSDLAGMVEEESIKDFFNLVLDHIVVKDRRVTEIVFANGLSHKFIYRD

SEQ ID NO: 25009 - protein, 668 aa, synthetic construct
MAYAKVKKHLKIWTKKKAALYVRVSTRYQVDKDSLPFQRKKLKEYCKFLGLEDYVIFEDDGYSAKNTERPHFQEMMSRVRSGEFSHLIVWKVDRVSRNLLDFAAMYQELKDHKVTFISMNEQFDTSTAIGEAMLKIILIFAELERNMTSERVTGIMLDRAEQGLWNGARMPVGYRWNDETKFPEPDPEEVKIVQLIFDKYEEWKSSIKIARYLNNNNFKSKRGGQWTSKLIHDIIRNPFYIGTYRYNMRESGRGPLKPESEWIVRENNHPAIIDKAQFDRCNKIMDQNGSSRDTSDLRARKYVHTFSGHLVCGKCGANMIASKDRARANGWRPSMYRCAQRSRMLDCDNSRTINESYIGPFIFNYIANLARVQKNFKNIATPEKLERELLKGETFDGVAGILPEGLNLTFQALSFRQVGNGTYIPDIDFLGDSDGASDRDQIELLKSEIEKSKNAVTRLTDVYLFDQDSMTKEEFATKKKELAKKIEGMERQLADLLDDSGNDDLADMSFIKKASAFLVAQRIVSKSFVDYVGMAQELDNEILKDFVDQIVDQIVVLDGRVQSITFINGLKHEFRYTAPVELPVCKKCGGRIGSTCGCRTRTFDFSGKRYQRIKVGDPRDMLHGKKNPVCPECFAQEGRWHHWNCKIEACPICGGRLAECEHGPNGKN

SEQ ID NO: 25010 - protein, 524 aa, synthetic construct
MRQKASPQPTLTRFTAVPITEQRRRKVAAYARVSTDHEEQQSSYEAQLDYYTNVIRNHDGWEFVNVYADEGITGTSTKHREGFKQMVADALAGKINLIVTKSVSRFARNTVDSLTTIRQLKEHGTECYFEKENIWTFDSKGEPLITIMSSLAQEESRSISENCTWGQRKRMADGKVSVPFSRFLGYDRGENGELVVNPEQAEIVKRIYTEFLQGATPHTIAAGLTADSIRSPGGKDRWNPKTVQSILQNEKYKGDALLQKCFTEDFLTKKQVKNQGQVPQYYVTGDHEAIIPEDVFDMVQREISMRKPGPNRHSGVRVFSSTIYCGECGGMYGSKVWHSNDKYRRVVWRCNRKYDGDQPCGTPHFDEETLKQLFLSALNKLVGKRNEIRDSFDAIRSTVFDTDALEAELAQVEAEMSIAAEQVARSIRENAMVALDQSAYRARHDALCDRYESLKARCEELKETISDKQTRLAAIDDFLRTLMKQEALPTTFDPMTYHILVERMTVYSKARVMVRFKNGMEIQA

SEQ ID NO: 25011 - protein, 502 aa, synthetic construct
MEIQIREGNSRQKRKLKVCAYCRVSTDADEQENSLENQIRHYEEAITSNPDYEYAGVYSDFAISGFKEKRPGLQKMLADARKGKIDLILTKSVSRFARNTSIVLKATRKLKELNVGVFFELQNINTLSGEGELMLTILAAFAQAESESGSVGAKMVYQRKYEAGIPVQYLERSFGFKKDERGVYIADEEEAAWVRKIYEMAADGYTPAAIKRYLNENGVKTVGGAEWIDSTVFRLIENEIYKGDYIMHKHFVNEERKLVRNRGEVDAWYIEDDHEAIVSPELWQKAQDALEAKRDYLAEGSVIEEFTEENYPYMNKIFCARCGHPLYKRIYSNGNRLNWGCSGTKRYGKSFCEGINIPDGVLRGAWHFDENMYIGEKQTDKGKKEFTYLKEASWKRRHKKKEPEPIPENTETEYPYREKIFCGLCGSRLVRHVNTKNHKVIWVCNGRKRKGKDFCDGTRVPDTIIKGWGEIKKDIYIQRKDDKNGKKRYSYTSKKPKGADRA

SEQ ID NO: 25012 - protein, 568 aa, synthetic construct
MQSKKKQDKAGITALYCRLSRDGGVEGDSNSVANQKKLLKRFAKENGLSNTRYYVDDGYTGTNFERPGFQKMIEDIDLGYISTVIVKDLSRLGSRYDMVGYYMDTYFPDRDVRFIAVNDNIDSDEGESEIAPFKNVLNEFYARDISKKCRSSYRIRGSTGEPLAPPPYGYIKSPDNPKKWVIDPEAAQVVRDIFKMALEGKSNETIARILQERKVLIPIAYWQEKGIRKGGKVTQPNKYKWCKTTVTKILTQQEYCGDIINFKTYSKSYKNKKRYDNPKENWVIFKDVHEPIISRDDFELVQMLVVKTKRRAPKQENGEKNMFCDFLYCADCGSKLWYHTNTTNKEIHYFSCSNYKKDTRGNCETRHYIRADAIEQIVMLELKRLAKYLESHEEEFAKLLAEKTNADMLAEQKTLETELNRVTARTEMLTSLFAKTYEDNVSGKLSDEMYMELSHKYEVERLELKTKIFEYKERLAKISEMEQNKDDFLKAVRKFMEMESLTAPMLRELIDHIDVYEKEGGKKNYTQHIVIYYRFVGYLELPSSDDENYKANTRKGVDVEYIPTVKSA

SEQ ID NO: 25013 - protein, 537 aa, synthetic construct
MPAVTAARVTVIPAKKDRLPINVLSNEARKLRVAAYARVSTNNEEQLTSYEAQVDYYTRYIQSKDEWQFVEVYTDEGISATNTKKRDGFNRMVADALAGKIDLIITKSISRFARNTVDTLTTVRKLKEKGIEVFFEKENIRTLDGKGELLITIMSSLAQEESRSISENVTWGQRKRFADGKVSLPYRRFLGYEKGPDGLPVIVESEAVIIRLIYRLFLYGKSPSAIATYLTDEGIPTPGGKKVWRAKVVESILTNEKYKGDALLQKKFTVDFLTKKQKVNEGEVPQYYVTNSHPAIIEPELFDLVQYELKTRKTDGRFTSCLHPFSGRIICGECGGIYGSKVWHSNTENRSLVWQCNEKYRGQHCSTPHLTEGEIKAAFLAAFNIVLGNRDEIIEAYEEVIAALTDTADLDAEQETLENESEVVLGLIQKIISENAQTAMDQEEYNRRYDAYSERFEAARKRLAEIAELRQERNAKKTRIRLFMENMNNHQELVQSFDEELWYSTVDYVTVYEDKRLVFTFRDGRQVEITAELWRAA

SEQ ID NO: 25014 - protein, 448 aa, synthetic construct
MERMIQKVTPPARKKAPKLKRVAAYARVSSGREAPLHSLSAQISQYSGMIQKTPGWQYAGVYADEALTGTKDSRGEFQRLLADCRAGKIDMIITKSVSRFARNTVTTLRTIRELRLMGVDVFFEEQNIHTMGEDGELLLTLLAAYAEEEARSVSENQKWRIKSNYEQGLPWSITMYGYRQVNGRLEVVPEEAEIIRLAADLYLEGYGRCKLENAFAAVNIKGRHGANMGGNSIVDLICNEKIVGDMLLQKTFVVDPITKEVRKNNGEKPQYFVEGSHEGILDRETYEKVLAERSRRASAYKPRSGNYERNRFPFSGKIHCGKCGKSFTRKVLNGNTPYEKRGWLCRTFNQKGKAHCDAKQIPEEILKWVSAEAMGLPEFDEAAFAAKVEEIQVPENGVLVFVFYDGHTVTKTWDNPSRRHSWNPENRQRARELALRQAAERRLAKCQQ

SEQ ID NO: 25015 - protein, 521 aa, synthetic construct
MGNVMIIPAKRQVGNISRQQEDKPKLRVAAYCRVSTDSDEQASSYETQVEHYTEYIKKNPEWEFAGIYADDGISGTNTKKREEFNRMIEACKTGEIDMIITKSISRFARNTLDCLKYIRMLKDKNIPVFFEKESINTMDAKGEVLLTIMASLAQQESQSLSQNVKMGLQFRYQNGQVQVNHNHFLGYTKDREGNLVIDPEQAEVVKRIYREYLEGSSMDKIAKGLEKDGILTGAGKKKWWTSTINKILRNEKYIGDALLQKTYTTDFLNKTRVKNNGIVPQYYVENNHEAIIPKDIFLRVQEELVRRRVVKTSANGKKRSYSCNHCFAQLVICGECGEMFRRIHWNNRGCKSIVWRCLSRLEATGMECHARTVNETVLENVVVQAINTLLGDKSTYQAQLQQNIAKVIREAQKNNTDGIDEQLMELQKELLEKANNKEAYDEIADQIFKLREQRENCTVDTAARDTQIARITDLQDFIKQQRTDLAEFDETLVKRWLKQITVWEYHFTVELKSGLSIDIEG

SEQ ID NO: 25016 - protein, 502 aa, synthetic construct
MEIQIREGNRRQKQKLKVCAYCRVSTDADEQENSLENQIRHYKEVITSNPDYEYAGVYSDFAISGFKEKRPGLQKMLADACKGKIDLILTKSVSRFARNTSIVLEATRKLKELNVGVFFELQNINTLSGEGELMLTILAAFAQAESESGSVGAKMVYQRKYEAGIPVQYLERSFGFKKDERGVYIADEEEAVWVRKIYDMAAQGYTLAAIKRYLNENNVKTVGGAEWLDSTVLRILENEIYKGDYIMHKYFVNEERKLVRNRGEVDAWYIEDDHEAIVSPKLWQKAQDALEAKRDYLAEGSVIEEFTEENYPYMNRIYCARCGHPLYRRIYSNGNRLNWGCSGTKRYGRSFCEGINIPDGILRGAWHFDENMYIGEKQTDKGKKEFTYLKEASWKRRHKKKEPEPIPENTETEYPYRKKIFCGLCGSRLVRHVNTKNHKAIWVCNGRKRKGKDFCDGTRVPDTIIKGWGEIKKDIYIQRKDDKNGKKRYSYTSKKPKGADRA

SEQ ID NO: 25017 - protein, 464 aa, synthetic construct
MARSVTVIPARSQRVRTGHKAVQEKKIRVAAYCRVSTDQEDQLHSFEAQVEYYTKYINEHENYEMAGIYADEGISGTNTKKREQFKKMIADCEGGKIDLVITKSISRFARNTQDCLAYSRKLKNLGIGIIFEKENINTLDSTGELLFTILSSLAQDESRNISENCKWGIRTKFKNGEMHLNTFKFLGYDKDENGKLVINKEQAKTVRRIYRDFLIGINPAQIAKELTEEKVPGCLGQTKWYPSTVIGILKQEKHMGDALLQKTYTADFLTKRQVRNNGEIAQVYVKDSHKGIIDKQTWNAVQEEFDRREKFMESHGTDRYSYGADCMPFCEKVFCGECKSLFTRHSWRSRGIVQWQCKNHRKDGKVACTNAYVDNTDLEKGFVKAFNRLVTDRDKHMERWQQMKSDGTPLEKIRAGQMMEAVGNEPLTRFVPEIAQFVLCEVTVLGAKKYEFFFLEGSRVKVSV

SEQ ID NO: 25018 - protein, 464 aa, synthetic construct
MNSTYFRPQPELFGLRVVKYIRCSHDGQVLHGDTLEAQDALLDEFIKVNRMVLIDTFIDEALTARKKFTRRKEFVRLLDGVRAHSFDMILFTKLDRWFRNIGDYHKIQEILEANGVQWKAITESYDTTTTNGRLHINIRLSVAQDECDRDSDRIKDVFAYKLKNKTYLSGSLPRGLKLDDEKHVIIDPEWKQFALDMFDHFEQTNSKRGTLLYLKEKYGIYLCYDTISRNLRNSLYKGMYRDDPDFCEPLIEPERFDRIQVLGKRNVRQRYSNRTYVFTGLLICSSCNHYLVGQTTHRTLSDGTEKHYPSYRCNQRYQSHSCDRNRSYREDYVEEYLLQHIRPALSEYVAEYEVTGTNPARKNPAAEAAKIRTKMQKLYELYMDDLIDRDTYKRDYSAFQEKLKELDSIVVAPSRDLADLKKLLEQDYEEIYRTFSPQEKNAFWKSFVQSITVHEDGEMDIVFL

SEQ ID NO: 25019 - protein, 504 aa, synthetic construct
MEDFIYARQSVDKEDSISIESQIELCLREVGNNPHRVFRDKGYSGKNTERPDFQDMMAAVRAGGARRIIVYRLDRISRSVLDFANVISELQKYGVEFVSITERFDTSTPIGKAMLMIVMVFAQLERETIQQRVMDAYRSRSRKGFYMGGRVPYGFELENTVMEGIKTCMYKPIPEQIQVVQLIFSLYAMPQVSFADVVRYLSQNGIKNPNGKNFSRMRIRDIITNPVYAKADASIYEFFHGQGTEIINDISQFIGTNGAYLYTGNKAAKRKSISLDGHVLVLAPHAGCIDADTWIRCRRKCLNVRQIAKPVKAKNTWLAGKIKCIDCGHALSLKSYPRKRSADARYYICNSKYVSASCDGVGAIQASGIEDIVFDEMSRKLKEFNKLSYKEKHGDPIELTKLKIRAEEIEKEIATLIDKIVSASTATMEYINERIDALDEEKKTVKEKIAQMSAEMYDRQNIGVISDYMSKWNDISIDDKLTVVDTLIESIHVGHGKVKIAWKI

SEQ ID NO: 25020 - protein, 574 aa, synthetic construct
MRKAKENLQKEKPQRAAIYLRVSTSYQADRDSLPMQRKDLVGYCEYALNISDYTVFEDAGYSGKNTDRPAFQKMMMQIRNGMYSHLLVWKIDRISRNLLDFAQMYEELKTLGVTFISRNEQFDTSTAMGEAMLKMVLIFAELERKTTAERVTATMISRANDGTWNGGRVPFGYDYNKETQTFSINGDESYIVLQMYDLYEKTDSLVRTARELNKLGYVSRQHNPFSPVSIWIILRNPWYVGTYRYNYYKIPGRRAVKEESEWVVIENHHSPLVSKERFDHVQKMLDSNARYRNTPGRSSKQKNVNIFSGLIWCSCCGAAFTASPGKLHASGYRPTKYGCPNVRKTKTCNAKYTSDPVIGEFLLNFILNVINAQKGFEKINSPADLESRLLRGDAFRDVAKIDSASVAALYEMLSSFSPADSVLLKKPTIKKNLDPELRKLRADKRKTERALARLDHIYLYSNKQMSDKEYLVKKNDLMTDLKELDKSIGLLTSESWAQSLSDDDFLEQASSFIISQRLQEREYIYFQGLAESTDPAVLRAFFVSIIDSVRMRNGLVEILTFKNGISHTFTYKAI

SEQ ID NO: 25021 - protein, 464 aa, synthetic construct
MARSVTVIPARSQKMRTGHNAVQEKKIRVAAYCRVSTDQEDQLHSFEAQVEYYTKYINEHENYEMAGIYADEGISGTNTKKREQFKKMIADCEGGKIDLVITKSISRFARNTQDCLIYSRKLKNLGIGIIFEKENINTLDSTGELLFTILSSLAQDESRNISENCKWGIRTKFKNGEMHLNTFKFLGYDKDENGKLVINKEQAKTVRRIYRDFLIGINPAQIAKELTEEKVPGCLGQTKWYPSTVIGILKQEKHMGDALLQKTYTADFLTKRQVRNNGEVAQVYVKDSHKGIIDKQTWNAVQEEFDRREKFMESHGTDRYSYGADCMPFCEKVFCGECKSLFTRHSWRSRGIVQWQCKNHRKDGKVACTNAYVDNADLEKGFVKAFNRLVTDRDKHMERWQQMKSDGTPLEKIRAGQMMEAVGNEPLTRFVPEIAQLVLCEVTVLGAKKYEFFFLEGSRVKVSV

SEQ ID NO: 25022 - protein, 502 aa, synthetic construct
MEIQIRKGNSRQKQKLKVCAYCRVSTDADEQENSLENQIRHYKEVITSNPDYEYAGVYSDFAISGFKEKRPGLQKMLADARKGKIDLILTKSVSRFARNTSIVLEATRKLKELNVGVFFELQNINTLSGEGELMLTILAAFAQAESESGSVGAKMVYQRKYEAGIPVQYLERSFGFKKDERGVYIADEEEAVWVRKIYDMAAQGYTLAAIKRYLNENNVKTVGGAEWLDSTVLRILENEIYKGDYIMHKYFVNEERKLVRNRGEVDAWYIEDDHEAIVSPELWQKAQDALEAKRDYLAEGSVIEEFTEENYPYMNRIYCARCGYPLYRRIYSNGNRLNWGCSGTKRYGRSFCEGINIPDGTLQGAWHFDENMYIGEKQTDKGKKEFTYLKEASWKRRHKKKEPEPIPENTETEYPYRKKIFCGLCGSRLVRHVNTKNHKAIWVCNGRKRKGKDFCDGTRVPDTIIKGWGEIKKDIYIQRKDDKNGKKRYSYTSKKPKDADRA

SEQ ID NO: 25023 - protein, 591 aa, synthetic construct
MAKITRVDQAVPTIKTKKKVAAYARISMESERMNHSLSAQISYYSSLIQKNPDWQYAGVFADDGISGTGIAKRDEFKRMIKAADNGESDIILTKSIQRFARNTVDLLETVRHLKDIGVEVRFEKEHINSMSGDGELMLTILASFAQEESRSLSENCKWGIRKRFEKGIPNGHFRVYGYRWEGDELVIVPEEAAVVRRIFQNFLDGKSRLETEREFAAEGITTRDGCRWVDSNIKVVLTNVTYTGNLLLQKEFISDPISKQRKKNKGQLPQYYVEDTHPAIIDKATFDYVQEEIARRKELGPRANKSLNLTCFSGMLKCPHCGISYAHNKRTDRGFMEYWACGSRKKKGSRCPVGGSINHENLKKACAEVLGLDAFDEDAFLDKVDFINVPERYVLEFHLKDGAVVTKDCPNTGHQDCWTAEYRAKTSEKRRKKPNCKGSSVMTGKIKCAGCGCNFRRASQPSATSESGKAFYWRCAERNGCGTVGLREDVLKPFIAETLGIPVFDDAEFEKRIDHIDVLSASEMVFHFKDGGTVSRTWEQPKRIGRPWTDEQRAKFKESIKGAYTPERRRQMSEHMKQLRKERGKAWRKEK

SEQ ID NO: 25024 - protein, 505 aa, synthetic construct
MPKTEEKQPIKAVIYARYSSDRQREESIEGQLRVCEDYASRNNMTILHTYADRAMTGRSDQRPEFQMMIRDAATMTFDVVLVYKLNRFARNRYDSAKYKHKLKKYGIKVVSAMENIADDPSGILLESVIEGMAEYYSAELAENVMRGMTENALEGKWPGGVVPLGYKLDEQHHLVIDGPKAEVVRLIYQMALEGHNQKYIIDELNRRHYTNSAGGPFSYNTLRTILRNEKYIGVFTWGTVRRENACPAILDKATFEAVQEHLKFRTKHHIRSCNEDFLLTGKLFCGCCRSKMIGVSGTSKTGAIYYYYACSAHLKKKCKARNIRKDAIEDLVCEVTTRILSSKEAVEAIARQAIEMQKNKKDSLELQAIKNQIADISKKLQNCIRAVESGLISEAITNHINDYEKELTRLKDDAARVKLLDGDIELTQQHIEFFFWSIAQKIKAADKYKSILLSSIVRSVIVYNDYIEIQYNYKNELPILQNPVKVESSYLNQMVIHPGFEPGTP

SEQ ID NO: 25025 - protein, 592 aa, synthetic construct
MPNLRKIEAAVPAIREKKKVAAYARVSMQSERMLHSLSAQVSYYSGLIQKNPDWEYAGVYADDFISGTNTVKRDEFKRMLADCEAGKIDIILTKSISRFARNTVDLLETVRRLKDLGVEVRFEKERIRSMDGDGELMLTILASFAQEESRSISDNVKWGIRKRMQNGIPNGHFRIYGYRWEGDELVIVPEEAEIVKRIFQNFLDGKSRLETERELAAEGITTRDGCRWVDSNIKVVLTNVTYTGNLLLQKEFISDPISKQRKKNRGELPQYYVEDTHPAIIDKATFDFVQEEMARRRELGALANKSLNTSCFTGKIKCPYCGQSYMHNKRTDRGDMEFWNCGSKKKKKKGTGCPVGGTINHKNMVKVCTEVLGLDKFDEAIFLEKVDHIDVPERYTLEFHMADGCVVTKACPNTGHRDCWTPERRAEVSAKRRENGTNPIGASCFTGRIKCVSCGCNFRKATRNCKDGSKVSHWRCAEHNGCDSPSLREDLLEQMAAEVLGLDAFDAAAFREKIDRVEVLSSSELRFCFKDGRTVSRNWQPPERVGRPWTEEQRAKFKESIKGAYTPERRRQMSEHMKQLRKERGDKWRREK

SEQ ID NO: 25026 - protein, 525 aa, synthetic construct
MAQRKVTAIPATITKYTAVPIGSKRKRRVAGYARVSTDHEDQVTSYEAQVDYYTNYIKGRDDWEFVAIYTDEGISATNTKRREGFKAMVADALAGKIDLIVTKSVSRFARNTVDSLTTVRTLKEKGVEIYFEKENIWTLDAKGELLITIMSSLAQEESRSISENTTWGQRKRFADGKASVAYKRFLGYDRGPNGGFVVNQEQAKTVKLIYKLFLDGLTCHAIAKELTERKLPTPGGKAVWSQSTVRSILTNEKYKGDALLQKEFTVDFLQKKTKKNEGEVPQYYVEGNHEAIIDPATFDYVQAEMARRMKDKHRYSGVSMFSSKIKCGECGCWYGSKVWHSTDKYRRVIYQCNHKYKGGKPCSTPHVTEDQVKDAFVRAVNILLSEKEELSVNVQMVIAMLCDSAELEKRQTELKEELEVVVGLVERCVTENARVALDQDEYTQRYNGLVSRYEAVKAQFDEVTQAVADKADRKKLLEQFLHTVEGQAPVTEFDERLWSSLVDFVTVYSEKGIRVTFKDGTEIQV

SEQ ID NO: 25027 - protein, 453 aa, synthetic construct
MECVAYMRVSTEKQAEEGNGLDSQKRDIELFCRKNELVVSDWYVDDGYTGANMDRPELQRLINDCIKKRVKCVVAFKLDRLSRSMIDGLYIIERVFQPNQVLFKCVHDSVSYDSPMEQAYTQMMAVFAQLDKNTMMLRMRGGMLERIKQGYWIGGANTPYCYNYSKEKGILIPIPERKEQANRALDMFIGGYSDLYIKESLGFHSEVLVRNVLTGVVNIGMIPYKGNVYQGLHEPIFDKERFELAQEIRKSRRKNKTACHTDANLLTGLCYCGVCGCKMRYQKWTHGKHKIYCCSRDKAMKYLPNFNPNCNNSLEWAADIEKQVESEILKISLNLSECKPIEKQSKLEIMQSQFEKEHVKLKRLYVLYSDGNDTVLEMIKNTEKSISEMKVKITEEEKNERNSQKKEVVYENIKKLADVWAHIDKKEKNNILKSIISRIVIVNGDVEIQLKNF

SEQ ID NO: 25028 - protein, 464 aa, synthetic construct
MARSVTVIPARSQKVQTGHKAVQEKKIRVAAYCRVSTDQEDQLHSFEAQVEYYTKYINEHENYEMAGIYADEGISGTNTKKREQFKKMIADCEGGKIDLVITKSISRFARNTQDCLAYSRKLKNLGIGIIFEKENINTLDSTGELLFTILSSLAQDESRNISENCKWGIRTKFKNGEMHLNTFKFLGYDKDENGKLVINKEQAKTVRRIYRDFLIGINPAQIAKELTEEKVPGCLGQTKWYPSTVTGILKQEKHMGDALLQKTYTADFLTKRQVRNNGEIAQVYVKDSHKGIIDKQTWNAVQEEFDRRERFMESHGTDRYSYGADCMPFCEKVFCGECKSLFTRHSWRSRGIVQWQCKNHRKDGKVACTNAYVDNADLEKGFVKAFNRLVTDRDKHMERWQQMKSDGTPLEKIRAGQMMEAVENEPLTRFVPEIAQLVLCEVTVLGAKKYEFFFLEGSRVKVSV

SEQ ID NO: 25029 - protein, 530 aa, synthetic construct
MEQYLIYLRKSRSDLEAEAHGEGETLSRHEHTLLELAKRQHLNVTDIYREVVSGDTIAARPMMQRVLSEVEQGVWSGVLVMEVERLARGDTIDQGIIAQTFKFSGTKIITPIKTYDPDNEFDEEYFEFGLFMSRREYKIINRRLQRGRLASAKEGKWPSGLAPFGYRRVKLKNEKGCSLEPIEEQAAIVRMIFDLYTVGLQDEDGSARPLSLGSIATRLNDMRIPSPSGSQWARITIRGIIKNPTYIGMVRWGSRETKKKVVDGKVVSVRGPADPEKECVFKGIHPPLIPKETFELANDKLTRSENTSTRKEKVVRNPLAGLLVCSECGRQMMRMINPVHPDMPVVRCPRRGCPNCSSYLPIVEERVIQGLSEWMKGYELEWSSAAASSSVSSVGVREKALTSAEAELRKLQQQLERTHDFLEQGIYDTDTFLSRSRMLSDKIASAKDSVTRCSRELTEEKLRETSRRDIIPKVKNLLDVYPLLETAEEKNALLKEVLEKVVYQKLNEKRKKSPDGFTIEIYPRIPKSEK

SEQ ID NO: 25030 - protein, 559 aa, synthetic construct
MLQSNTRPAANSFPFAVLNQEEITALYCRLSQDDKQEGDSNSIINQKKILKKYALDRGYTNIQFYIDDGVSGTTFNRAGFQSMIADVETGKVKRVIVKDMSRLGRDYLQVGMYTEIFFPEHDVHFIAVNDGVDSNQEDNEFTPFRNIINEWYAKDTSKKIRAVKRSKGMAGEHIGSHPPYGYMKNPENKKEWIIDEEAAEVVREIFRLCVGGYGPTQIANILTERKILCPTYYALEKGEKPRTVLPAHKYAWNSPVVAMILERVDYLGHTVNFKTHNKSYKCHKKIKHTPDQWKVFEGTHEAIIDKETFEIVQKIRAGKRRPTRMGEMPMFSGLLYCADCGSKLSFSRKAEDPPEKHNFICANYRSNTSKCTMHYIRNVVVERIVLENLKEVIQYVSNYEDEFVRMVMDSDMRQRNRELSQKKKRLAEVQKRIGELDTIFQRIYEDNIIGKLSDERFMKMSKGYEDEQHTLQAEADEIQSELQQEEKKSVDVKRFLAIIKKYTDLTELTPEILREFIDKIIVHAPDKSSGRRLQEIEIIYNHIGEFDRSKVTLWKGNAV

SEQ ID NO: 25031 - protein, 492 aa, synthetic construct
MAAIDFNNVVDLYIRVSTSEQAEEGYSVAEQEERLRSYCAAFNYIINAIHIDPGFSGASLDRPGIKKVMYDVEHGRCKKVIVWKLDRLSRSQKDTLILLEDVFLANDCNFISLMESFDTSTPFGRCIVGILAAFAQMERENIKIRTMMGRQARIRDGHFHGSRCPLGYKFQYAPDGTLLSNDLVVDPYTSKLVQEVFRLFLSGSSLSSISAHMASTYGCSMYDWSNSTAIRRILSNPIYMGKVRVGNELYPGIHEPLVSETDWYMVAAMLKHNKEQQKRTYAYQISGGAYADNLLTGLLFCGDCGARMYARRVSQNKKKYICHSVAKTSPAMIRSDHCTNRLHPFTVHQLDEMVINEILKLSLDRPGFDMLCDQPDESSKSEDKEIYEERLAEVNRQLDRLVKLYQTGLIDLDNISARLGDLNQEKIFLEGNIATINEITPADLRETAWKSIQSLQSVLDNGDMDEVHRIIHTLIDKVVVLNADVTIYWSFC

SEQ ID NO: 25032 - protein, 521 aa, synthetic construct
MKKITKIDGVQNNSTIKKELRVAAYCRVSTGSDAQLESLEAQKTHYERYINSRKDWEFAGLYFDEGITGTKAEKRPELLRLIADCEAKKIDFVITKSISRFSRNTTDCLALVRKLQSLNIPIFFEKENINTGSMESELFLAILSSMAEGESASISENSKWSIKRRFQNGTFKLSYTPYGYDWDGENMIINPAQAAVVKRIFTDILSGKSTNAIADELNAEKIPSKKNTNWTSSTIRGILANEKYTGDVIFQKTYTDENFNRHTNYGEVDQYMASDHHEAIISHADFDAANALVSQRALEKGVKKGSDKYQKRYAFSGKIICGECGDTFKRRIHTCTTYKYVAWACNTHLKDKSTCRMKYVRDNDIKAAFVTMLNKLIYGQRLVLVPYLKALENSSGDEALQRIQHLELLLDQNNEQRETLTKLMAQGYIDQILYNQETNALLLQAETYRSDIEAITICMTGDSAKVTETNLLLHFVSHADMLTNYSEELFESYADHIEISDRNEIKFVMKCGLTFTERIGD

SEQ ID NO: 25033 - protein, 584 aa, synthetic construct
MAYRKITDIRDTIGMRAVFYARVSTAEEEQLNAIELQIEENRGCIKEHGWKLVGEYIDRSKSGTMVKGRDDYQRLYEDLYEDLFDIVVIKDQERLQRNTLDWYLFINRVVQTGKLLFMYMDGKFYSPDDALITGVRAIIAEEFSRNLSKKLHNYHDHRIEKARQGQEIALQGSGNVYGWDKKDGKYYINPEQAKVRRLMCEGIMARKGSTLIAKELNDAGYRNTVGKPWKPMDIPKFVYDCKNVGTMIINKERHDFESKQTIKLPKEEWVYVENALPPIVTQEEWDLICKIHEERVIATGSDRRGKKTSGYSFSGKLVCGICGAPYWRKQRVSKDEYWVCSTKQTKGRRTRKRDSTMGKAGEINPLGCDNENISYNSLMEIMGVVSERLQANTDTIKHDMINWLTKLRKQLLEANGGHTEADLQRELSRKSKLLDAYLDGILNKQEYQKKAEELDERIIQLKAETEKNKANSGDIAEIDKVLANIDEEVSRYVDGNEKLKVEYLLEHLEQVQIFPDKVIVIVPILSDGIVVEKAQYVSREKRCRQDYLYENDRWSGKADKRRDIHVWIRWKGFVKGTLKSGLPD

SEQ ID NO: 25034 - protein, 480 aa, synthetic construct
MATHKVAIYVRVSTTSQVDEGYSIDEQKAKLTSYCDIKDWNIYEIYTDGGFSGSNTERPALEQLIRDAKRKLFDTVLVYKLDRLSRSQKDTLYLIEDIFLENDIEFVSLLENFDTSTPFGKAMIGLLSVFAQLEREQIKERMQLGKLGRAKSGKSMQWAKTSFGYDYIKETGTLSVNPYQALIVRKMFEWYLSGMSITKLRDALNEQYGQDKEWSYRTVRVILSNPVYCGYNQFKGQIFPGAHEPIISEEDFNKTQEEIKTRQRTAAQRFNPRPFQAKYMLSGIAQCGYCSAPLAIKLGMIRKDGTRLVKYECKQRHPRKIKGVTVYNNNAKCDSGFYFKDDIEHFVLTEISKLQTDSDYIDKLFSNTDKETIDRASYQKQIDNLTAKISRLNDLYIDDRISLEELQKRSSDFMAERSALEKELDADSSLKAVERKKDIRRVLDTKDIFTLDYEQQKTIARALISKVRVTSESIVILWKL

SEQ ID NO: 25035 - protein, 542 aa, synthetic construct
MNKKIKCDIYTRVSTTMQVDGYSLDAQKEKLKRYAEFQNMEIVNEYSDEGKSGKSVEGRPEFQRMLDNIENGTDEVQFVLVFKLSRFGRNAADVLNSLQRMQDFGVNLICVEDGIDSSKDSGKLMISVLSAVAEIERENILVQTMEGRKQKAREGKWNGGFAPYGYELVNGELQIAEDEAEIIRLTYDKFIHTNMGISAIAAWLNQHGYKKKKRQNNTLDAFAASFIKGVLDNPVYCGKLAYGRRKNEKVSGTRNEYRIVKQENYMLHDGIHKGIISETDWELAHQKREKTGVKYEKTHSLDHEHILSGILRCPLCGSGMYGNVNRKKKKDGTLYKDYFYYACKHRRLVDGHKCGYRKQWSEEKINNAVEEVIRKLVKNPKFEEAILNKIGSRIDTEEIEKEIERLEKQHRQLTGAKARLGQQMDSLDIMDKFYEKKYQDMETRLYRLYDEIEGVENSIEEVKNRLLNIRQQKISEENVYQFLLYFDKLYDKFTDLEKKEFLNSFVEQVDIYEQEQPDGRFLKHIKFRFPVYFGDREIQELC

SEQ ID NO: 25036 - protein, 522 aa, synthetic construct
MELLNVCIYLRKSRADREAEARGEGETLARHERILLDLAKKRGYNVGAIYKEIVSGETISARPVMQQVLREVESGMWDGVLVVEVERLARGDTIDQGVVARAFRYSETLIITPLKTYDPNNEYDEEYFEFGLFMSRREYKTIRRRLTAGRESSAKEGKYCGSKPPYGYSRVKLVGEKGWTLQPVPDQAEIVKLIFNLYVHGVAGERIGMAKICRKLNDSGIKTMDGGLWTVPRVQAILRNPVYAGMIRWNSRKAVKHIQDGQITISRPFAKDYILVEGRHPAIVSKELFQQAQDIVNQNPARPLNSLHVLRNPLAGIIRCGKCGYVMTRKAPSGRQVDLLRCPYSSCNNVSSKLPLVEKALLDGIQELVDGYKLNSNFSDQEYSLSISEKEEMIRGKLKEIDVLRKKKEKQYDLLEQGIYSTEEFLERSRATAAELSACDTVIHSLRQEIKHEQELQFQRSSFIPKCEDLLAHYWTWDTSTKNQFLRELIEKAVYTKNTKNTWKNGDDVSFTLDIYPKIQHK

SEQ ID NO: 25037 - protein, 516 aa, synthetic construct
MARKKKVSPGNRLVAYYRYSGGSQQTEQSIEGQRRDCEAYARQHGLTIVHEYIDRHISGRGVESRLAFQQMIADSSKHLFDLVICWKTDRFARNRYDSAVYKKKLRDNGVRILYAAESSVEGPEGIILEGLMESLAEYYSAELAQKMRRGMRESALKGKAINPNRPLGLTTDEHKRFIIDEKNAPTIRFIFEHYAAGESSASIVEQLNAAGLRTSKGNAFNKCSIPRIIQNEAYHGVYICKAYDVRIDGAIPAIIDDDLWKRAQKMLTLNKQHRAPHSSHADYLLSGKLFCGCCHSLMRGISGHNCRNDVYYYYACGNKADGGTCKKKNIPKDVAENLVVNAICENILRPDTLEDLADAIAAAQQADVNQPDPERAMLEQNLADVHRKINNIIESIENGTASSRLSARLADLEQQESTLNYQLESLKEVHPPVLDRERILFLLEQFLISPNERTEDYNRRIIDTFVNRIEITDTEMLIYFNLSEASASEKQKNSQPNSCSTRNHLVRVARIELTAS

SEQ ID NO: 25038 - protein, 433 aa, synthetic construct
MSGKITIVSKPPKLERKKRVAAYARVSSGKDAMLHSLSAQVSYYSDLIQNHGDWLYTGVYSDEAKTGTKDSRAGFQNLVADCRAGKIDMVITKSISRFARNTVTLLQTVREFKALGVDIYFEEQNIHTISGDGELMMTILASYAQEESRSASENQKWRIKRSFESGIPWDRTLMGYRMENEHYVIVPREAEIVRRIYNEYLSGSGYQLIAKRLNEEGVPSRFGGKWNQSAVSRILSNHTYTGNLLLQKTFRENHITKRKIFNNGELPKYLAEESHEAIVDEKTFQAVQEEKSRRAARFNKKSVPKKTYPFSSLMVCDNCGKNYRRKITKTGAVWVCGTYNSLGKAARASKQIPESTLQQVTADVLGQNDFTHEWLCHRIQHIRVCNDNTLIFYFKDGSEITRIWKDRSRSQSWTDEMKEAARQKTLERSKHNA

SEQ ID NO: 25039 - protein, 521 aa, synthetic construct
MGNVMIIPAKRQVGNTSRRQEDKPKLRVAAYCRVSTDSDEQASSYETQVEHYTEYIKKNPEWEFAGIYADDGISGTNTKKREEFNRMIEACKAGEIDMIITKSISRFARNTLDCLKYIRMLKDKNIPVFFEKESINTMDAKGEVLLTIMASLAQQESQSLSQNVKMGLQFRYQNGQVQVNHNHFLGYTKDREGNLVIDPEQAEVVKRIYREYLEGSSMDKIAKGLEKDGILTGAGKKKWWTSTINKILRNEKYIGDALLQKTYTTDFLNKTRVKNNGIVPQYYVENNHEAIIPKDIFLRVQEELVRRRVVKTSANGKKRSYSCNHCFAQIVICGECGEMFRRLHWNNRGVKSIVWRCISRLESTGLECHARTINELVLQDAVVKAINQMLGDKSNYQAQLQLNIAAVIRASQATSVENIDEKLMALQQELIQKAQSKEAYDEIADEIFRLRELRQQTTIDTAARDEQIKRINDLQDYIAQQTTHLTEFDESLVRRWIKQITIWDDHITVELKSGVSIDVDV

SEQ ID NO: 25040 - protein, 506 aa, synthetic construct
MENQTAVIYARYSSDRQREESIEGQIRECKAFAAANGYRIIGTYIDRAMSARTDQRPDFQRMIHDSDRHLFQFVIVYALDRFSRSRYDSAIYKNRLKKNGVRVLSAKENIRDDPTGVILESLLEGYAEYYSLELAQKVRRGMADNLLEKKWVGTVIPFGYKKGTDSRLYVDESKRQVVIDIFQMYSDRYRLVDIIAYLNAHHFANAQGRPFSRNSLNNILVNSIYTGTFRWAGTVYPGYAPRIISDELFNKVQKIKEGRKRNMVKSASPDYELTGKIFCGRCGRPMVGVSGTGKSGNTYFYYKCSGKTHGRKDCDAKAIRRDAVESAVYNATVAMLKQPHAIKIITAQAILAQEREQGNSEVDRLKHEKAALDAKIRNISKAVAAGLTADEIISQANEYSNRSKDLEALIRIEELKEKAFTLTPEAVTFFLEKLLEKAEAGNATLSTFWDFIRCIKINGCIAEIHFNYTAVPATLDNPIRVKIETNEECSNDDVLVDHQGFEPRTP

SEQ ID NO: 25041 - protein, 527 aa, synthetic construct
MAKRKVTTIPATINKFTAKPVDSKKKRKVAGYARVSTDHEDQLTSYEAQVDYYTNYIKGRDDWEFAGLYSDEGISATNTKHRDGFNQMITDALAGKIDLIITKSVSRFARNTVDSLSTIRKLKEHSIECYFEKENIWTFDSKGELLLTIMSSLAQEESRSISENVTWGQRKRFADGKVSFAYKRFLGYDKDSDGNIVINEGQAKTVKLIYKLFLDGLTMHSIANELTKRGLKTPAGKDKWSQSTVRSILTNEKYKGDALLQKSYTVDFLTKKTKINEGEVPQYYVENNHPAIIDPELFDLVQTEIQRRGKGNARYSGVTIFSSKVQCAECGGWYGSKVWHSNDKYRRTIYQCNNKFRHKTRCSTPHLTESEIKDFFVKAMNHLITEKSEILENLQLIRTTLCDREDLIKQKESLGEEIAVAVEMTQNIVAENARMAQNQDEYNKRYNSLVERYEKLKKEYDNACAVISEKDAKYEQMGRFITVLNDQSEFISEFDEALWGSLVEKIVVKSKDDVMVVFKDGTEIKAE

SEQ ID NO: 25042 - protein, 494 aa, synthetic construct
MRVVGYARVSTREQADHGYSIGEQNSRLRAYCQAKDWTLLRVIEDPGFSGAKMQRPGLQQVLEMVRRHECDAVLVWKLDRLSRSQKDTLYLLEDVFLANGCGFVSMLENFDTSTAFGRAMVGILSVFAQLEREQFKERSAIGRVGRAKAGLFHGGGYAPIGYDYYTKEDGGQGLVVNEYEAMQVREVYRLYLAGWAVHKIQVYMHERYTTKNGCWASDTTVRSVLSSPIYLGRITWAGKTYEGQHEALISQNDFDQVAARRESLKWQPAEPRAACDLIKNSPFRSTHILGGITWCARCGARYFASGNYSGRGENRKYWPYYTCYSVAKSSKKMIKDPNCKNKRWAVGKLDAIILAEISRLEFDPAALAKAAGPVDVSDVEEKRRVLEARVAEVRPQMERLLDLCQTGGLPVASVSGRLAALQKELDALNGELSGLAVPETVDRLAVAQEMLAGASAVIENGTPEQKRALVHSLIGRIDIDGEDITIHWLFAPEN

SEQ ID NO: 25043 - protein, 519 aa, synthetic construct
MKKVTKIDKIQPAKNAEDKLRVAAYCRVSTATDAQLESLEAQKSHYENYINSRDDWCFAGVYYDEGITGTKASKRLELMRLLADCKAKKIDFVITKSISRFSRNTMDCLEIVRTLLNLNIPVYFEKENINTGSMESELFLSVLSTMAEGESASISSNNKWSIKKRFENGTYRLSSAPYGYKLESGGLQVVPEQADIVKRIFRELLSGKGMYSIAKKLNAEQVPTQKGGRWTSTSVHNILTNEKYTGDCIFQKTYADSNFNRHINNGELNRYLIQNHHEAIISHEDFNATAALIEQRAAEKGIESGSDKYQQRYAFSEKLICGECGNTFRRRIHKGKYNSYVAWVCNTHLSDTNRCSMLFVRDDALKFAFATMLNKLIFSYRLLLKPYLAAMQSNTADEALLRIQYLENQLDQNAEQRSTLHKLMAQGYIDQILYTQECNELLLQARDFRSEIEALNNTVAGDTTKVYETERLINYCKRGEMLTDFNKSLFELFVDHILIYSRQKIGFVLRCGLTFEEMI

SEQ ID NO: 25044 - protein, 467 aa, synthetic construct
MIRMARSVTVIPARNRQRETGRRAVQEKKIRVAAYCRVSTDQEDQLHSFEAQVDYYTKYINDHENYEMAGIYADEGISGTNTKKREQFKRMIADCEGGKIDLVITKSISRFARNTQDCLAYSRKLKNLGIGIIFEKENINTLDSTGELLFTILSSLAQDESRNISENCKWGIRTKFKNGEMHLNTFKFLGYDKDENGKLVINKEQAKTVRRIYRDFLIGINPAQIAKELTEEKVPGCNGQTKWYPSTIVGILKQEKHMGDALLQKTYTADFLTKRQVKNNGEIAQVYVKDSHKGIIDKQTWNAVQEEFERREQFMKDHGTDRYSYGADCMPFCEKVFCGECGSLFTRHSWRSRGIVQWQCKNHRKDGKVACTNAYVDNADLEKGFVKAFNRLVTDRDKHMERWDQMKTDGSPIEKIRAEQMMEATENEPLTRFVPEIAQLVLCEVTVLGAKKYEFFFQEGSRVKVSV

SEQ ID NO: 25045 - protein, 498 aa, synthetic construct
MEIQIREGNSRQKQKLKVCAYCRVSTDADEQENSLENQIRHYKEVITSNPDYEYAGVYSDFAISGFKEKRPGLQKMLADARKGKIDLILTKSVSRFARNTSIVLEATRKLKELNVGVFFELQNINTLSGEGELMLTILAAFAQAESESGSVGAKMVYQRKYEAGIPVQYLERSFGFKKDERGVYIADEEEAAWVRKIYEMAADGYTPAVIKRYLNENGVKTVGGAEWIDSTVFRLIENEIYKGDYIMHKHFVNEERKLVRNRGEVDAWYIEDDHEAIVSPELWQKAQDALEAKRDYLAEGSVIEEFTEENYPYMNKIFCARCGHPLYKRIYSNGNRLNWGCSGTKRYGKSFCEGINIPDGVLRGAWHFDENMYIGEKQTDKGTKEFTYLKESSWKRRHKKKEPEAIPKNTEEAYPYRKKIFCGLCGSRLVRHVNPKSHKVIWICNGAKRKGVAFCRGTRIPDSVIRGWGEIKKDIYIQRKDDKNGKKRYSYTSKKPTA

SEQ ID NO: 25046 - protein, 519 aa, synthetic construct
MKKVTKIDKIQPAKNAEDKLRVAAYCRVSTATDAQLESLEAQKSHYENYINSRDDWCFAGVYYDEGITGTKASKRPELMRLLADCKAKKIDFVITKSISRFSRNTMDCLEIVRTLLNLNIPVYFEKENINTSSMESELFLSVLSTMAEGESASISSNNRWSIKKRFENGTYRLSSAPYGYKLESGGLQVVSEQADIVKRIFRELLSGKGMYSIAKELNAEQVPTQKGGRWTSTSVHNILTNEKYTGDCIFQKTYADSNFNRHINNGELNRYLIQNHHEAIISHEDFKAAAALIKQRATERRIESGSYKYQQRYAFSEKLICGECGNTFRRRIHKGKYNSYVAWVCNTHLSDTNRCSMLFVRDDALKLAFATMLNKLIFSYRLLLKPYLAAMQSNTADEALLRIQHLEKQLDQNAEQRSTLHKLMAQGYIDQILYTQESNELLLQARDFRSEIEVLNNTVAGDTTKVYETERLINYCKRGEMLTDFNESLFELFVDHILIYSRQKIGFILRCGLTFEEMI

SEQ ID NO: 25047 - protein, 522 aa, synthetic construct
MGNVMIIPAKRQVGNTSRRQEDKPKLRVAAYCRVSTDSDEQASSYETQVEHYTEYIKKNPEWEFAGIYADDGISGTNTKKREEFNRMIEACKAGEIDMIITKSISRFARNTLDCLKYIRMLKDKNIPVFFEKESINTMDAKGEILLTIMASLAQQESQSLSQNVKMGLQFRYQNGQVQVNHNHFLGYTKDREGNLVIDPEQAEVVKRIYREYLEGSSMDKIAKGLEKDGILTGAGKKKWWTSTINKILRNEKYIGDALLQKTYTTDFLNKTRVKNNGIVPQYYVEGNHEAIIPKDIFLRVQEELVRRRVVKTSANGKKRSYSCNHCFAQIIICGECGEMFRRIHWNNRGCKSIVWRCLSRLEATGQECHARTVNEKVLENVVVQAINKLLGDKSTYQTQLQQNIAKVIRDAQKNTADGIDEQLLELQKELLKKANNKESYDEIAQQIFKLREQRQQCTVDTATRDAQIARITELQDFIKQQRTDLAEFDETLVKRWLKQITVYEGHYEVKLKSGLKVNIDIE

SEQ ID NO: 25048 - protein, 503 aa, synthetic construct
MLRAALYARFSSENQREESILAQFRDSTEYCKKHNYAIVAKYADEAKSGTTTIGREQYKLMLKDAQKGKFDVVVFHKIDRNARNELDYYITKHKLEEAGVKYAYSRQDIDSTSPEGQMMESMLVGMAAYYSRNLSNEIKKGLRENAIQGKCTGGRPPYGFSVDADKKLIINEDEAPAVRMIFDLYAAGVHYGVIRKRLFNAGYRNRAGKEFTLASIYEILRNRKYVGDLYLGKTLFRKGKRNTHQVSDNVQYFENVIPAIVSREIFEEVQVKLDQNKRRSGAGNAKAIYALSGLIHCGQCGSAMVAHSTKNSRGIKNYYYRCPKGRLIGEEKCPQKFINRDDIENTVYQLIRKLFTAPDAHSQIKRIIAKNNMSVKVPDYIDQVKRLKKQESDASKRLDKLYDLYMTDRGDEFTSAKMAQIKEEILRLRTQIKEAENRQAIAQSTTFDIDKIIDTFQKQLKQKQSPEFIKTLFELAVKNVIVYPDKIKVVLLVTQERFELPTP

SEQ ID NO: 25049 - protein, 523 aa, synthetic construct
MAKSVTTIPATLSRFTAAPINSTKKRRVAAYARVSTDNEEQLTSYEAQIDYYTNYINGRDDWEFVGVYPDEGITGTNTKKREQFRQMVADALDGKIDLIITKSVSRFARNTVDSLTTIRKLKEHNVEVYFEKENIWTFDSKGELLLTIMSSLAQEESRSISENCTWGQRKRFADGKVTVPFKRFLGYDMGPDHNLVVNPEQAKLVKRIYGMFLQGQSPFQISRTLTEEGIPSPGGKDHWNPSNIKSILTNEKYKGDALLQKSFTVDFLTKKKKTNEGEIPQYYVKDNHKAIIDPETFEMVQTLMTTRTKGRNRKSSVSIFSSKVKCGDCGSWYGPKVWHSNDAYRKVIWQCNHKFDGQKCATPTLTEDEIKELFLRAANQVIDQKEQFIAIYDQVLSRSLNTTALESELSDLEAEINIAAELIEDCIKENAHVALDQDEYQKRYDALVARFDKAKARHTEVTDLITERMARKHQIEAYLKNLRSREPLTEFRETDWLAMVDYITVHSKKDIRVTFKDGTEIKA

SEQ ID NO: 25050 - protein, 484 aa, synthetic construct
MINDAKNNSEFKAVLVHKTDRFSRNLSDSIQYKKILEEYGVQVIFVNERFEDNPESHLLYHIMGSVNQFYNENLAREVMKGLKENAYQCKFTGGRPPLGYDVDKNLKLVINEKEAEAVRLIFEMSAEGYGYGETIDKLNILGYKTKKGLPFVKNSLYEILRNEKYKGTYIFNRSCSANALNKRNNHRRKPEEEIIRIENGCPAIVSSGLWHRANAVKKATRSSFTNAKNTYLLTGLIHCGECGGKFHGNIRYNKNNTNLVYRCSAKKNKRKCESKEIRCEYLDSFVIDKFVEFFFNDDNIKVITKQLNEQYSKSCISDLEYNEAKSTIKILEKSRNNLVEAIAKTGINDIMSDKIKEYEEQIKKTSEFIHKYEKQKIDRVITEDEVREQINHLKDYFYNPKNIIRTKFVLSQYIDRIDISNENVQVQFKVSMSPSDNTDGDCFCVHTEMIKRKYLFDYVCEKVDFEQWNIEKLNKSESEHRKGA

SEQ ID NO: 25051 - protein, 464 aa, synthetic construct
MARSVTVIPARSQKVQTGHKAVQEKKIRVAAYCRVSTDQEDQLHSFEAQVEYYTKYINEHEDYEMAGIYADEGISGTNTKKREQFKKMIADCEGGKIDLVITKSISRFARNTQDCLAYSRKLKNLGIGIIFEKENINTLDSTGELLFTILSSLAQDESRNISENCKWGIRTKFKNGEMHLNTFKFLGYDKDENEKLVINKEQAKTVRRIYRDFLIGINPAQIAKELTEEKVPGCLGQTKWYPSTVTGILKQEKHMGDALLQKTYTADFLTKRQVRNNGEIAQVYVKDSHKGIIDKQTWNAVQEEFDRRERFMESHGTDRYSYGADCMPFCEKVFCGECKSLFTRHSWRSRGIVQWQCKNHRKDGKVACTNAYVDNADLEKGFVKAFNRLVTDRDKHMERWQQMKSDGTPLEKIRAGQMMEAVENEPLTRFVPEIAQLVLCEVTVLGAKKYEFFFLEGSRVKVSV

SEQ ID NO: 25052 - protein, 502 aa, synthetic construct
MEIQITEGNSRQKRKLKVCAYCRVSTDADEQENSLENQIRHYKEVITSNPDYEYAGVYSDFAISGFKEKRPGLQKMLADARKGKIDLILTKSVSRFARNTSIVLEATRKLKELNVGVFFELQNINTLSGEGELMLTILAAFAQAESESGSVGAKMVYQRKYEAGIPVQYLERSFGFKKDERGVYIADEEEAAWVRKIYEMAADGYTPAAIKRYLNENGVKTVGGAEWIDSTVFRLIENEIYKGDYIMHKHFVNEERKLVRNRGEVDAWYIEDDHEAIVSPELWQKAQDALEAKRDYLAESSVIEEFTEENYPYMNKIFCARCGHPLYKRIYSNGNRLNWGCSGTKRYGKSFCEGINIPDGVLRGAWNFDENMYIGEKPTDKGKKEFTYLKEASWKRRHKKKEPEPIPENTETEYPYREKIFCGLCGSRLVRHVNTKSHKVIWVCNGRKRKGKDFCDGTRVPDTIIKGWGEIKKDIYIQRKDDKNGKKRYSYTSKKPKGADRA

SEQ ID NO: 25053 - protein, 456 aa, synthetic construct
MRNKEIAPALVRVALYIRVSGEEQKIKGLSLEAQQERLEAYARERGWVIVGIYIDAAKTARKNIHKRTEFQRMMDSVKRDEVDILLFARLDRWFRSVADYYKVMEILQAHNCDWKTTDEEYDTTTANGRLYINVKLSIAQNEADIDGERIDVVFDSKIAHGTVVSGSAPFGFRVNEEKRLEVVPEDAAIVQDAFNYFENTVSQRATVRYVRETYGVNWCDATFRRMLKEKLYTGVYDRGGRYNDQFCPAIINRQQFDRVQALLTRNVRSAPSGKVYIFTSILTCAECGHKLVGYKSSDYFYYRCNQHFQRGRCSHNHSAREDVVEQWLFEHLGEELERCQLEWDVEAAKKKASVARTDKAALKRKLTKLKELYVNDLIDIEDYKKDYQIYVSALNQIPEPAQEAPPDFAAVRRLLDNSFRTIYDTLTREEKRTLWRSVIKEIRIDNDQNITGVVFG

SEQ ID NO: 25054 - protein, 520 aa, synthetic construct
MKRITKIEENMLLEKRKLRVAAYCRVSTARDEQLVSLVAQKAHYENYIKSNDEWEFAGLYYDEGISGTKKEKRDGLLAMVAACERGTIDFVITKSISRFARNTTDCLELVRKLLDLKIYIYFEKENLNTGSMESELMLSILSSLAESESVSISENEKWGIKRRFQNGTFIISYPPYGYDNVDGEMVIVPEQAEIVKQIFADTLSGKSTHEIADELNERGVATKKGGHWTPGTVNAIIGNEKYTGDVLFQKTYTDSSFNRHQNRGELDQYLMQDHHEAIISREEFELANAVLKQRGREKGNGYDTGRYQNRYGFSGRICCGECGGKYKRRMHYKPSGQYVAWACANHLKDKESCSQKYITDDALKLAFVTMMNKLVFGHQMVLRPLLQSLRGLNDQSRLLKIEELETAIEKNREQKQVLTNLMASGYLEPALFNKESNELAAEAEALRQEKDRLMRSVNGDMVKIEELQRLLRFVSKGTMLTEFDDETFLSFAERITVLSRKEVVFELKCGLSLRERLVEP

SEQ ID NO: 25055 - protein, 523 aa, synthetic construct
MELSRNITVIPARKRVGNTAAAEQRPKLKVAAYCRVSTDSEEQASSYEVQVAHYTQFIQKNPEWELAGIYADDGITGTNTKKREEFNRMIQDCMAGNIDMIITKSISRFARNTLDCLKYIRELKEKNIPVFFEKENINTMDSKGEVLLTIMASLAQQESQSLSQNIKLGLQYRFQNGEVRVNHSRFLGYTKDEEGNLIIEPAEAEVVKRIYREYLEGASLLQIGRGLEADGILTGAGKTKWRPETLKKILQNEKYIGDALLQKTYTVDFLNKKRVQNKGIVPQYYVENSHEPIIPRDLYMQVQEEMIRRANLHSGANRKKRVYSSKYALSSIVYCSRCGEIYRRIAWNNRGKHSTVWRCCTRVEHGPTACDAPTIQEQDLQAAVVQAINLTLGNRENMMATLQENIEAVIRQEDETSSEGIEAKLLELQKKLLKLANSKKDYNSVADEIDRLRELKQNALLESAEREGLKQRIKEMREFLEQQSTEVTEYDELLVRRLIEKVTVYDERFEVEYKSGAKVDVER

SEQ ID NO: 25056 - protein, 579 aa, synthetic construct
MINIDEKLSKKKAAGYIRVSTVYQVDKDSLPMQREDLTNYIKYALGIDEYEIFEDAGYSAKNTDRPSFQRMMSRLRSGEFSHLVVWKIDRISRNLIDFTTMYEELKRLGVTFVSKNEQFDTSSAMGEAMLKIILVFAELERKMTSERVSAVMVSRANEGKYNGGRIPIGYDYDKSTKTISVNDAEAKIVNLIYDKYDEMQSIIQVVKYLNSQGVKTKRGYDFSATTVHKVLTNKFYVGDLVYNKHDERNTGNSSTKSVRDESEWIVIEDHHPAIIERWRQERTIVALSSRNFANVSYKTYQRRNTHIFAGLIQCGMCGKGMTASVDRERSDGYRPSIYICDSRRKTKLCSNKYVSDITLGPFIFNLISNIVKAYNNVGKSTSVEMLEKKLLRGDTFDNVYSIESEGVRQLLDSIRNASDDSTENIILSKSTSAFSASTEEKELLRSEKKRHEAALSRLQQLFLYGEDAITQTDYLVQKTNIEKSIDIIDKRLNEIDSSIANNFVMTDSDFFSKASMFIIQSNLAQARSVDFDKLIRTVDKQTLKMFINKVVQKVVVLDGKIAQISFQNGISLKFLYAAK

SEQ ID NO: 25057 - protein, 541 aa, synthetic construct
MQVDGYSLDAQRDKLRKYAAYEDMVVAGEYSDEGFSGKNIQGRQEFQRMLNDIQDCKDGVSYVLVFKLSRFGRNAADVLNSLQLMQDFGVNLICVEDGIDSSKDAGKLMISVLSAVAEIERENIRTQTMAGREQKAREGKWNGGFAPYGYKLESGNLVIAEDEVEVIRVIYDRYIHTNEGVAGVAKYLNRNGFVKKLRQNNTIPGFSRNFVQDVLDNPVYMGKIAYGRRRTEKRQGTRNEMHVVEQSEFPVYDGQHEAIISEEDWYLAQEKRKINSFKREKVNNPDHAHILSGILKCPCCGKSMYGNIAKAHSKDKKTRYYYYCKNTVTPTGHECSFRLNIEQTEINKFVAKVISAMVSNPRFIEAIQAKIGTAVDTEDMEKQIAVLQGQLKQAFGTKSRLERQMDTLDINDAHYDRKILDLQRRYDEQYDTIEEIEVQIGELQSQIRSIQQEKISGDNIYRLLLAFDEVYHSATEAEQKEFMKAFIERIEMFPEKRKDGSWIKKIVFNFPVPVDGEEVKELPLETETTVECVVLLTKAHN

SEQ ID NO: 25058 - protein, 519 aa, synthetic construct
MKKVTKIDKIQPAKNAEDKLRVAAYCRVSTATDAQLESLEAQKNHYENYINSRDDWCFAGVYYDEGITGTKASKRPELMRLLADCKAKKIDFVITKSISRFSRNTMDCLEIVRTLLNLNIPVYFEKENINTGSMESELFLSVLSTMAEGESASISSNNRWSIKKRFENGTYRLSSAPYGYKLESGGLQVVSEQADIVKRIFRELLSGKGMYSIAKELNAEQVPTQKGGRWTSTSVHNILTNEKYTGDCIFQKTYADSNFNRHINNGELNRYLIQNHHEAIISHEDFNATAALIEQRAAEKGIESGSDKYQKRYAFSEKLICGECGNTFRRRIHKGKYNSYVAWVCNTHLSDTNRCSMLFVRDDALKLAFATMLNKLIFSYRLLLKPYLAVMQSNTADEALLRIQYLENQLDQNAEQRSTLHKLMAQGYIDQILYTQESNELLLQARDFRSEIEALNNTVAGDTTKVYETERLINYCKRGEMLTDFNESLFELFVDHILIYSRQKIGFVLRCGLTFEEMI

SEQ ID NO: 25059 - protein, 502 aa, synthetic construct
MEIQIREGSREQKRKLKVCAYCRVSTDADEQENSLENQVRHYETVIKANPNYEYAGVYSDFAISGFKEKRPGLQKMLADAEKGKIDLILTKSVSRFARNTSIVLEATRKLKELNVGVFFELQNINTLSGEGELMLTILAAFAQAESESGSAGAKMVYQRKYEAGIPVQYLERSFGYTKDERGVFVADEAEAVWVRKIYKMAAEGYTPASIKRYLNENGIKTVGGVQWVDSTVFRLLENEIYKGDYIMHKHFVNEERKLVRNRGEVDAWYIEDDHEAIVSPELWQKAQDALAAKRDYLAEGSVIEEFTEENYPYMNKIYCAKCGYPLYKRIYSKGNRLNWGCSGTKRYGKTFCDGINIPDGVLRSAWHFKENTYIAEKASDKGVKEFTYLKEQSWKRRHKKKQPPAIPENTEVEYPYREKIFCALCGSRLVRYVNPQSHKVTWVCSRRKRKGKDACDGTRVPDTIIKGWGEIKKDIYIQRKDDKNGKKRYSYTSKKPEGADRA

SEQ ID NO: 25060 - protein, 463 aa, synthetic construct
MARSVTVIPARNRQVSEYRAAPQKKIRVAAYCRVSTDQEDQLHSFEAQVDYYTKYINDHENYEMAGIYADEGISGTNTKKREQFKRMIADCEKGKINLVITKSISRFARNTQDCLMYSRKLKNLGIGIIFEKENINTLDSTGELLFTILSSLAQDESRNISENCKWGIRTKFKNGEMHLNTFKFLGYDKDENGKLIINREQAKTVRRIYRDFLWGLNPAQIAKELEDEQVPGCLGQTKWYASTVIGILKQEKHMGDALLQKTYTADFLTKRQVKNNGEVAQVYVKDSHKGIIDKETWNAVQEEFERREKFTQKHGTDRYSYGSECYPFCEKIFCGECGSLFTRHSWKSRGIIQWQCKNHRKDGKVACTNAYVDNADLEKGFVKAFNRLVGEREKHIERWNSMKLDGTPLEKIRAGQMMEATESGQLQQYVPEAAQLVLEEITIFGAKKYEFAFLEGSRVKVSV

SEQ ID NO: 25061 - protein, 550 aa, synthetic construct
MADGQQWLSAVFFSLYAKKRKVKGNLRKHLLLLAFRVIYRLPKRKEVRLVEIQIREGSREQKRKLKVCAYCRVSTDADEQENSLENQIRHYETVIKANPDYEYAGVYSDFAISGFKEKRPGLQKMLADAEKGKIDLILTKSVSRFARNTSIVLEATRKLKELNVGVFFELQNINTLSGEGELMLTILAAFAQAESESGSAGAKMVYQRKYEAEIPVQYLERSFGYTKDERGVFVADEAESVWVRKIYEMAADGYTPASIKRYLNENGVKTVGGVQWVDSTVFRLLENEIYKGDYIMHKHFVNEERKLVRNRGEVDAWYIEDDHEAIVSPELWQKAQDALAVKRDYLAEGSVIEEFTEENYPYMNKIYCAKCGYPLYKRIYSKGNRLNWGCSGTKRYGKSFCDGINIPDGVLRSAWHFEENTYIDEKASDKGVKEFTYLKERSWKRRHKKKQPSAIPENTETEYPYREKIFCALCGSRLVRYVNPQNHKVTWVCNRRKRKGKEACDGTRVPDTVIKGWGEIKNDIYIQRKDDKNGKKRYSYTSKKPSGIRV

SEQ ID NO: 25062 - protein, 579 aa, synthetic construct
MRNKSLAGRANNRAERPRKVAIYIRVSTTHQIDKDSLPMQRKDLIAYCELILGIEDYEIFEDAGYSGKNTDRPAFQEMMQKIRAGSFSHLLVWKIDRISRNLLDFAEMYEELQSLRVTFVSKNEQFDTSNAMGEAMLKIILVFAELERNMTSERVTATMISRANQGLWNGGRIPYGYSYDAETSAFSIIQDEADVCQLMKTDYFEHKSIIHTARLLNDKKIPTRSGALWSPTTVWKILSSPFYAGVYRYNHYKGTENRTLNPEEEWVLVPDHHPAIFTLEEHEKLCDILDANKRTANLPGQKHRAKNVYVFSGILYCGKCGNKLVSTPGRLQADNFRTTTYSCPKKRKTHECDNPSVNDLIVGEFVINYILNMLNAKSSFSSINSPAELEERLLYGGSFKDVQHISEDGLNEFYNLLSRYGSDSSYVFAVKHPRKKKAAVNPEVEALRKDKEKQERALKRLQDLYLYSERAMTEKDFIIQKNEISSRIQDINTRLGMVTHDANSTLSDEDFVRQASHLLITKKLIGRDYIYYKALAQTVSPDVLKIYMETILDSVYVIDGRVSSIVFRNGLTHTFIYQK

SEQ ID NO: 25063 - protein, 529 aa, synthetic construct
MNRTAARSVTVIPPTINPLTHLSRVAVQKRRVAGYARVSTDSDEQFTSYEAQVDYYTQYIKRNPEWEFVKVYTDEGISGTNTKHRIGFNEMIADAMSGKIDLIVTKSVSRFARNTVDSLVTIRKLKEKGVEVYFEKENIYTFDGKGELLLTIMSSLAQEESRSISENVTWGQRKRFADGKVNLPYKQFLGYRKGADGFPEVVPEEAIVVRRIYTRFMEGLTPGAIAKELTADGIPTPSRKQRWQTSTVESILQNEKYKGAALLQKCFTVDFLTKKRKVNEGEVPQYYVKHSHEPIITPEEFDKVQTELARRKQISRQYSGKSIFSSRIVCGDCGSYFGSKVWNSTSKYRRVIWQCNGKFKGEHKCETPHLDEETIKAQFVTALNAIIESKDNILEDCRLMQATLTDCTGIDTEIESLLEEIDVVTELTKRCIAENSQMAQNQEEYAARYNGLVERYEKAKARLEQLRTTKAAREAQAEAIGAFMFEVQELDALTEFDEKLWLTVIDTVTVHADGRMTFKFQGGKTLTSY

SEQ ID NO: 25064 - protein, 434 aa, synthetic construct
MERVVERVDALIPAQPRALRVCAYARVSTGKDAMLHSLSAQVSYYSKMIQNHSGWMYCGVYSDEAVTGTKRERAGFQYMIEECRQGNIDLVITKSISRFARNTVTLLQTVRELKSLGVDVFFEEQHIHTMSADGELMMTILASYAQEESLSASENQKWRVRKAFENGEIINLRFLFGYDITPGGIQVNEKDAAIVREIFARFNGGESMSSICRDLDARGHKGVLGGTWCAERMRNTLSNEKYLGNALLQKRYRNNHIEKKLLPNRGELPMYYAEGTHEPIIDQATFDKAQERLRMLAQQTANRKKPTRSVFSGLIHCGLCGNTYKRVTYRKKHYWNCTTFQTKGKSECAAKRIPEETLEVLTCEVLGAVSFDPDMVRSKITAIRAEKSNMVVYCMDDGSEIVKRWKDRSRAESWTPEMKEKARQRALQARRKKE

SEQ ID NO: 25065 - protein, 538 aa, synthetic construct
MAKKVTVIKAAKAQKHTQEERRLKVCGYARVSTGSQAQATSYTAQVEYYTEKIESNPLWEFAGVYADEGISGTNVKHRDEFQMMISDCEDGNIDLILTKSITRFARNTVECIQTIRKLKEIGVGIYFEKENINTLSEKSELFITILASVAQGESENISSNNRWAIQKRFQDGTYIISTPAYGYGKDEDGNLVIIESEAETVRWIYESYLNGMGVYVIAKALNQKGIPTIRGAEKWQDGVIQDILKNPIYEGDMLQQRTYTETRFPFVRRVNNGQRNQYLIKDSHPSIVTHEEAEAVRNLMAYRVDVLHMNKSDYTKRYLFSGRIICGECGRTFRRQKIYIGKPYEKIIWTCSGHVEDKESCCMKAIREDVLHRAFTDMWNKLYTNQGTILEPLLKGLTELVAARQDSEEIRQLDKEIKDISGQSQILNQVMRKGYMDSALFMESSSKLGWQLTECRRKKTLLTRKLRRTKEIVRTEQLIQLIAEQDGLREEFDEQLFKMTAEKIVVSKEHDITFCLYNGLKLTERGGGQDAVAHANRL

SEQ ID NO: 25066 - protein, 590 aa, synthetic construct
MKTVEKIERKLPVLKTRKRVAAYARVSMESERMQHSLSAQVSYYSALIQKNPEWEYAGVFADYGISGTGTKKRDEFNHMLAECEAGNIDIILTKSIQRFARNTVDLLNTVRHLKELGIEVRFEKEKINSLSGDGELMLSILASFAQEESRSISENVKWGTIKRFKQGIPNGKFSIFGYEWQDDKLVIVPEEAEIIRWMYAEYMKGASRIEIGRALMDRGIYTRQGKPWVDSNVKVILTNITYTGNMLFQKEYCEDPITKHRRKNYGEMPQYFVEDTHEAIIPMDEWQAVQAEFKRRRDLGPFGNKSLKLSAFSTKITCGCCRKHYRHSGKRNTAGEVYYIWICQTKSQKGVSACPSKNIPEKMLQNTAAKVLGLDKFDEDVFSQQIEEVIVIGDDTLTFRFYDGHEVTTKWQSTAKTDWWTDERRKLWGERHKRKDTNPNRNTFYEFTGFIKCGCCGANYRCQSGKRKDGTPTRSWYCTGPRSECRNPAIRDETMKRLVTEILGLDEFDEAAMDAQIESATILDHMVTFHFRDGHIESRDFLDKRHGTPWTEERREKAKKSMKAAWTDERREAMSERIKKIRSEKKWPNP

SEQ ID NO: 25067 - protein, 523 aa, synthetic construct
MAKSVTTIPATLSRFTAAPINSTKKRRVAAYARVSTDNEEQLTSYEAQIDYYTNYINGRDDWEFVGVYPDEGITGTNTKKREQFRQMVADALDGKIDLIITKSVSRFARNTVDSLTTIRKLKEHNVEVYFEKENIWTFDSKGELLLTIMSSLAQEESRSISENCTWGQRKRFADGKVTVPFKRFLGYDMGPDHNLVVNPEQAKLVKRIYGMFLQGQSPFQISRTLTEEGIPSPGGKDHWNPSNIKSILTNEKYKGDALLQKSFTVDFLTKKKKTNEGEIPQYYVKDNHEAIIDPETFEMVQTLMTTRTKGRNRKSSVSIFSSKVKCGDCGSWYGPKVWHSNDAYRKVIWQCNHKFDGQKCATPTLTEDEIKELFLRAANQVIDQKEQFIAIYDQVLSRSLNTTALESELSDLEAEINIAAELIEDCIKENAHVALDQDEYQKRYDALVARFDKAKARHTEVTDLITERMARKHQIEAYLKNLRSREPLTEFRETDWLAMVDYITVHSKKDIRVTFKDGTEIKA

SEQ ID NO: 25068 - protein, 534 aa, synthetic construct
MARKKNIAAGQDAVIYARYSSHNQREVSIEQQVSECMKHAAELGLHVVGTYEDRAISGKTDNRPRFQQMMRDAEKGKFQAVVSWKSNRIGRNMLQAMVNEAKLDDYGVKVFYAEEDFDDTAAGRFALRNMMNVNQFYSENMAEDITRGLYDNASKCMANGRQPLGYKRGEDGRVVLDEANAAVVREIFTRVAAGDLFVDIARDLNAQGIKTSKGANWNKGSFQSICQNERYRGIYIYGDVRVADGIPRIVSDDLWYRVQEAMRMKKNPVGTRHRVGAEDYLLTGKLRCGHCGSYMTGVSGTSRNGELHYYYTCQKRRTEHACDKKNIRRDVIEPAVAQAIKMYCLTDDVIAWIADRTVEYWEKHDNDLQIEALEQQLEENKKATSNMLKAIEMGIITEATRTRMVELETEQSRLSVQLNAAKEDVVKIDREQIISYLELLQQGDIHDRDFQMELFKNFLVAVYVYDDNRMKLVFSCMGDQNSVEIPLETGEDPPDGGLSPDAKMFVLTPDSSTKSERHHTLCGAFFVVAKRVRA

SEQ ID NO: 25069 - protein, 517 aa, synthetic construct
MPRKKKLQEVGGLRLVAYYRYSGGSGQTEQSIEGQRRDCEAYAKLHGMTIQHEYIDRHISGKTDDRVSFQQMIRDSDKGAFDMVICWKTDRFARNRYDSAVYKKRLRDNGVEIIYAAESNISGAEGIIIEGLMESLAEYYSAELAEKMRRGMRESALKCQAINRCRPLGFTTDAGKKFIIDERTAPAVRFIFEHYAAGESAAYIVEQLNEKGYRTSQGNEFNKSSINRIIQNEMYRGVYISKAYDVRIEGGVPAIVDDELWRRAQAMAKLNKQKRAKYSAKADYFLSGKLYCGECGCLMKGISGHSSTNGEVYRYYACSNPKCKKHNVPKEELEGKVIQAIIDNLLQPEAMEALAEAMVAVQETDADKPNAEREAIQQELADVRRRSKNILDAIENGTANPHLTARLDELTERENTLRFQLSTLTDEKPLRFTKEEYLFLLEQFLIDPAERNEDYGRRVVHTFVTSMEVSDSKLLIYFNISEENADKNKNASLSELQKESSTVKRLVRVARIELTAS

SEQ ID NO: 25070 - protein, 503 aa, synthetic construct
MAGRITQVTFGSPQLPRDKNVAAYCRVSSGKDAMRHSLAAQVSYYSELIQNHAGWEYAGVYADEAVTGTRDSRKNFRRLLSECRAGKIDMVITKSISRFARNTVTLLETVRELKTLGVDVYFEEQNIHSLSADGELMLTILASYAQEESRSASENQKWRIKKNFEEGKPWSSTLLGYRNVNGRYEIVPEEAETVRMIFAWYLEGAGATAIRNRLNAMGIKTRLGNSWSRSPILKLLRNYAYTGNLILQTTYREDFITKRSVKNKGEKPMYHAQGTHEAIIDMDTFNRVQEEIQRRAEHFASPDGNKSTARYPFTGMVKCSRCGKSYVRSGSPKYRTWTCHTRRKDGLNCCGAEIIPEEELFRLTAEVIGGKVTEDAVRDKITVIRAEKDRTLVFCLKNGKEIVKQWREHEIKYICTEEQKRQISLKNSGRKRTDEQKRQQSERMKEYWKTHEFTEEQRRLISEKKKAYWSDREASAEHREMLRQRMKEVRTMRKNGGKEENDG

SEQ ID NO: 25071 - protein, 580 aa, synthetic construct
MVRRKTALRGVSASTRITKVAIYIRVSTIHQVDKDSIPMQKKDLIAYCQLILGTDNYEIFEDAGYSGKNTDRPAFQDMMGRIRNGEFTHVLVWKIDRISRNLLDFAEMYEELQSLRVTFVSKNEQFDTSTAIGEAMLKIVLVFAELERNMTSERVTATMISRANNGQWNGGRIPFGYSYDSGTSTFSIREDEAVVCRRLKDLYLDNKSLVYTARALNADGYKTRAGADWTPTAVWIIASSPFYAGIYRYNRYKGTENRTLNPEEEWVMIPDHHPAIFTFEEHEAMKSSLKTNARYVDNPVGKPHATANIHIFQGIAYCGKCGNKMVSTPGKKHADGYRPSNYSCPLHRRSKKCDNATVNDMIVGEFAINYILNMLNAKKTFSNIDTPEELQRHLLTGSTFSDISSIEEDGLNDFFNLLSRYGSDNSYVFAIKTPRRKKASVNPELAALRKEKEKQERALQRLQDLYLYSDKSMSEKDFILRKSEISDRLKNINAQLGLITQNPDSLLSDEEFIKQASHLLIQKELKGRKYIYYKNLATSVDPEILRTYMETILDSMYIIDGRISSIVFKNGLTHKFIYKN

SEQ ID NO: 25072 - protein, 522 aa, synthetic construct
MGNIMLIPARRQVGNNARKQEEEKPKLRVAAYCRVSTDSDEQATSYEAQVEHYTEYIQKNPDWEFAGIYADDGISGTNTKKREEFNHMIDDCKAGNIDMIITKSISRFARNTLDCLKYIRQLKDMNIPVLFEKESINTIDAKGEVLITIMASLAQQESQSLSQNVKLGLQYRYQQGKVQINHNRFLGYTKDADGNLIIDPEQAEIVKRIYREYLEGLSMDKIAAGLERDGILTGAGGKRWHTSTINKILRNEKYIGDALLQKTYTTDFLNKTRVKNNGLVPQYYVEGNHEAIIPKDIYLQVQEELVRRRVVKTSANGKKRSYSCNHCFSQIVICGECGEMFRRLHWNNRGVKSIVWRCISRLESTGLECHARTINELVLQDAVVKAINQMLGDKSSYQAQLQLNIASVIRASQATSVENIDEKLMALQQELIQKAQSKEAYDEIADEIFKLRELRQKTTVDTAARDEQIKRINDLQDYIAQQTTHLTEFDESLVRRWIKQITIWDDRITVELKSGVNIDVNA

SEQ ID NO: 25073 - protein, 453 aa, synthetic construct
MECVAYMRVSTEKQAVEGNGLDSQKRDIENYCRKNELVITDWYIDDGYTGANMDRPGLQRLVNDCSRKRVSCVVAFKLDRLSRNMIDGIYLIEKVFQKCNVVFKCVHDSVNYDSPMEQAYTQMMAVFAQLDKNTMMLRMRGGMLERIKQGYWMGGGNLPYCYSYSKEQGILIPIPERAEQARKALELFISGYSDVKIKEICGFKSELVTRNILTGIVNIGMIPYKGKIYQGKHEPVFDKGRFNLAQELRKTRAKSRATCQTEPNLLTGLCYCGVCGCAMRYQKWTNGEHKIYCMSRNKSMSYLPNYNADCNNSLEWADDIERQVEEEILKISLNLSSYKPKEKATKLEIMQSQLDKEQTKLKRLYSLYADGNDTVLEMIKESEVLIKTMKANVLSESKNAADTQKKEFVYENIKKLADVWDNIDKKKKNMILKTIIDKIVIVNGNIEIQLKNF

SEQ ID NO: 25074 - protein, 536 aa, synthetic construct
MKAAIYSRKSKFTGKGESIENQIEMCKKYAADNNYTETFIYEDEGFSGKNTNRPEFKQMMKDAKKHKFDAIICYRLDRISRNVSDFSSLVDELKSLNIDFVSIREQFDTTNPMGTAMMFISSVFAQLERETIAERIRDNMYELAKTGRWLGGTPPYGFISEPDSYLDSNGKQKKMVKLSPINDETELVKSFFKDYLKLGSLGKLQKHLIKNNINTKRNVAWDVKALQMLLRNPVYVKSSELVISYLESKGATVFGDPNGCGILSYNKKDSKSKYKDISEWILSVAQHDGIIEDTLWLNVQKQLDRNKVLAPRLISNDASGLFNSVLRCKECDGKMIQKQGHVSTKTGKKLRYYVCLNKVNSNGELCNCKNIRADKLEHDVLEKLFEETSNNSSLINAIDNYKKKLQSEISSKNDINSIKKLISQKQLQVDNLLDKISLNPNLYDLFEKKLEELNNELKQLKFRKFELEDSSVNMKIAIKEIDASTKMLLNFKQLWENADHSMKKLLISTLIDKIYYDAESKTASIKLFCIKKKGAL

SEQ ID NO: 25075 - protein, 533 aa, synthetic construct
MAKKKKPAGGIAVIYARYSSHNQRDVSIEQQIEACRKHAAELGLTIIATYEDRAISGRTDNRPAFQRLMHDAEKGKFSYVLAWKSNRMGRNMMQAMVNESRLMDCGIKVYYAEEDFDDSAAGRFALRSMMNVNQFYSDNLAEDVRRGLMDNANKCMVNGRQPLGYKRGKDGKVVVDEPAAAIVREVYTRVASGELFTDIARDLNRRGIKTADKGEWNKNSFHRLCSNEKYRGIYIYGDVRIEGGIPTIIDDPLWYKVQEALRVKKLKRNGRHRPGDEDYLLTGKLRCGKCGGYMIGMSGRSKTGDIHYYYACQNRRVGRTCDKKNIRRDVIEPAVAQAIKEYCLTDDAIEWIADKTVEYWEKADRNLQLDSIEGDLVAVQSSISNVMKAIEMGVVTETTRDRLIELEKQRTDLKSKLALAKEEVVHVDRKKLISSLLLFRNGDIHDRQYQEDLFKTFLISVYVYDDDNNGHLKIVFNAFGDNNTVDLPIDFGETDNQSAFSDGAEKFDYSLHRSTKKPSDSFRWLFCFALGPV

SEQ ID NO: 25076 - protein, 515 aa, synthetic construct
MTAVIYARYSTDSQREESIEGQIRECTAYAEKNGFTVVKHYIDRAISAKTDNRPQFQQMIKDSERGIFDVIIVWKLDRFARNRYDSARYKTQLKRNGVKLVSATEVISAGPEGIILESVLEGYAEYYSADLSEKVVRGMTENALKGIYNGGTIPFGYMIDETRHYQPDPLLAPYVEQTFQKYADGATMTDLRDWLKAHNIKNSMGGEMSYNTIQRMLSNRRYIGELRLRDVVQPNAIPALVSEDLFNKVQEKLAKNKKAPARHKAEESYLLTTKLYCGKCGALMFGESGVSHTGKMYTYYKCAAAKKKKTCDKKAVRKQWLEDLVVNETMKLVEDDASMNAIIAKVMELQNQESTDLPIYEKQLKETEVGITNMLNAIQMGILTSSTKERLEALEEQRKELQARIAEERLAKPKMKEEFVRFWLLRFRKLDMTQPEQRQALVDTFINAIYLYDDKVLITFNYKEGTETVAFGEAVKAEKSSDMSARGAPEKPHSSVEKRAVWLLFLCQMASLTTF

SEQ ID NO: 25077 - protein, 499 aa, synthetic construct
MKTAVIYARYSSDKQTEQSIEGQLYDCYNYAKQHGITVVREYIDRAMTGKNDDRPAFQQMLHESALHKWDSVLVWKLDRFARNTIDSAVNRQILAKNGVKLLSVMESFGDDASGQMMTHIIEAINEYYSADLREKTIRGMRQSAMKAQTTGHIPLGYKVVDKKLAIDDETRIIPETVFRMYAEGERLTDIAEHLNAQGYRNRRGRPFTTNSFYNMLANEKYIGIYKYDDIVIEGGIPQMIPNEVFEAVREKLITNRKRAAKNTAKADYYLSGKLYCGHCGEPMSGLSGTGRNGVKHYYYRCNGVQKKSGCHKKLENKYLIEDEVCRAARSAFEQMDKAETAETIYQMYLQTVRNEYAPAELEKELTECTKQAENVVNAIAQTGGNQLLYDKVRELEERKEQLSSALRLSQAMTDNVPSVEQITVFIDDILATDINTTEGKKAIADIMISKVYVYDDKLTVIFKDKDGKSVDIPLSAVSDTSSADCAPSALGSQANFKAT

SEQ ID NO: 25078 - protein, 628 aa, synthetic construct
MKAAFLIRCSTKNQDLNRQTRDLTRLAKSMGYEYDLENLVYGEKITGKDDVTKKNRDSIDRLLRAAKEQRFNVVLVSEVSRMSRDPASGRIYVRLLINMNIPVYFKDIDLWTINPETGKKVRDAELVIGAAFDAAWKYLKSMKTQIASARRNELDNNRISIGQPYFGYKRYEGTDKSKKNQIVVNEEEAEVVQAVYNEYLKEGATLKSTALAITNMYGEKLNRKFSLGTIEHILTYESYATGIKKVNLKDPDTDEVEVFDVSTPIIIDKELYEAATNKRKKNRVKDEPYPNQQVYLLSKLIKCPDCGYTLTPRRKAGEFGQTYRLVNGKPAVSWLCMSGINNITDCTNRTSIANEKLEPIIWELVKKELIGYANMNDEKREEQIRECEEKIEYQNYSIQNFTKEIDKLKKRLSTAYQFSINAAEMAGDDEDMRTMAMEEFNRTAKGVRQEMKNFEKSIEQAKGELEKLRDLKTFYSQPTLPKDYLEQIEGNFTEMRNLVKQLITKIVPYRITTFKKKERESGVKTCNKMIIVKNGAVLLEVYTIGGVYNVFYNANSKFQVKTAYYVHGEYATFQNGIRKFPTYDEGEYFVISNANMVMETDNIDEVVTVNEFVDIAIANNWVIEYQYI

SEQ ID NO: 25079 - protein, 516 aa, synthetic construct
MARKKKVSPGNRLVAYYRYSGGSQQTEQSIEGQRRDCEAYARQHGLTIVHEYIDRHISGRGVESRLAFQQMIADSSKHLFDLVICWKTDRFARNRYDSAVYKKKLRDNGVRILYAAESSVEGPEGIILEGLMESLAEYYSAELAQKMRRGMRESALKGRAINPSRPLGLTTDEHKRFIIDEKNAPTIRFIFEHYAAGESSASIVEQLNAAGLRTSKGNAFNKCSIPRIIQNEAYHGVYICKAYDVRIDGAIPAIIDDDLWKRAQKMLTLNKQHRAPHSSHADYLLSGKLFCGCCHSLMRGISGHNCRNDVYYYYACGNKADGGTCKKKNIPKDVAENLVVNAICENILRPDTLEDLADAIAAAQQADVNQPDPERAMLEQNLADVHRKINNIIESIENGTASSRLSARLADLEQQESTLNYQLESLKEVHPPVLDRERILFLLEQFLISPNERTEDYNRRIIDTFVNRIEITDTEMLIYFNLSEASASEKQKNSQPNSCSTGNHLVRVARIELTAS

SEQ ID NO: 25080 - protein, 508 aa, synthetic construct
MKKAIAYMRFSSPGQMSGDSLNRQRRLITEWLKVNSDYYLDTVTYEDLGLSAFNGKHAQSGAFSEFLDAIEHGYILPGTTLLVESLDRLSREKVGEAIERLKLILNHGIDVITLCDNTVYNIDSLNEPYSLIKAILIAQRANEESEIKSSRVKLSWKKKRQDALESGTIMTASCPRWLSLDDKRTAFIPDPDRVKTIELIFKLRMERRSLNAIAKYLNDHAVKNFSGKESAWGPSVIEKLLANKALIGICVPSYRARGKGISEIAGYYPRVISDDLFYAVQEIRLAPFGISNSSKNPMLINLLRTVMKCEACGNTMIVHAVSGRLHGYYVCPMRRLHRCDRPSIKRDLVDYNIINELLFNCSKIQPVENKKDANETLELKIIELQMKINNLIVALSVAPEVTAIAEKIRLLDKELRRASVSLKTLKSKGVSSLGDFHAIDLTSKNGRELCRTLAYKIFEKIIINTDNKTCDIYFMNGIVFKHYPLMKVISAQQAISTLKYMVDGEVYF

SEQ ID NO: 25081 - protein, 514 aa, synthetic construct
MRRKKVEGGNRLVAYYRYSGGSGQTEQSIEGQRRDCENYARLHGLTIVHEYIDRHISGKTDDRAAFQQMMNDGDKGAFDMVICWKTDRFARNRYDSAVHKKRLRDNGIEIFYAAESNVDGAEGIIIEGLMEALAEYYSAELAEKMRRGMRESALKGQAINRCRSLGLTTDENKKYVIDEKTAPTVRFIFEHYAAGESSTSIVDQLNAKGLRTSQGNLFNKCSIPRIIQNEMYRGVYTSKAYNVRIEGAIPAIIDDDLWKRAQAMMKTNRQLKAKYEPKAEYLLSGKLFCAKCGCTMKGVSGHSGGNDEVYRYYACSNPQCRKRNIPKDDLEGKVIRSICDHLLQPETMELLAETMVDVQKADMEKPNAERDVLEQELWDVRRRSKNIMDAIETGSANPQLVARLDDLTQQENTLTYQLSTMEAEKPLLFTKEQYLFLLQQFYAQPTEQDDAYKRRLINTFVTNIEVSDSELLIYFNISEETENKNKNAPQLNFDKSSSTEKRLVRVARIELTAS

SEQ ID NO: 25082 - protein, 508 aa, synthetic construct
MKKAIAYMRFSSPGQMSGDSLNRQRRLIAEWLKVNSDYYLDTITYEDLGLSAFKGKHAQSGAFSEFLDAIEHGYILPGTTLLVESLDRLSREKVGEAIERLKLILNHGIDVITLCDNTVYNIDSLNEPYSLIKAILIAQRANEESEIKSSRVKLSWKKKRQDALESGTIMTASCPRWLSLDDKRTAFVPDPDRVKTIELIFKLRMERRSLNAIAKYLNDHAVKNFSGKESAWGPSVIEKLLANKALIGICVPSYRARGKGISEIAGYYPRVISDDLFYAVQEIRLAPFGISNSSKNPMLINLLRTVMKCEACGNTMIVHAVSGSLHGYYVCPMRRLHRCDRPSIKRDLVDYNIINELLFNCSKIQPVENKKDANETLELKIIELQMKINNLIVALSVAPEVTAIAEKIRLLDKELRRASVSLKTLKSKGVNSFSDFYAIDLTSKNGRELCRTLAYKTFEKIIINTDNKTCDIYFMNGIVFKHYPLMKVISAQQAISALKYMVDGEVYF

SEQ ID NO: 25083 - protein, 522 aa, synthetic construct
MGNVMLIPARRQIGSNARKQEEEKPKLRVGAYCRVSTDSDEQATSYEAQVEHYTEYIQKNPDWEFAGIYADDGISGTNTKKREEFNRMIDDCNAGNIDMIITKSISRFARNTLDCLKYIRQLKDMNIPVLFEKESINTMDAKGEVLITIMASLAQQESQSLSQNVKMGLQYRYQQGKVQINHNRFLGYTKDADGNLVIDPEQAETVKRIYREYLEGLSMDKIAAGLERDGILTGAGGKKWHTSTINKILRNEKYIGDALLQKTYTTDFLNKTRVKNNGLVPQYYVEGDHEAIISKDIYLQVQEELVRRRVGKTSANGKKRSYSCNHCFSQIVICGECGEMFRRLHWNNRGVKSIVWRCISRLESTGLECHARTINELVLQDVVVKAINQMLGDKSNYQAQLQLNIAAVIRASQATAIDSIDEKLMALQQELIQKANSKEDYNEIADEIFRLRELRQKTTVDTAARDEQIKRINDLQDYISQQTALLTEFDEALVRRWIKQITIWDDRITVELKSGVSIDVNA

SEQ ID NO: 25084 - protein, 521 aa, synthetic construct
MKKVTKIDGVQKNTAINSRLRVAAYCRVSTGSDAQLESLEAQKSHYEQYINSREDWQFAGLYFDEGITGTKAEKRPELLRLITDCEARRIDFVITKSISRFSRNTTDCLALVRKLQSLEIPIYFEKENINTGSMESELFLAILSSMAEGESASISENAKWSVKRRFQNGTYKLGYTPYGYDWDGKNMIINPEQADVVKRIFADILSGKSTNTIADELNAEKVPSKKNNHWTSSTIRGILANEKYTGDVIFQKTYTDETFNRHTNYGEVDQYMAPDYHEAIISHSDFDAANALVNQRAAEKGIEKGSDKYQQRYAFSGKIICGECGDTFKRRIHTCNTYKYVAWACNTHLKNKESCHMKYVRDDEIKTAFITMLNKLIYGYRLILTPYLKVLENSSGDEAIHRIQHLEQLIAQNSEQREALTKLMAQGYIDQILYNQETNALLLQAETYRSDIEAITIGMTGDAAKVTETNLLLHFVSHTDMLTAYSEELFENYADHIEVMSRNEIRFVMKCSLTFTERIDD

SEQ ID NO: 25085 - protein, 515 aa, synthetic construct
MQYLIYLRKSRADREAELRGEGETLARHEKALLELAKRQHLPIADIYREVVSGETIASRPMMQQLLSEVEQGIWNGVLVMEVERLARGDTIDQGIVAQAFKLSDTKIITPIKTYDPNNEFDEEYFEFGLFMSRREYKTIKRRLNNGRQASVKEGKYVGNRPPYGYERIKIENDKGFTLKPLEKEAQVVRMMFRWYAYGTHGISTIADQLNEMAIPSKTGKQWVYPTVRDILQNPVYVGKIRWGWRGQRKRVKNGSVSVSRPRSDDYLLADGIHPPIVVQQLFDQVQKKFSTHKPLPTSAREMKNPLAGLVICAKCGAKMQRRPYQRENIRTGLICPNNKCRNVSAPFDDVEQKLIEVLVEYIKEEKLRISNGHTQIDDSVLQILQNQLTDLQEETVDLNKQNDNIHDFLEKGIYDVDTFLQRSQKISSRITEIEEKQKTLQQDIIEENKRIESATSIIPMTEQLLLQYENMSALEKNSMLKEVLRCVKYERECSIRDGGTADNFTLYLYPKISHK

SEQ ID NO: 25086 - protein, 451 aa, synthetic construct
MQRVAIYMRVSTDQQAKHGDSLREQQETLDEYIKQNKNLKVVDKYIDGGISGQKLNRDEFQRLLDDVKNDQIDLILFTKLDRWFRNLRHYLNTQEILEKHNVSWNAVSQQYYDTTTAYGRTFIAQVMSFAELEAQMTSERIKSVFSNKIQQGEVVSGKVPLGYKIENKRLVPTPDKDIVIDLFDYYVRVGSLRKTTTYLEEKHGIVRDYQSVRKLLTNEKYIGKLRNNPNYCEPIIDKDVFETVQLRLSQNVKTSGSHDYIFRGLVRCADCNGSMSCSTLKSKYIKKTDGEVSYYIRSCYRCTRRRNNLTRCKNKKTYYERALERYLLDNIQTNIAMHVRTLKKEVTKKDSVKRKKDALFVKIERLKKAYLNEIIELDEYKRDREMLENEIANLKEPKINKNIAPLKKVLSDDFFEKYEKASINQKNELWRSIIESIEVSVDGNITINFLP

SEQ ID NO: 25087 - protein, 549 aa, synthetic construct
MTAVIYARYSSDNQREESIEGQIRECTAYAEKNGITIVKHYIDRAISAKTDNRPEFQQMIKDSDKKLFDIVLVWKLDRFARNRYDSARYKTQLKKNGVKLMSATEIISEGPEGIILESVLEGYAEYYSADLAEKVVRGQTENILKGRCNGGRGTFGYTLDPERKFHIDPLTSPFVLESFKKYNEGSTMKEIRDWLNENGIKNPVGGAFTYNSVEHMLKNRRYIGELKFRDVVVPNAIPPIIPLELFEDVQEKIAKNKKAPARRKAEDDYLLTTKLFCGYCGALMFGESGTSRTGEVHRYYKCATAKKHKGCKKKTVRKQWLEDLVVNQTMQLVKDDAAMESIIAKVMELQNKENTNIPLYEKQLRDAESGIQNMLNAIQAGILTSSTKERLEQLEETKRELEARIAEEKLAKPKVTEEFIRFWLLRFRKLDMSLKDQRQALVDTFINSIYLYDDKVLITFNYKEGTQTVTFGEATEVASEGNGSDLDCFTAPRKIPRLTVKNAVQIVGFLVLQRPRNGWNVPYLCLTTQKMPCWSALPRALCWMPGGAV

SEQ ID NO: 25088 - protein, 530 aa, synthetic construct
MARKKNIATGQNAVIYARYSSHNQREVSIEQQVRECMKHAAELGLHVVGTYEDRAISGKTDKRPNFQRMMRDAEKGKFQAVVAWKSNRIGRNMLQAMVNEAKLEDCGVKVFYAEEDFDDTAAGRFALRNMMNVNQFYSENMAEDITRGLYDNASKCMANGRQPLGYKRGEDGRVVLDEANAAVVREIFTRVAAGDLFVDIARDLNAQGIKTSKGANWNKGSFQSICQNERYRGIYIYGDVRVVDGIPRIVSDDLWYRVQEAMRMKKNPVGTRHRVGAEDYLLTGKLRCGHCGSYMTGVSGTSRNGELHYYYTCQKRRTEHACDKKNIRRDVIEPAVAQAIKMYCLTDDVIEWMADRTVEYWEKHDNDLQIEALEQQLEENKKATSNMLKAIEMGIITEATRTRMVELETEQSRLSVQLNAAKEDVVKIDREQIISYLELLQQGDIHDRDFQMELFKNFLVAVYVYDDNRMKLVFSCMGDQNSVEIPLETGEDPPDGGLSPDAKMFVLTPDSSTKKALYFVGSTVLFFLLS

SEQ ID NO: 25089 - protein, 516 aa, synthetic construct
MQKNTTVETTTKAVIYARYSSDRQREESIEGQLRVCEDFAKRNGMTILHVYADRALSGRSDQRPEFQMMIQAAATQTFDTVLVYKLNRFARNRYDSAKYKHKLKKYGVKVVSAMENIADDPSGILLESVIEGMAEYYSAELAENVMRGMTENALEGKWPGGIVPLGYKLDTEHRLIIDEPAAKTVRWIYQQYLDGKQPTRIIRELNAAGCLTALGKPFRKNSLRTMLKNERYIGTFIWNGIKKPNVIPAIIDSADWHKVQEIMKVKKKCVSKAKDNDYYLTGRLFCGHCGENMVGTSGTSKLQRIYRYYICSGHQKKKGCTAKAVRMDKLEDIVCNATTRLLSNRDAIRAIAKQAISAQETQGPSLVLQSLQNQKADISRKLQNCVKAVEEGLISQTVTNHIHDYEKQLQTLTDAIQKEELMNQIPHLTEKHIEFFFWSISQQIKKADKYKSILLSSIVRSVIVYEDFIEIQYNYKKELPILQNPVRIGGSDMPVMVEHRGIEPLTSRLRTLRSPS

SEQ ID NO: 25090 - protein, 534 aa, synthetic construct
MNHVAFATHHNKIKTAPAPTETVYISEDMRLKSTNIVSSSGQSRKRNICFALAVIFVPILNIFYKRRVMQMPEKILRCAIYIRVSTFEQSVHGKSLQAQKECLEQYAADHNMAVVGVYADEGKTARKELKKRKAIHALVEDVKQDKIDVIVFWRLDRWFRNLSDFYKVQDVLDEHGVRWISVSEPGINMETRDGRLQLNVVLSIGQNEVDTTSERIKFVNESSIRQKKLIFGDANMPLGYKTGIVDGKKCMVKDPETEHMVEDFFRYFKNHNTKKGAIRYMQETYGIDFSYSMLRTMLSSEFYKGTYRGYPYCPAYLSEKEWNEMQIISKRNIKNTPSGRIYLFTGLMRCPVCGQKLVGTGCSSIIDRKTREKRTYCYYRCNRALIDHICTYRHRVSQNLVEKYLLENLEREYEKYKVRSNQIGEELKKQKKAKDPEKLRKEMERLNLLFQKGRISFDYYDKEYQRLEREYSASAAFCEEEETRNLHYVEELLKTDFRQMYDSLSPENRRSFWRSTIQEIYLNDDNTIKAVDFL

SEQ ID NO: 25091 - protein, 555 aa, synthetic construct
MTKQPDKITALYCRLSRDDEQDGLSGSIKNQQAILEKYAQENGFRNTRVFIDDGWSGTNFARPAFTEIMELAEKGLIGTLIVKDHSRLGRNRLIVGQLLEEGFDSLGVRYIAIMDNIDTAKGISDLVPMQDLFNEWHAKNTSQKVRNVFKSKGMSGAPLTTNPPYGYLKDPESKNGWIIDETAAKTVRQIFSWCVDGLGPTQIAKRLKAGKVPTPTEHWGNIGRNCSKPPAVPYNWCSATVADILGKQEYCGDTVNFRSTTKSFKNKKKIERPPEEWQIFKDTHPAIIDRETFALVQELRKHRRRPTKSGIVSPFSGLLYCADCGEKLYYSVTGSYKREQAYFFCSSYRKNSEVCSAHYIREKVVEQIVLESMQRILLNVQAFEKEFARKQMDCYTEDKKKQLAAKRRELSKAKKRIAEINTLIQKIYEDNASGKLSDERYATLSLSYEEEQKTLKNAVPEMQAYLEAETDKTESLQRFIQKVKQVTELKALTPELIHEFVDKIVVYAPRYLDGKRVQLLDIYYSGVSILHELTPEEMEEAFQHHLAERRKEKTA

SEQ ID NO: 25092 - protein, 502 aa, synthetic construct
MAQKKAAPLIPAVIYARYSSSGQREESIEGQLRECHDFARRNGLTVVGEYVDKALTGRSDKRPDFQRMLRDCERGVFQAVICWKMDRFARNRYDSAMYKYKLKKHGVRIFYAKESIPEGPEGIILESVMEGYAEYYSENLSQNVKRGYYDSALELKTLGQTVLGLRKGADGRFELDPATAPIVRRIFEEYAAGDSAKEIYHRLNDEGYRTSRGGLFNKNSLRRILQNEKYVGVYEFKDIRVENAIPAIVNRELFDKVQAMVEKHHRAPAAQRETSFLLTAKLFCGHCGEPMTGDGGTSRTGRVYYYYTCNGRRAHKCKKERAPKAWIEQLVVDELVALIHSDEFVNEVADKCMEYQQREKDDSALRALEARQKENEKAIQNMLAAIEAGIITPSTKSRLMELEAERGQIEKGIAQQLIAEPTLERDQVVYFLERFRDGDVSDEGYRAFLVDTFLNSVYLYDDDKLVLVLNYTGERCKVTLDLVESAVEGDGLSGSCFAPSSA

SEQ ID NO: 25093 - protein, 520 aa, synthetic construct
MIKTDKPSVKAVIYARYSSDRQREESIEGQLRVCEDYARRNNITIVHTYADRAMTGRSDQRPEFQMMIRDAATMSFDIVLVYKLNRFARNRYDSARYKHKLKQYGVRVVSAMENIADDPSGILLESLIEGMAEYYSAELAENVTRGMTENALEGKWAGGIVPLGYKLDEKHHLVIDEPKAAIVRQIYHLALEGHNQKYIIDELNKHHYTNSAGRPFSYNTLRVILKNERYTGTFIWRDIRKENAIPVIIDKMTFEAVQKHMQFRKKNHIRSCSEDFHLTGKLFCGRCSSKMVGVSGTSKQGVLYYYYACTSHLKKKCPSKNIRQDALENLVCEVTTQILSKPEAIKAIAKQAMKMQKDKKESLEIQSLQNQIADINKKLKNCIQAVENGLISETMTNHIKNYENRLQGLKDEVSRQKLLEGSIQLTEQHIEFFFYSISRKLKTADKYKSILLSSLVRCVIVHENYIEIQFNYKNELPILQNPVKVESSYLNQMVTIPIEHTNMCLFMYSDYFSVRIRRTA

SEQ ID NO: 25094 - protein, 557 aa, synthetic construct
MKNKKAYVYTRVSTSMQIDGYSLDAQEERIKQYAKAYGIEIIETYKDAGKSGTSISGRNEFIAMLNDIEAEKDKVDYVMVFKLSRFGRNAADVLQSLQVMENHNVNLICVDDSLDSSKDSGKLVITILSAVAEMERENILSQTMEGRKQKAREGKWNGGFAPIGYSLDNGELVVNEDEAKAVRMIFDLYANSDMGANGVSKYLVSLGINKPIRQNGKNPYFSASLIRQILDNPVYNGKIAYGRRKTIKDKTTGKIKLEKSDHYIIAQGNHEALIDDELWNTVQEKRKSQAKKYEKINRGKDERVHILSNLIKCPYCGAGLYGNKSRKRNKNKEGEHYKDYYYYGCKHRQMMNGHKCTFNKQIRAELIEKEVETIITQVVSNPTFAKKIEEKINIQIDTKEIDEVINKHLAKIRQLTGTKASLINQIDSLNFEDKHYDRKYTDLNLRLDAIYDQLEYAEMQLNDSRKRKEAILEEKITSDNIYKILVNFNSLYTVLSDIDKKRLLNEMIEEIQIYDEKTEKDTWIKSVVFKLPLIDNEIDFGLDNKDNVESVALIQKM

SEQ ID NO: 25095 - protein, 523 aa, synthetic construct
MRFFSYGRKSVFSDKSDSIDNQFRMNREYCESKFSGQVDSWQQFSDEDFTGANTSRPDLQRMLSFIKGGFCDVLVVYQLDRLSRDVRDFANIYALLEEHGVMFISIKENIDTTTPIGRAMMYVTVVFAQMERETIAARVTDNMLGLAKKGYWTGGNPPVGYVRKHIVVNGKKHCSIEVDPDGARYVTQIFDTFLAYNCSLQGMETRFKNQGIRTQSGKFFSTTQLHKMLTMPYCVEATPEVYDFYAAKGCIMDPGSPREMWDGSVGVIIYGRSTEKNKKHQAQPPEKWTVCLGKHKPFMPAEKWLAVQSRFTQNKCIKDAKWPVPLLKGVLRCKCGNLMQVSRKKKVDGTCSSWYYCRKRMRQGVDACDMGQIKCDLLDDEVLELFRGIAADPGLIQKFVKAEAPADVPDLRAAQARVSACERKIGRLAASLALAEDSAASKYIIAEMERLDVELGALKREASLAEMESHRAAASAKDAKATAVEIAKLIHGLEGFDDKEKNAIARAVIQECTWDGERLFITL

SEQ ID NO: 25096 - protein, 520 aa, synthetic construct
MKRITKIAENASLGKKKIRVAAYCRVSTASEEQLVSLAAQKAHYENYIKSNDEWEFAGLYYDEGISGTKKEKRDGLLSMVAACERGTIDMIITKSISRFARNTTDCLELVRKLLDLNIYIYFEKENLNTGSMESELMLSILSGLAESESVSISENEKWGIKRRFQNGTFIISYPPYGYANVDGEMVIVPEQAEIVKQIFADTLAGKSTHAIADELNKRGVATKRGGHWTPGTVNGIIGNEKYTGDVLFQKTYTDSNFNRHQNQGEADQYLMQDHHEAIITREEYELANAVLKQRGREKGNGHDTGRYQNRYGFSGRIYCGECGSKYKRRLHYKPSGQYAAWTCVTHLADKERCSQKYITDDALKLAFVTMMNKLVFGQQMVLRSLLQSLRGLNDQSRLLKIEELETAIEKNRDQKQVLTNLMASGYLEPALFNKESNALAAEAEILRQEKERLMRSVNGDMVKVEELQRLLRFTSKGTMLTEFDDETFLSFVERIIVLSRKEVTFELKCGLSLRERLVEP

SEQ ID NO: 25097 - protein, 498 aa, synthetic construct
MRYGEYLRKSRMDDPHEPLEETLRRHREILKKFAVEHNIPIAEKDIYEEVVSGDSLYARPQMLRLLEDVAAGKFDGILCMDIQRLGRGSMSDQGIILEAFKSSGTKIITPVKTYDLNDESDETYTEFEAFMGRQELKMIKRRLRRGLKKTIEDGGYVANAPYGYDKAKIGKRPTLKINEEEANFVRLMFDLYANKNMGCQQIADVINGMGAKPHRAAQFGRTAIRQILTSPVYLGKIVWDRVTYIHPGMQGSTKHGKIYNPKESWTVVDGLHPAMIDEDTFYRVQEIFANRYHSPSFKGYVENPLAGLVICSNCGAAMQRQMCKGGPILLCQKRGCIVSSRLALVEQEVLRRLREEIGNLSAMQAVPVDEDDHAEEVLKSIEREIRTAKQQDSRLHDLLEQGVYDADTFLARHQILLDRIEKLKDSKLPFLQPKKQLNIPAMQMRIQDVLDHYPNASGAAKNEMLKSVIEHIDYRKRKGAKPAEFELDIYFLPLYVAT

SEQ ID NO: 25098 - protein, 570 aa, synthetic construct
MKNKIVRILLRVSSNQQLDADGDLSIQRKIVLEYIEKYPEWILDDKEYFEGSQSGFSTPVSDRGILQEILEDAEKGEFDILVIYKDDRLGRRMWEIGMYVMSLKTLGVDIYTVKDGSISPRSDDVMGQMMLAMRYASAQKSSADTAMRVKDTAKKLVQQGRYLGGKAPYGYVFQLTDELSKHKRRLSKLVISPERAEVVKKIFEMSLYQEFGSTRIAKELNKDERYRKMSPGYPDRYWMGGTINSILTNPIYAGYSAYNRRESVKGADGKVHNRRLDSKDWVISEKQNLDITIIDPDMWNKVQESRRKRGDKYTKKLEHKDVAVISRNDGSLALIDVLHCGYCGRKMTNGSKYNYWKIKGTGEKRASKIPTYKCQNAWQGVPHDKQKQIRADKIEPIIFEALAKYIEKLQENEDIFEQITSNQSVEKRKKEEELKKLKKNLEKIQQHLHIMKGHIPDAMTGDYPLSLDELVECMNEEKAKEAEQLEEIRGKEAEIAGLAVSAKEWDDIQSKIPTWRDIFLNADTASKRVLVDKIVERIDIWRDEVKIRFKFNLDSFLDQSRMSIDFGVQK

SEQ ID NO: 25099 - protein, 521 aa, synthetic construct
MPYCMYLRKSRKDFEAESAGQGETLARHKAALLETAQRLHLAVSEIYQEIVSGDSIAARPEMQRLLADVETGKWDGVLVMEVERLARGDTMDQGQVQRTFVYTGTKIITPTRTYDPSDPADAEYFEFGLFMSRREYQTINRRLLAGRERAVREGKWPQGHAPYGYKTVKVPKGKGYMLEVVPEEAEIVKSIFNWYVNGAEYNGAFLRVGARRISTMLNSMGLTTQAGNLWSAPAVRVILKNHAYIGKVTWYKQTLRKSMSNGAVVKKLERTPERTLICDGLHEAIISEELFEAAQARLSADSTGPATKGPLQSPLAGLLYCGLCGCVMARQHEKGKPSYYVCRNPLCRCRGSKLEVVEQRVVATLARWLAGYEITAKAQAQTVDIGALQSALDGAQRELLAYQQQQTRLYDLLERGIYTEQVFLQRQAAITGEVQRLQTAVADTEAAIAKAVRINASARDIVPAVHAVLDAYPAYTTAQEKNDALRMVLSRVEYTRTVGGFGSDPQDFEVKIFPRLPEPVE

SEQ ID NO: 25100 - protein, 544 aa, synthetic construct
MRVSVNLNAQKPDTTTNAVIYARYSSHGQTEQSIEGQLAKGHEYAAAQGYTVVHEYIDRAMTGRNDNREAFQKMLSDTGKHQFQVVIVWKVDRFGRNREEIAFNKHTCKKNGVRVEYVAESLPNSPEAVILESVLEGMAEYYSIQLSQNIRRGQLESAKKCQCVGGSVPLGYTLDSDKHFVIDPQTAPVVKKIFDLYAEGATISEITGQLNEQGIRTARKQLFTKNSLTKLLKNEKYIGIYAYKDVVRVEGGVPAIVDKSTFDRVQELLKINRRAPSHTWTKVEYLLTDKLFCGHCGSPMVGESGFSHTGAKYSYYGCIKRRREKACDKKPVRQDWIEALVLDETVKLLHDDELMEYIIDRTWEYYQITDKVQEEKAVLEAQLAEVDKAINNLVRAIEAGIFNAATKSRMDELDAQKAALTASLADLELTSGIRITRDHIEYFLLRLRDLDVKDRECQKRLVQTFVNAVFVYDDGRVKITYNYSGQSSTITLNQIASAEKGKGFVCCLPCSTFSPRFPRGVAALFLFWGKNGCESATNFSCIVL

SEQ ID NO: 25101 - protein, 577 aa, synthetic construct
MALPKKTIPQIEQKRAAIYVRVSTQYQVDRASLPVQRSELVNYAKYALDIPDFVIFEDAGYSAKNTDRPDYQQMMARIRTGEFSHLLVWKIDRISRNLLDFAAMYSELKQLGVVFVSKNEQFDTSSAMGEAMLKIILVFAELERNMTAERVSAVFLSRANDGIWNGGKVPFGYAYDKQTKTFSILEDEAKTVRLIYALYESSKSLVAVSKALNERGIKTRNGSEWSPTTVHTMLSNPFYSGTYRYNYRNESDPHHHVPKKKEDWILVKNHHPAIVSPEHQAAVELILASKSYGKNQTYQRKNIHAFAGLLTCGYCGSTMAATIDRARADGWRPSVYICSRRRMSNDCQNKYVSDVTLGPFVLNFFANLIKASNSFGKSTSIETLEKKLLRGDALSIVDHIERPGLEELYNHLRSGFDEKPFDSLAVNAAEASSDVQERDLLLADKRRLERALKRLNAIYLYGDEEIPGKDFILDRKSITDSLQQIDDRLKELDAAAVFDVSLSDDEFMEKASQFILTQQLLDKRSVNYEKFIRKIDPRIVKDFLNETVSNFCIKDGLTTSVLFKNGIELRFCYKAQQ

SEQ ID NO: 25102 - protein, 526 aa, synthetic construct
MQLKKITTIPATISKFAQTPINKVCKRKVAGYARVSTDSEEQQTSYEAQVDYYTNYIKSRDDWEFVEVYTDEGITATNTKKRDGFKRMVNDALSGKIDLIVTKSVSRFARNTVDSLSTIRKLKEHGTEVYFEKENIWTFDSKGELLITIMSSLAQEESRSISENCTWGQRKRFADGKVTVPFEHFLGYDRGEDGNLVVNKEQAVIVKKIYRMFLQGYSASGIAKELTADGILTPGGKKKWSSRTVLSILSNEKYKGDALLQKSFTVDFLTKEKKKNEGEIPQYYVTGNHEAIIPSSTFERVQKLLEKRKGGKNRISSVSIYSSKIKCADCGSWYGSKTWHSTNKYRTRIWQCNHKFENHCTTRHLKEDEIQTLFLQAANKLLKNKKEIVATHQEITRIIFDTSALEKEQETLEEELNIIVDKVNNCINENARKLQDQDEYEKKYTRLVDKFNAIEARLQEVKTSITQKQARSYEVEYFIETLKKQDILAEFDKSVWISMVDYLTVYNDGKIEFAFMDGSKSEVKVK

SEQ ID NO: 25103 - protein, 558 aa, synthetic construct
MKKIEKIEAKRPAILERKKVCAYARVSTETDRLKHSLSAQISYYSKLIQNNPEWEFKGVYSDYGITGTSTYKRLGFMEMLEECEKGNIDLILTKSIKRFARNTVDLLKIVRRLKSKGIAVKFENENINSLSSDGELMLSILASFAQEESRSISENVKWGARKRFEQGVPNGKFNIYGYRWENDHLVVIEEEAKIVRRIYDEYLSGKSRFQIGKQFSEEGIRTRKGNKWVDSNIKIILTNIHYTGNLLFQKEYVADPISGKARKNRGELPRYFVENTHEAIIPMETFKQVEAEMNRRREAEAIGNPAIATTEMTGKIRCAHCGRIFHKCIRKTISRGSVFWQCSTRKAAQGNPCHTGDLNDIALKELIRKVLGIDEYDPDAFAQRVDHIDVIRKEKLIVHFTDGNAVETLYPKLTRKECFTDEIRANLSKQRRDKHCYHRKNASTPFTGIIECAKCANSFSSLKKVLETGEKVTYLSCRTNRSKCPRNTIQDVTLKALVCEVLKLDEFDEKTMDEQIERIFIADNKVRFKFQDGHTLIKEYVEKKRKSTWGKKTKDYLE

SEQ ID NO: 25104 - protein, 503 aa, synthetic construct
MLRAALYARFSSENQREESILAQFRDSTEYCKKHNYAIVAKYADEAKSGTTTIGREQYKLMLKDAQKGKFDVVVFHKIDRNARNELDYYITKHKLEEAGVKYAYSRQDIDSTSPEGQMMESMLVGMAAYYSRNLSNEIKKGLRENAIQGKCTGGRPPYGFSVDADKKLIINEDEAPAVRMIFDLYAAGVHYGVIRKRLFNAGYRNRAGKEFTLASIYEILRNRKYVGDLYLGKTLFRKGKRNTHQVSDNVQYFENVIPAIVSREIFEEVQVKLDQNKRRSGAGNAKAIYALSGLIHCGQCGSAMVAHSTKNSRGIKNYYYRCPKGRLLGDEKCPQKFINRDDIEETVYQLIRKLFTAPDAHDQIKRIIAKNNMGVKVPDYTDQVKRLKKQESDASKRLDKLYDLYMTDREDEFTSSKMAQIKEEILRLRTQIKEAEDRQAIAQSTTFDIDKIIDTFQKQLKQKQSPEFIKTLFELAVKNVTVYPDKIKVVLLVTQERFELPTP

SEQ ID NO: 25105 - protein, 515 aa, synthetic construct
MAEVQVIPPKAARPDTLRVAAYCRVSSDSADQLHSYAAQIRAYTQAINAHDGWDLVDIYADEGLTGMRMDKREDFNRLMADCRKGKIDKIVVKSISRFARNTRDCLATLRELSSLGVTVKFEKENIDTGTLTSELMVSVSASLAQEESISISKNQRMSYQRRMERGEFITCSAPFGYQIVDGKNLAIVEDQAEIVKWIFAAYLKGYSSEWIARELSKNGPPPLHGGQKWHQQTIRKILTNEKYIGDALCQKTYTTNTFPYRRKDNHGEADQYYVEHTHPAIISYEDFQKVQELLKRRAERQSIPHDQTPLARKIICGQCGTLYMRRISKAGYVSWVCRKHDRKAADCPNGRISEDSIHAAFLRMYRKLRTHDGIVLSPVLRQMETLSDALHRGNPAMLAVNTAIATASEQSYHLTKLHTAGLLDKAALSAKQAELNAKLTELRRERRKLLCNEDIDEQVDAIRLTIDTIRNGPETLSSFDEILFTKLVERIVVDTQSTIRFQLYGGFESQETLEA

SEQ ID NO: 25106 - protein, 545 aa, synthetic construct
MEQSSLERTVHRIPASRSNVGGNKTRLHGRQRVAAYCRVSTDSEEQINSYTAQKAYYTQKIEESPDWELAGIFADEGITGTSMKKRKEFNRMITACKRGGIDLILTKSLSRFARNTVDCLETVRMLKARGIGVIFEKENINTLTESSEFLITLFSGFAQAESESLSSNIQLGIRMAMKEGKVNFHYRSMLGYQRGADGKPEIVPEEAEVVRRIYRRYLDGCSEGQIQRELTQAGIATAKGVKAWSHQIVHNILTNEKYAGDALLQKTFTTDCISKKVKKNTGELPQYYIKDNHPAIIPRDIYQRVQEEMARRTSKRKILQKSGKTEQGKYSAKYALSERLVCGECGSPYKRCTWARNGVKRIVWRCVSRLEFGKKYCHESPSVEEYKLHAAILTTLNRVVEASNGLQDELAETLRMVCTPEGDGNNLMELERNMEALTTRQNTLLDQVLAHMDDLTLTEQLKALLEEKQHLQTRIDAAKKEAANRINEDSRMAELAAYLEEHLSGFQQYDDGIVRQLVERITVVDAETIRIKFRYSDVESEQAMC

SEQ ID NO: 25107 - protein, 455 aa, synthetic construct
MDMVRAALYIRVSTEEQVREGYSVDAQKENLIRYAKFKGYTVVGIYADEGITARKKYTNRKEFMRLLDDVEAGKIDIILFIKLDRWFRNVGDYYKVQEILERNNVGWTATTENYDTTTANGRLYVNIRLAVAQDESDRTSERIKFVFDKKVKDGEAIWGKPPFGYKIKNKILVKDEEVEDFINECFENYKVLRSINAVAKTMNQKHNKKISYTTYSRFLRKNLDFYKGKYKDNENYFPPYLSEEDYEEILAINKARSGRFGGKTYNYIFVGLLACACCGYNMGSAGYTTNKRTNQKYRYYKCGRSTVKVCENNLRIQEKKIENYLLENIEDEIRKYKVVYEIEKSEPISRPVAAKNNIKNKINRLRKLYLEEVIELEDYKKEYEVLQKQLDQVEEEIKTHKRFQKKDFSTLDKLLQSDFEEMYNNLDNLQKRALWQSVISKIYVKGSEIVKIEFK

SEQ ID NO: 25108 - protein, 517 aa, synthetic construct
MSYCIYLRKSRKDLEAEQAGQGETLARHEHTLLSLARQRNLIIGNIYREIVSGESIAARPVMQKLLKEVESGIWDGVLVMEIERLARGDTIDQGTVQRAFQYSNTYIITPQKTYDPSNEFDEEYFEFGLFMSRREYKTIKRRMQAGRYAAAKEGKWPFNAAPYGYKRVKLQNEKGWTLAFDDSEAPVCRMIFSMFTGSDRQGITIIRRYLNQHGIKPRNGDLWTDSSIRCILSNPAYDGKVAIGRRKVVPTIENGLPTKTRPRSNDYAVYEGRHPALISHAIYAEAQSYLGHGTPKLPESYGVKNPLAGLIICKECGKRMQRRPATNPWVKNGAKYDMLICHTDSCPTVGSPLDLVERELIHALEDWVSGYELQETLPESRVPELEQMLENAKQEHDTLEKQKSRLYDLLEQGVYDSETFLQRSRALQDRLEESLAGVTRLEQELESERKIQANITNFLPACRDLLSCYWSLDISDRNKALKILIDSVEYRKTSRNKKGEAGKASFELTIKPRIPRI

SEQ ID NO: 25109 - protein, 523 aa, synthetic construct
MAERSVTILPPRLNRKAQEIKAEEKAKLRVAAYCRVSTDSDEQATSYEAQIEHYTLFIQNNPEWKLAGIFADDGISGTNTKKRDEFNRMIEECKAGNIDMIITKSISRFARNTIDCLKYIRQLKALNISVFFEKENINTMDSKGEVLLTIMASLAQQESESLSQNVKMGIQFRYQQGIVQVNHNRFLGYTKDADKNLVIVPEEAEIVKRIYREYLEGANYKEISAGLEADGILTAAGNPKWHSSTLKKILTNEKYMGDALLQKTYTVDCLTKKRVANDGTVPQYYVNNDHEAIIPREFFARVQEEMKRRANIRQGMDGKRRVYSSKYALSSIVFCGHCGDMYRRTHWNNHGKKQIVWRCVTRLNAPGVECPARTLSEIQLQNLVLEAINKVLGGKQRAIKVLETNISEVVGNTHSEELERIKQQIEKQQTLLVKMTAASEDYSKVVDKIYALQREQEEAMAANVNYKAGKERIQEMIEYLKSQPKRVTVYDEQLVRKLIEKITVYDDHLDFLFKSGIQIEMKG

SEQ ID NO: 25110 - protein, 450 aa, synthetic construct
MDIIRAALYIRVSTEEQVREGYSVEAQRDNLKRYAKNKGYSVVGVYADEGITARKKYTNRKEFMRLLDDVEAGKIDIILFIKLDRWFRNVGDYYKVQEILERNNVGWTATTENYDTTTANGRLYVNIRLAVAQDESDRTSERIKFVFEKKVADGEAIWSLAPFGYKVENKKVVIDEDLYPIVVDTFEAFIKLRSVNSVCVYINEKYGTHYSYNIFKRILRDNTDFYYGTYRNNTSYCPPYLSKTQYEIIKEISDSTTTIRSSGKKYDYIFSGLLECGYCGRRLVGGGSTRKDNGKAYYGYRCTGYRGGTCSNRISELKVESLLFAALEDEVKKYKVDYEIKQKKKKPAYINKSSIEKKIARLRNLYLNEVIEIDDYTVEYRKLQDKLREYEESINKVEDNKDFTALDNLLKSDFKEIYNNLSNIDKRTLWHSVIKRIIIKDKQIQEIIFK

SEQ ID NO: 25111 - protein, 558 aa, synthetic construct
MLQTDKITALYCRLSQEDMQAGESESIQNQKLILQKYADEHHFFNTRFFVDDGFSGVSFEREGLQAMLHEVEAGNVATVITKDLSRLGRNYLKTGELIEIVFPEYEVRYIAINDGVDTAREDNEFTPLRNWFNEFYARDTSKKIRAVKQAKAQKGERVNGQVPYGYIADPNDRNHLLPDPETAHIVKQIFAMYVRGDRICEIQNWLREHEVLTVAELQYRRTGSHRHPRPHPNCIYNWPDKTLYDILARKEYLGHTITGKSYKVSYKSKKTKKNPEEKQYFFPNTHEPLIDEETFDLAQKRIATKHRPTKTEEIDIFSGLLFCGDCGYKMYLQQGAGTLERKHAYTCGKYRNRIRTGELCTTHYIRKSVLKELVLADLQRVLSYVKEHEQEFIETANECSAKAVQKTLTQQRKELDKAQSRISELNILFRKLYEDNALGKLSDEQFAFLTSGYDEEKKTLTRRIAELTQEIDNATERSADVKRFVALVRRYTTITELTYENVHEFIDRILIHELDKETNTRKIEIFYSFVGRVDTGDKPTESISYFRQIGADVKSYAI

SEQ ID NO: 25112 - protein, 549 aa, synthetic construct
MYYKEYPKIYYYETKEYGRKSRMDDPLLTVAETLQRHSEIIDEYAQKYLGGSIPEENKYMEVGSGESIADRPEITRLLKDIEDPAVKAIVVVDVQRLSRGDLEDAGKLIRLLRYTNTLVITPMKTYDLRDEYDRDAFERELKRGNEYLEYFKKIQARGRLASVKAGNYVGSVAPYGFDRIEKYDEVAKKNYFTLIERKDQADIVRMIFNWYCNDDIGVTAICRRLEDIGAKTKTGCATWKPSIIFGILENVHYIGCVRWNWRKTVKIIENQEIKKLRPKAKVDEYLIFEGKHDGIVSEEVFNRARIIKGTRHRTKRNLSLKNPFSGLMYCKTCGSKIGYNTFKRNGVEYAPPKLVCNNQVHCKTGSVDYNEVLDYMCKVLKDCIEDFKVRIENDQDDSVKLHKDLIERLTKQLKETEQKEQDQWEAQYDPDPNKRLPQHIFEKLNKKVLAEKEEINRALEKAKGSAPKHIDYREELVKTTDALKALKDSDLDAKIANQYLKAIIDRIEYHRPEIVRINKKNAEIFETDVRKGLQYHVAPYTIRVKLKCE

SEQ ID NO: 25113 - protein, 537 aa, synthetic construct
MSDTNKITALYCRLSHEDELAGESNSISNQKDILQKYADEHGFYNTAFYIDDGYTGVDFERPAFKRMIDDVDNGRIGTIITKDLSRLGRNHLHVGLYTEEYFPRRNVRYIAINNNIDSDNPDSSAVDMAAFYNIFNEFHVKDTSRKIKASCVIKSERGQRVASRPPYGYMKSQEDHNKILPNPETALVVKYIFQLCADGLGPAQIAHRLEKEQIYTPAMYEYSQTGNVISNFDTSYPYRWNPTAVANILEDVSYLGHTCNFRFGRASYKDHRKLKLPKSEHKLIENTHEPIIDINIWEIVQRLRQSKRRFTRSGEKSIFAGIVFCADCKQKLYFHRHAREKSENWKFICSSYRKNSREQCTMHGIKESHLKEIVLHEIRNVTAFARERTDDFAEYISRESNTAAKKELSEANKKLKKSEKRLAEVGIIFRKLYEDHVLGTIDDDQFRMLSQGYTDEQNQLKAEISDLKHTMQELQSQTANTARFAALAKKYTDITELTQEILHTFVSRIEVHEKLKDDNGSITQEIDIYFTHIGIVK

SEQ ID NO: 25114 - protein, 464 aa, synthetic construct
MARSVTVIPARSQKAQTGHKAVQEKKIRVAAYCRVSTDQEDQLHSFEAQVEYYTKYINEHENYEMAGIYADEGISGTNTKKREQFKKMIADCEGGKIDLVITKSISRFARNTQDCLAYSRKLKNLGIGIIFEKENINTLDSTGELLFTILSSLAQDESRNISENCKWGIRTKFKNGEMHLNTFKFLGYDKDENGKLVINKEQAKTVRRIYRDFLIGINPAQIAKELTEEKVPGCLGQTKWYPSTVTGILKQEKHMGDALLQKTYTADFLTKRQVRNNGEIAQVYVKDSHKGIIDKQTWNAVQEEFDRREKFMESHGTDRYSYGADCMPFCEKVFCGECKSLFTRHSWSSRGIVQWQCKNHRKDGKVACTNAYVDNADLEKGFVKAFNRLVTDRDEHMERWQQMKSDGTPLEKIRAGQMMEAVENEPLTRFVPEIAQLVLCEVTVLGAKKYEFFFLEGSRVKVSV

SEQ ID NO: 25115 - protein, 494 aa, synthetic construct
MRVVGYARVSTREQADHGYSIGEQNSRLRAYCQAKDWTLLRVIEDPGFSGAKMQRPGLQQVLEMVRRRECDAVLVWKLDRLSRSQKDTLYLLEDVFLANGCGFVSMLENFDTSTAFGRAMVGILSVFAQLEREQFKERSAIGRVGRAKAGLFHGGGYAPIGYDYYTKEDGGQGLVVNEYEAMQVREVYRLYLAGWAVHKIQVYMHERYTTKNGCWASDTTVRSVLSSPIYLGRITWAGKTYEGQHEALISQNDFDQVAARRESLKWQPAEPRAACDLIKNSPFRSTHILGGITWCARCGARYFASGNYSGRGENRKYWPYYTCYSVAKSSKKMIKDPNCKNKRWAVGKLDAIILAEISRLEFDPAALAKAAGPVDVSGVEEKRRVLEARVAEVRPQMERLLDLCQTGGLPVASVSGRLAALQKELDALNGELSGLAVPETVDRLAVAQEMLAGASAVIKNGTPEQKRALVHSLIGRIDIDGEDITIHWLFAPEN

SEQ ID NO: 25116 - protein, 543 aa, synthetic construct
MAKRNNDFDPNEKCKQAIIFARVSSKRQKDEGVSLDVQKKTIRQYCQNNNFKILDTISIDESSTQGNRKKFHKMLELAEECSGKVAIVVNYVDRLQRTYTDTPELERLRSSGKIEIHALRENLIITKDSPAMDLTVWYMHVLMANFQVNTMIDKVRASQKENWAEGKWQGLAPIGYLNAKDEDRKATLIIDEERAKIIQRLFEEYATGLHSLASILKFAQELGFKSKEKNYHKTSPNFNKRALVSRNTIHNILRNPFYYGMMKVKGKEMPHRYDTIISKALFDKVQEILNQKNCTGSNHEQQYKALPFTFRGIIKCSTCGCTISPEHHKISTGEYCIYYKCSHIRGNCSQVIVRETQLLEQLDEEIFSKLNVPHALLQLIKQNVQNNLEENSKINRHVKRRLLDELKILENKEDNLTDLYCQNKIREDIYNRQIVGIANERTRITETIEKYKDIGKDIKESIDKVLDVAGSISHIMKTADPKTKNKMLKLLISDCKLSGDKLVYTINKPFDKFISASSPKLWTTITMNNLEEFGEGWHERELI

SEQ ID NO: 25117 - protein, 464 aa, synthetic construct
MARSVTVIPARSQKVQTGHKAVQEKKIRVAAYCRVSTDQEDQLHSFEAQVEYYTKYINEHENYEMAGIYADEGISGTNTKKREQFKKMIADCAGGKIDLVITKSISRFARNTQDCLAYSRKLKNLGIGIIFEKENINTLDSTGELLFTILSSLAQDESRNISENCKWGIRTKFKNGEMHLNTFKFLGYDKDENGKLVINKEQAKTVRRIYRDFLIGINPAQIAKELTEEKVPGCLGQTKWYPSTVTGILKQEKHMGDALLQKTYTADFLTKRQVRNNGEIAQVYVKDSHKGIIDKQTWNAVQEEFDRREKFMESHGTDRYSYGADCMPFCEKVFCGECKSLFTRHSWRSRGIVQWQCKNHRKDGKVACTNAYVDNADLEKGFVKAFNRLVTDRDKNMERWQQMKSDGTPLEKIRAGQMMEAVGNEPLTRFVPEIAQLVLCEVTVLGAKKYEFFFLEGSRVKVSV

SEQ ID NO: 25118 - protein, 578 aa, synthetic construct
MQRAVIYARYSPGPNQTEQSIEGQVRECTKYAELHDLRIVGTYVDRKISGKTDNRREFQRMIDDSEKHIFDVIILYHTDRFARNRYDSAIYKHKLKENGVELRYATTDIPKGPEGIILESIMEGWAEYYSAELSRKIKRGMRESALKCHSTGAGRCLGYRTAEDKSLVIEPEGAKAVQTVFDMYIKGKSHADICRYLNDCGFRTAQGKLFNKNSVTHIIRNKRYIGVYTYDDITIEDGIPAIISKDTFHLAQLEAARRKTAKRPKEPKAEYLLSGKAFCGHCQKPLVGVSGTGKSGNKWYYYYCQESRAKRGCTKRPVKRDWLEREVVERTVAEILQPEVIQHIAKKCYDLQMEYRQDNSDVLFYELKLKDVRKAIKNTMHAIESGVKTKTLPARLRELENEEEALEAELAIAKASDFVITTDQIEFLLTQFAEPWECESEEEYHRRIIKCFVHKVFLFDDKLLIYYNVSRDWKTREQSEAELLEEALGEGFDKRSSGSTNKKGRSVPRLLIRKHKKVSKINVFKGREHGTKSKNLILTGTKGADFHISALFLSPRHRQPPYGVFSYPYLCPPEKCIN

SEQ ID NO: 25119 - protein, 497 aa, synthetic construct
MQIKVIEPKQRIKAKIRVCAYCRVSTEADEQENSLTNQKEYYENLIRSNPSYEYVDVYYDFGISGFKESRPGFQKMMEDARAGKIDLILTKSISRMARNTVTMLKAVRELQSMGVGIFFELQNMNTLSGEGELMLSIYSAFAQAESDDSSKNAYMTFQRKFKEGVPAVQFDRCFGFRLDREGNPAIDEREAFVVRKIFKLAHEGIAPTRIATHLNEMGIRTKTGKRWDATGVFRTLRNEKYKGDVMMQKTYLDADRVRHKNTGEKDRYYIADNHPALVDADVWNEVQEILDDKSLACKEKKEPKKMGGNSHNTYPLSRMLYCPKCGATLHHKVSNGGRQIYWGCSTTIKKGRDKCSGIFVPEEVANEWQISEPSTVFVKEDQFGRKSYSFMKKTDYEKQKNCPYKPKVRTTRDSHSTYPLSGRLYCPKCGSVMHHQWAWNGKEFWWCSKRVKDGESACEGVRVPAEIADAWEFDGCVYVLKGENENGKISYSYQSKS

SEQ ID NO: 25120 - protein, 464 aa, synthetic construct
MGKSVTVIKASPKTVSKSKSGVKKLRVAAYCRVSTDQEEQLNSFENQVSYYTAYINGKPEYEMAGIYADEGISGTSTRKRTDFNRMISDCERGKIDLIIVKSISRFARNTQDCLSYSRKLKNMGIGVFFEKENINTMDGAGELLFTILSSLAQEESRSISENCKWGIRKKFSDGKYHLNTNRFLGYDKDEEGNLIINEEQAVIVRRVYKEFMDGVNPDIITKRLNDEKIPGCMGEPRWSCSTIWGILTNEKYMGDAILQKTYTSDFLTKKTEKNTGQITQYYVENDHEPIIEKDFWNAVQMEVQRRKEFMETHNLRTMGRYTDEQPFSSRVLCGTCGTIFWRRTLTRNGKRTKVWMCSQRYRQKGVVGCSSETLKEEALHNTFIKAWNGIIENRSKYVERWKNDMRGDNPLLAFRAKQMLELTKGKPMKKIDMALVGKVLERCVVLSSEVMEIYFLDGTCVKIA

SEQ ID NO: 25121 - protein, 527 aa, synthetic construct
MARKKNIAAGLDAVIYARYSSHNQREVSIEQQIAECTKHAAALGLRIVGTYEDRAISGKTDNRPRFQQMMRDAEKGKFQAVVAWKSNRIGRNMLQAMVNEAKLDDYGVKVFYAEEDFDDTAAGRFALRNMMNVNQFYSENMAEDITRGLYDNANKCMANGRQPLGYKRGADGKVEMDEPAAAVVREIFTRVAAGDLFVDIARDLNAKGIKTSKGATWNKGSFQSICQNERYKGIYIYGNVRIVDGIPRIVSDELWYKVQEAMRMKKNPVGTRHRVGAEDYLLTGKLRCGHCGSYMTGISGTSRNGELHYYYTCQKRRTEHACSKKNVRRDIIEPAIAQAIRMYCLTDDVIEWMADRTVQYWEKHDNDLQIEALEQQLAENKKATSNMLKAIEMGIITAATRSRMVELETENSKLTAQLSAAKRDVVKINREDLIDELHILRSKDIHDREVQAELFKDFLVAAYIYDDSRLKLVFSFMGKDNSVEIPLETGEDPPDGEDSPDAKMFVLTPDCSTRTKSTAQKCVVLFY

SEQ ID NO: 25122 - protein, 520 aa, synthetic construct
MNVVIYARFSSHSQTEQSIEGQLKVCYEYAESNHYTVVGEYIDRAISGTTDNRAEFQRMISDSDKHTFEGVLVYQLDRFARNRYDSAINKAKLKKNGVRVLSAKENIANDASGILVEGVLESMAEYYSVELSQKIHRGMAINAEKCLSNGSNPGLGFKVDAERRFYVDEEEAAVVREIYERYASGETKAEIIRDLKRRRVKTSLGKEFSLNSLSHLLSNKRYIGVYLYKGKETPGGMPRILDDDLFYRVQSMMNKNKNAPARTHGEGEYLLTTKLFCGHCKEMMVGYGGTSKTGRQYHYYMCKKARKKKCDKKIIGKQYIEDRVVSECLKMLTDDKIRYIAKRVAEECNKSPDNISVREIKKAIKVVDAAIENLWKGIEQGQSVDMLTERLHKRQAEKEELETQLAIENNKKICLSEAQILAFLDYVCEMPADDVNKRRAIINIVVQSIYLYDDHFTLIINASKKPLSIDNIPLDDIEEAFEGENTETEGCSSLMTPAPPFFPRSYIWVWNFLCTVVQNA

SEQ ID NO: 25123 - protein, 520 aa, synthetic construct
MNKLRAAAYCRVSTDRAEQSGSLASQRSFFDDYIRNSDSMTLVGVFYDEGTSGTTTLNRYGFNKMISLAVSGGIDIILTKEVSRFARNTVDTLNITRMLRAKGVGIIFINDNIDTRDSDGELRLSIMATIAQEESRKISERVKWGQQRKMEQGVVFGRSCLGYDVKDGKITVNADSAEIVKRIFTEYTVLLKGAESIADGLNSEQIRTVNGGRWSGAFIRKVLRNVKYVGDLEQKKTCTPDFLTHKKRLNRSEHIYIRNHHEPIISRELWEQTQAEISRRKPTDTSRHSDRYVFSGKVYCGVCGSVMVSRVKMLKNGKIYHALRCSGRIGGKSCNNETLNVTALKACVKRIFTDIPIDKTSVINAVIKGLSRTDKPDIPALRRKIETLNAKKRRAVDLMLDGLITQQELIEQKSYYDSIIEKLSQEISSDRSVLETDKIRTNAERFLDFTSDPIWLLVIRADYIHGTLTVYLKGIENGFTTCFTATGRGDSYRVITGNTVRSQGIIPGTMQVQKNYPILK

SEQ ID NO: 25124 - protein, 562 aa, synthetic construct
MAEQIIQLAKNVLKRVVCLYRVSTVGQVEKDDIPMQKQFCREFVQRQPGWEIVKELSEKGVSGFKVSAKKRDAVQEIQRMALQGEFDILLVFMFDRLGRKDDETPFVVEWFVKNGIEVWSAMEGQQRFDNHVDKLLNYIRYWQASGESIKTSVRVKTRISQLTEEGYYTGGIVPYGYRLENRGRTNKRNKEVCDLAIDLDEAEVVKVIFQKYVYEGYGSQRISRYLAEQGFRNRKGGNIPTTSINRIIKNPLYIGILCNGESRSENVLTELQIIDVDLFERAQKMIESRAKPRTAHKEIPLNTRGQSLLVGNVYCGHCGKRLTLATSGRKYQKKDGTVVNKTYARYQCSYNIQHPGGCDGPSGYGAAKLDDLVDQIIRIQFERIKTAPPQALIREQQSREVEIAKAKLNLLNGQYQQKQRDYQDLRAETLRVIRGDSRLNVDFLNSIVDETITQLKELGQQVKEAEAELRELVSGAEQVKEEYAQLMNWAELYDKCTFEAKKMIAAQFVKAVHVKRDYEIDVEFNVAFDEFQSIYLEPEKEDEKKRGASTLLALGENVGQAV

SEQ ID NO: 25125 - protein, 503 aa, synthetic construct
MIKTAVIYARYSSDSQTEQSIDGQLRVCEEYAKQNDILVLDTYIDRAMTGTNDNRPDFQRMIRDSAKRTFGYVLVYKFDRFSRNKYETAIHKKALKDNGVKVVSATEFVPDTPEGIIFESMLEGYAEYYSAELSQKIRRGNNESRRKGNLTGGKIPYGYKNVNKKAVIVPEEADIVRYIYERYSIGVYVKDIIAELNGKGLLHKGKPFVPNTVYGILGNERYSGIYRHNGEVFDNIYPQIVPKETFDKVRAKVNANKFGKRSEHITYLLKDKIKCGYCGRSVIGDNGTAHNGERKYYYTCQGRKKKLTDCRKQSIRKDILEKIVLDSIIEQLQKANSLDFIVSGIMKEQERQAQANIVLNLLLKERRTTESAIKNIMTAIENGGTTNTVMNRLRELETKQAELERQILIEKSKTAVQLTEKQIREYYSQALALEPKLLINYLVKQVTLYDDKMEIQFNAPINISPDDESRRGFSLCSKTIKLSFKVPFRANLAKYEFEVEIYL

SEQ ID NO: 25126 - protein, 496 aa, synthetic construct
MNDRKRAVAYIRVSTKSDAQLHSFGYQESYWRDTIAASNQYDFAGIYSDFGISGRSLNRRPQLQRLIADAEQKKFDVVFTKSVARFGRNVEEIVATVRKLREYGIRIFFEKEQIDTFDPNMELYMTLAASIAENDLKIYSENMTWSIRERYKKGWISIGSQIFGYRMNKENNTLIVEPTEAETVKRIYDLYEEGLGQVAISHVLEEEKRANIYGEVKWDVGAIRYILTNEKYKGCALTQKGIHVHGIKQKNVNLAPQWYMENTHEAIITPEQFDRVQELIKERARKSKGAKPGDYVFARKIECGCCGGGYSHKFNNTNKPWRNEIWICSKQNTYGAGHCTNTRIKDEVLKKLFVECYNEFVRENGNTDELMELRDSQRKLLEQERELNALRVNRMIEISDYNAEIAKVREQITECNKQIALHEMRGARKEDLVEIKEFDDSKVEIFLEKAIVLNHTITFTFINGMSISREYTNGHGGNTAGWLDRRLDRLSKEGKQ

SEQ ID NO: 25127 - protein, 539 aa, synthetic construct
MSIPQRIVQERPVIYRPTNTASGIHKENVTYYARVSTQNDEQEDSYERQKAHFEEKIHSNPNWNYVEGYADWGISGTKAESRKEFMRMIDDCRAGKINRVLVKSISRFGRNTVDTLTYIRELRELGISVFFETQNIDTMTAGGDVLITILAAMAEQESRTMSTNIKWAFQKRFKDGRVLINFKQSLGYDKVVNVDENGHKEEEYVIVESEAEIVRMIYREYLSGKTIRQIADQLNELGIRTKRGNEWKPSSIEGMLTNYKYTGNAVLGMTYKPDVLSKSRLKNEGQSPSYHVENSHPAIITKEMFDMVQAEIQRRKNIRSTVNTGKGKYSSKYVLSGLLVCGDCGAKFRRFGRSLKSGEFIPTWVCVTHQKNPNDCKMKPIKEQDIMDAFKRAVQRFVGDFSEIVQVVRETAEEELKSQQTSNLTAIEDELVEQRKAVLELFKKKRAGEISPTEYDRKYAEYSARIIELESAADTAKSEELQKQLTQSRLESVYDLLDNIGTDYTDEGVMRTLIDCIKVEGKHDIEFQFKCGVDIHETI

SEQ ID NO: 25128 - protein, 519 aa, synthetic construct
MKKVTKIDKIQPSKVAKKKLRVAAYCRVSTDSDAQLESLETQKTHYENYINSRDDWEFAGLYFDEGITGTKADKRPKLMRLIEDCKAKKVDFVITKSISRFSRNTTDCLDIVRTLLNLNIPVYFEKENINTGSMESELFLSILSSMAEGESTSISENNKWGIKKRFENGTYKLGYVPYGYRWENGEIIVDPEQAVIVKRIFSELLAGKGTDAIAKSLNAENVPTKKGGRWTSTSIRGILANEKYTGDCIFQKTYTDSNFNRHKNDGQLDQYYVADHHEAIISHEDFDAAAALIEQRANEKGIKRGSNKYQQRYAFSGKIICSECGDTFRRRIHTSTYVKYPAWVCNTHLTDTSKCSMLYLRDDDIKLAFATMINKLIYCHKLVLKPYLESLQANTSDKALLRIQQLETLLEQNAEQRETLHKLMAQGYIDQILFTQENNALLTQANDFRSDIEALNRSVTGDTSKVYETERLIHFCERGEMLLEYSEDLFELFVDHIEVYSRQSIGFALHCGLTFKERI

SEQ ID NO: 25129 - protein, 522 aa, synthetic construct
MKRVYCLYRVSTKGQVDKDDIPMQKTSCREFAERNGWTILKEFQEKGVSGFKVSASDRDAIQDLKAAAEKKEFDVLLVFMFDRIGRIDDETPFVVEWFIKHGIEVWSVNEGEQRMDNHVDKLMNYIRFWQANGESQKTSARVKTRLNQMTLDGKFTGGVAPFGYKLIKSGEINKKGKELMDIVIDDDEAPIVKKIFEMTVKEGYGSYRMADYLNSHGIKTHNNSKFQCNTVNRILKNRLYCGYLVSGGVESPYIERLHIIDENIFDQAQFILKQRSSKNEEKQQIARTTKGSTLLSGNIYCAHCGQKMVSTSYIDRYDRADGSQYRVRRQRYICTNKAMKRGACDGQSAYVAHRIDGAVLATLRDYLAKIKSTPKDIALEKRYKSEISEYRRKQTKLEKEIEKLKRQVVELSAEIGRSLLGESRFTPDILSTSIDNTNDLLHKKEIELSDIKYKLANQQNAMDRLDFYYSQFRTWADEFDNSTMEQKKMIACQLIREVKVSRGYEIEIVFDLNYEQFLNTSK

SEQ ID NO: 25130 - protein, 558 aa, synthetic construct
MNKLRAAAYCRVSTDRAEQSGSLASQRSFFDDYIRNSDSMTLVGVFYDEGTSGTTTLNRYGFNKMISLAVSGGIDIILTKEVSRFARNTVDTLNITRMLRAKGVGIIFINDNIDTRDSDGELRLSIMATIAQEESRKISERVKWGQQRKMEQGVVFGRSCLGYDVKDGKITVNADSAEIVKRIFTEYTVLLKGAESIADGLNAEQIRTVNGGRWSGAFIRKVLRNVKYVGDLEQKKTCTPDFLTHKKRLNSSEHIYIRNHHEPIISRELWEQTQAEINRRKPTDTSRHSDRYVFSGKVYCGVCGSVMVSRVKTLKNGKIYHALRCSGRIGGKSCNNETLNVTALKACVKRIFTDIPIDKTAVINAVIKGLSRTDKPDIPALRRKIETLNAKKRRAVDLMLDGLITQQELIEQKSYYDSIIEKLSQEISSDRSVFETDKIRKNAERFLEFTGDPIWLSVRRADYVHGTLTVYLKGIEKGFTTCFTATGKGDSYRVITGNTVRSQGIIPGTMQVQKNWFHHDVNDKSIKKSAPDTFQVHFVLICRLFCFLFVAGYLAPTL

SEQ ID NO: 25131 - protein, 517 aa, synthetic construct
MPEALNAVIYARYSSDRQTEQSIEGQLRECYAFAKANDIAVIDTYIDRAISGKTDNRPAFQKMIEDSAKRQFQAVIVYRLDRFTRNRYDSAIYKARLKKNGVKVLSAMENLNGSPESIIMESLLEGMAEYYSVELSQKITRGMRENALKGKALGGQRVLGYKVNSDCYFEIDETTAPVVVDIFKLYSSGKTVKEICDILNARGVKTARGGAFNKNSLHTILTNKKYIGIYKTKYGEIVGGIPAIIDKELFEMVALRMEQNKKAPARAKAEINYLLSTKLFCGKCRSAMVGESGTSKTGKKYYYYACVKKKREKACDKSNVKKDWIEDLVIQRTVTDILKDDVIDKIADRLVELQKAEAAESGTMLYLENSLAEIQVSIKNIMTAIEKGIITESTKTRLTELEDEKRNVEIEIAKESIARRIISREQIIYWISSFKDGDITSEKYRQQLIDTFVHAVFVYDDKIVITYNYSGENNTATISDLDLSSPPKVHRNFDRITVDFFYAQKPFEIRHFGCFSA

SEQ ID NO: 25132 - protein, 515 aa, synthetic construct
MKTVEKIERKLPVLKARKRVAAYARVSMESERMQHSLSAQVSYYSALIQKNPEWEYAGVFADEGITGTNTKKREGFKSMVADALAGKIDLIITKSVSRFARNTVDSLTTIRSLKEHNVECYFEKENIWTFDGKGELLLTIMSSLAQEESRSISENCTWGQRKRFADGKVTVPFNRFLGYDMGPDHNLVVNPEQAKLVKRIYGMFLQGQSPFQIARMLTEEGIPSPGGKDHWNPSNIKSILTNEKYKGDALLQKTFTVDFLTKKKKANEGEIPQYYVKDNHEAIIDPETFEMVQTLMTTRTKGRNRKSSVSIFSSKVKCGDCGSWYGPKVWHSNDAYRKVIWQCNHKFDGQKCATPTLTEDEIKELFLRAANQVIDQKEQFIAIYDQVLSRSLDTTALESELSDLEAEINIAAELIEDCIKENAHVALDQAEYQKRYDALVARFDKAKARHTEVTDLIAERMARKHQIEAYLKNLRSREPLTEFRETDWLAMVDYIAVHSKNDIRVTFKDGTEIET

SEQ ID NO: 25133 - protein, 425 aa, synthetic construct
MPRTVEQIQFTPHMPKALRVAAYARVSCGKDAMLHSLAAQVDHYSTYIRHHPGWKYVGVYADEAKTGTKDSRENFQRMLADCRKGKINHIITKSISRFSRNTVTLLETVRELKGLGISVYFEEQSIDTATADGELMLSILASYAQEESLSASENQKWRVKRNFEEGIPWRFFMLGYRRENGKLAIVPEEAEIVRSIFDDYLAGKGVTAIAKRLNESGYATQSGCVFHKSAVERILRNYAYTGNLLLQTKFRENHLTKVTRKNQGELPRYHAADTHEAIISQETFDAIQAEILRRKRKYAPTKPQQPSPFTGLITCAICGKHYRRKTTATGPIWICATYNSYGKSYCPSKAIPEEKLMQTVALVGHTGEITAITAHNDNLLEFTLEDGTGVVKRWQDRSRAESWTAEMRKTAGEKTRERNQRHAES

SEQ ID NO: 25134 - protein, 599 aa, synthetic construct
MIDNCVRAVFYARVSTQEEQQLKALPKQIQENRDKIREKGWVLVDGYVDEGKSGTVIKRRDEYQRLLEDMGLNKFDVVVVKDQERLQRNTRDWYNFIDRLVQNKLKLYFYLDNTFYSPDNALITGIKAIMAEEYSRNLSKKMNNSNKRRIEKARAGEEVSAMGNGQTYGYSIVNGKWVVDESQRELVKKMYELYTELHSVRKVRDALNEQGYRNQRGNLFTDENIGRIVKNVMHKGWVILNRHHREFDSKETIEKLEDEWVIVKNDHEAIVSEELWDAVNDEIQSHRNKGNSGTRGKRGGTDLLSGKMVCSCCGRVLWKHASQGSYKSKEGRKYTYKRYTQWYCSGKMGRGELACTDPATISGVKLQKYLVEMADMFLDYSTVEYSKNLLKRRTISWLEDLKDKLTTPNDNGKIEQDLKALEGKRGKLIDLYTDELISKEEFKSRSVDLDAEIEKKRALLVPVEENPDIKAIEDTIANIDAEIEALFEDEAMVEEKKVQFIQEHIKKIYVSKNSDVFIVLDNVAGAFLFIDKEDTRIEVVPVAEYNPEELSEEGITENDFVPFDRESMPQHHGRKRPHPPGPPAAPRQPVRDRLRCDQP

SEQ ID NO: 25135 - protein, 481 aa, synthetic construct
MNNAVIYARFSSDKQTENSIEAQVRACEDYAEIHGYTINKIYSDEAVSAKNDRRPEFQKMIKDAEKGLFQTVLVHKYNRFARRMIDHVTYEDKLNQAGVDLIAVAEDFGNGKEAVIMKALMRSLSEYYILDLSTEVKKGHKETALKGLHNGGYAPFGYDVVGQKYVVNEMEASYVRKMFEAARRQEGFTELIREMADRGITGKRGKPIKYPQIYEILRNEKYTGVYTYSPQEEKNRGDRRTKPNAIKIENALPIIIDKAQFMEVQAVMNTRKQTGKKAGYLCSGLVYCKCGAKMHGMKSKRKGHEYQYYYCSARCGAPVVHMEEVDTAAINYLRDLLSPDNQKRIADAMRNYKAGEEDRIKDFKAILNRKIREKQNEYDTILSNISKINWAPNDLEEFQRRMHDIKAQIEVLKATEPPKDYTVEQIKAWLESLKKQPDRDAVRLLIERIDVISDGEKEKAAFNIQSTLKAVLGEIGCGGWI

SEQ ID NO: 25136 - protein, 521 aa, synthetic construct
MGNVMVIPAKRQIGNTGRKQDAKPKLRVAAYCRVSTDSDEQATSYEAQVEHYTEYIKKNPEWEFAGIYADDGISGTNTKNREEFNRMIEDCEAGTIDMIITKSISRFARNTLDCLKYIRQLKEKNIPVFFEKEAINTMDAKGEVLLTIMASLAQQESQSLSQNVKLGLQFRYQNGQVQVNHNRFLGYTKDEEGNLVIDPEQAEVVKRIYREYLEGYSMDKIAAGLEADGILTGAGKPRWHTSTINKILRNEKYIGDALLQKTYTTDFLNKTRVKNTGIVPQYYVEGNHEAIIPREIYMRVQEELVRRRVVKTSANGKKRSYSCNHCFSQIIICGDCGEMFRRIHWNNRGCKSIVWRCISKLEPTGLECHARTINELDLQEIVLTALNELLGDKSKYQKQLQQNIASVIRASAAITTDGIDEKLMELQQELVKKANNKEAYDEIADQIFALREKRQQASMDTVQRDEQLQRITELQDFIKDQPSDLTVFDEALVKRWLKQITIWPTHCTVELKSGLKVDVER

SEQ ID NO: 25137 - protein, 500 aa, synthetic construct
MPRAVIYARFSSDMQREESIDAQVRACTAYAKSKGYEIVDTYIDEAKSGREVTKRDAYKKMLDDASHKKFDIVIFHKIDRNSRNEVDYYITKAKFLNLGIRYEYAVQSIDSSPEGQMMEGMLVAIAAYYSRNLAKETKKGLTENAYKVQFNGGTPPLGYKIVDKHYVIDNDEADAIRLIFDLFIARHSYKDICCILAAKGYTTRNGQPFRKNSLYDIIGNERYCGIYTFNKIPKDNGKRNSHSKKRPADFIRIEDAIPAIISKEIFQQAQARRRSNKDKPAEYKAKVNYLLRGKIICGHCGSAMGGHTCTPRDKSYSYYSCLDKERIPTKKCLQKQIRKEDAEEAVITKIKKEILTSETFSVIADKMRQKFANTKNSIDKKIADKQNQLTKAQKTRANLYKLVEKGIDDDFTFNKIRAAKETIDILQAEIQTLKKSKKSKILSDTEIQKAFQLFNNKVKSMSDVEAKKLLIDLFLDKAIVTDQKLDIQLSTDAITNMIQK

SEQ ID NO: 25138 - protein, 548 aa, synthetic construct
MKFKYPAMGTTKNAVIYARYSSHSQREESIEGQLRICHEYAKAEGLAIVGEYIDRAISGTTDARPDFQRMIDDAKKSQFSYVIVYRLDRFARNRYDSVLYKHELKQCGVKVVSATEGIGTGDESILLEALIEASAEYYSMELSRKIKRGRQDSAMKGNFLGGSVPLGYKVVDSKFIIDDETAPIVRYIFERYAAGTGKKQIIDELTAKGYMRRNGKPFTYRSFDSVLRNRKYTGEFTQTGITVEGGCPAIVDTEMFEKVQARLEINRRAPAKAKAKTEYLLSGKMFCGYCGEPMIGISGTGRHEKTFYYYSCVGRRGKSGCKKQHEKKDFIEWYVCEQTVQYMQDPERLSHVAKRIIEINDAEFDGGKVKELERAVENCDSDIRKLVDALTTIPDAARPALYDKIERIGAAKADMEIDLAKLRVLSEVRYKQEDVEAWIRSMCRGDLMDFEFRRQLIDVFINSVYLFDDRVVIVYNVKNGKQVSAIDVLNAVEELDGVELFPDSAEDSSAGGNGSFLVADAPPYMKNPNLFPIGNGFGFLIFIKDIID

SEQ ID NO: 25139 - protein, 463 aa, synthetic construct
MTTKVERCAIYIRVSTTEQMMHGKSLEAQKEYLTNYAREHNMAVVGVYADEGKTARKELKKRKAIHSLLQDVEAGKIDVIIFWRIDRWFRNLSDFYKVQDILDNHNVRWISTSEPGINMETRDGRLQLNVVLSIGQNEVDTTSERIKFVNEASIRSGKLIFGDVNMGYGYKSGIVDGQKRMIKDPDREHVVDAFYKYFFKHQNKCATLRYIQETYDPDFSFGIMRTLLSSEFYKGTYRGFPYCPAYLTEDEWSTLQKIQKRNVKATPSGRIYLFAGMIRCPVCGQLLCGTGCSSIINRKTGAKRTYCYYRCNRAMIDHICSYRHRLSQNLVENYLLDNLENEYKNYKVKCEKIEKEKEKQKKKQSPEKLRKELDRLNFLFQKGRIDWDYYNEEYGRVESELNDLQSALPEPVTNYGYLEELLDTDFRTMYDQLSQENRRAFWRSIIQEIHINEDSTITSVDFL

SEQ ID NO: 25140 - protein, 497 aa, synthetic construct
MTAVIYARYSSDNQREESIEGQIRECTAYAEKNGITVVKHYIDRALSAKTDNRPDFQQMIKDSEKRLFDIVLVWKLDRFARNRYDSAHYEYQLERNHVKLVSATEPISDSPAGIMVKSMLTGMAEYYSAELSEKVVRGMTENVLKGKYNGGTIPIGFKVDEEKFFQIDPLKAPFVVEAFQRYNDGATMKELMNWLNDSGVTTNRNQKFTYNSVQTLLTNKRYIGENHFKDIVMPDSIPAIVDKDLFEEVQQKIKKNSRAPARHKAEDDYLLTTKLFCGMCGAMMFGECGTGRNKVVHHYYKCATAKRFKTCKKKTVRKEWLEDLVIAETMKLIQDDAVIDAIVAEVMELQDQENTTLPLLEKQMREVENGIENMLNAIQAGVLTNSTKSRLEKLEAQQKELEIRIAEEKIVRPRLSENQIRFWLTRFRKLDPNVKSHRETLINTFVNAVYLYDEKVLITFNYKDGTKTITFDEIAAKDAPEGNGSDLGCFAPPRQST

SEQ ID NO: 25141 - protein, 579 aa, synthetic construct
MPNLPYSNEFAKLIIAIYCRVSSEDQAERGTIEIQKEFAAKYVNLYNLEVFDYYCDDGVSGTLPLEQRPEGKRLLEDAAKQRFNMVIFYKLDRLGRKVRVILNAVNDLDALGVTVKSMTEPFENETPTGKFLLTTLAGIAELDRDTILSRMWSGAQYAAKQGRWLGGVIPYGYMVADKKLVISTDPIPNCRLSEEDVIKIIFRMAAKEKANCAEIADYLNSIKIPTRYMLNGISGKRYKKTAEIWRPSRISEIIRSTTYKGLHQYGKNATHKNSKIITRSVPAIVSDEIWQEANNTMKDNRVSCKRNTKNLYLLQGIIRCGLCGLAYSPTFYKARNTSYYCCTCKGQQKTKFYNRDTCIGKPVRVDWLDNLVWSKCLELLKEPEKIYDAKPSTNKEPPNIVPTPTEFELIKSRIQELSTEREKLLDLYRKGIIIESDLTTQINKLYLEETELNNKIIKIDNQPKQELKRSKASTVMVLKEFIEMIKNTDINQLPFELKREVVKMLIDKVFVYTKVEPDKFYPSINVIISWRFDAAPFNIDYIENYTLTTFLLQRKKLKTQLQPTPLITLTPVLNCNTRR

SEQ ID NO: 25142 - protein, 534 aa, synthetic construct
MNHVAFATHHNKIKTAPAPTETVYISEDMRLKSTNIVSSSGQSRKRNICFALAVIFVPILNIFYKRRVMQMPEKILRCAIYIRVSTFEQSVHGKSLQAQKECLEQYAADHNMAVVGIYADEGKTARKELKKRKAIHALVEDVKQDKIDVIVFWRLDRWFRNLSDFYKVQDVLDEHGVRWISVSEPGINMETRDGRLQLNVVLSIGQNEVDTTSERIKFVNESSIRQKKLIFGDANMPLGYKTGIVDGKKCMVKDPETEHMVEDFFRYFKNHNTKKGAIRYMQETYGIDFSYSMLRTMLSSEFYKGTYRGYPYCPAYLSEKEWNEMQIISKRNIKNTPSGRIYLFTGLMRCPVCGQKLVGTGCSSIIDRKTREKRTYCYYRCNRALIDHICTYRHRVSQNLVEKYLLENLEREYEKYKVRSNQIGEELKKQKKAKDPEKLRKEMERLNLLFQKGRISFDYYDKEYQRLEREYSASAAFCEEEETRNLHYVEELLKTDFRQMYDSLSPENRRSFWRSTIQEIYLNDDNTIKAVDFL

SEQ ID NO: 25143 - protein, 525 aa, synthetic construct
MKLDSIGNYCMYLRKSRKDIEAEKHGEGETLKRHFEMLMSLANRLKIIIREDAIYKEIVSGDTIASRPVMQQLLADIETGKWDGVLVVEVERLARGDTIDQGIVAQTFKYSNTKIITPMKIYNPNDEGDEEYFEFGLFMARREYKKIRQRMQNGRVASVQEGKFVGNVAPYGFSRKKIKGDKGFILVENPEEADTLKLIFELYANLNYSYNRIADHLNSLGIKPRHAKNWTVATIRDILHNETYRGILHWGARKNVKVIKKGIVTMTRPRNKGDYTVSQGLHTPLISQELWEKVLERHRVTAPKCPHKTALQNPLAGIVICGKCGGKMQRRPYKDRQPSLICTNRKCDNISSDLEIIERKIIEALKEWLGDVAINFEKVEEENAVQVKALERALAKTKVELEKAELKLKRVCECYEEKTYTREVYLQRSQTVSEEIRKLREDVVNQEKELEETRVKYKSEEDFVPQAQYVLDTYYMTNDPEERNRMLKNILEKVVYTKTERAIRKDSDPTNFVIELYPKISKIDS

SEQ ID NO: 25144 - protein, 576 aa, synthetic construct
MKKNFKMPGSGSETPIRVAIYVRVSTVYQIDKDSLPMMKQDLTSYCKYILNTDDFVIFEDAGYSGKNTDRPAYQKMMSQIRQGLFTHLLVWKIDRISRNLLDFANMYAELKDLGVTFVSKNEQFDTSTAIGEAMLKIILVFAELERNMTSERVTATMINRASNGVWNGGRIPFGYSYDKPTQVFSIDPEENKIYNFMVETYEDTQSIVHTSRRLNEAGYRSRNGNMWSPVAVWTILRNPWYKGVYRYNYYKIPGRKAIKDESEWVIVENHHPASIDPDRFDRIQATLDKNARYRNTPGRKTAQKNVHVFSGLVWCAECGSAFTASPGKLHVSGYRPSKYGCPNVRKTKTCHAKYTSDVVLGEFLLNYILNILNAQKQFAYIHSTDDLQKRLLHGSTFSNVDHVDPDGLASLLNMLEKCSGSDPVLLKRPRSKPKMDPELKRMMADQKKQQRALDRLNDLYLYSDDSISEREYLVRKQQITDRLQEINEAIGMMSQEPWMRTMNDEEFIRQASSFILTQKLADKQYIYYENLAESLDPEILKNFFVSILDSIILRDGRPETIVFRNGLSHTFTYKDS

SEQ ID NO: 25145 - protein, 516 aa, synthetic construct
MSYCIYLRKSRKDLEAEQHGEGETLARHERALLSLAKKNNLIISNIYREVVSGETIAARPVMQQLLREVEQNLWDGVLVMEVERLARGDTIDQGVVQRAFQYSNTLIITPSKTYDPANEFDEEYFEFGLFMSRREYKTIKRRMQNGRYAAISEGKWPYNSAPYGFRRTKLEKEKGWTLAFDENEAPVVRLIFSMFTGPERVGIRSITRTLNSYGTKPRNSKLWSESTVRGILSNVVYDQCVKIGERKVVRTVENGVLTTTRPRTSDYTIVSGRHPRLIDHDVFAEAQSYLGCGSPKPAGSNIIKNPLAGIIVCSECKKKMIRRPPSGTASRVPYDLMLCSTYDCPTIGSPLDLVEREVYNALSDWVEGYRLSGQTPSKSLIPEKEVLLESAQQTLDQLLRQKGTMYDLLEQGVYSTEVFLERSASLQSRISEAQSNVAQLKLELDKERQREANIEQFLPACEDLLSCYWDLSIPERNRLLKLLIESIEYKKLTKNKRGHLNEPNFELTIKPRIPRK

SEQ ID NO: 25146 - protein, 456 aa, synthetic construct
MRNKEIAPALVRVALYIRVSGEEQKIKGLSLEAQQERLEAYARERGWVIVGIYIDAAKTARKNIHKRTEFQRMMEAVKRDEVDILLFARLDRWFRSVADYYKVMEILQAHNCDWKTTDEEYDTTTANGRLYINVKLSIAQNEADIDGERIDVVFDSKIAHGTVVSGSAPFGFRVNEEKRLEVVPEDAAIVQDAFNYFENTVSQRATVRYVRETYGVNWCDATFRRMLKEKLYTGVYDRGGRYNDQFCPAIINRQQFDRVQALLTRNVRSAPSGKVYIFTSILTCAECGHKLVGYKSSDYYYYRCNQHFQRGRCSHNHSAREDVVEQWLFEHLGEELERCQLEWDVEAAKKKASVARTDKAALKRKLTKLKELYVNDLIDIEDYKKDYQIYVSALNQIPEPAQEAPPDFAAVRRLLDNSFRTIYDTLTREEKRTLWRSVIKEIRIDNDQNITGVVFG

SEQ ID NO: 25147 - protein, 534 aa, synthetic construct
MSTGTELRAVFYARVSTEEEKQLNALEKQIQENKDVIRDHGWRLVGEYIDEGKTGTTTKRRNDYKRLLKDMTENKFDIVVCKDQDRLQRNTLDWYLFVDNLVTNNLKLFMYLDNKFFKPSEDALITGVKAIIAEEYSRNLSKKLNNSNKRRIERALNGEEVSAMGNGKSLAFKIVNGKWVKDEEEAKLGKKIFELYLEYDSIRKVRDWVNEHGYTNSVGKPFTSESISRILKNEKAKGVIVMGKYHHDFDKKKIVRRSEEELVRIPAPELAYVSEEVFDKVQERLRAKTGNGRGVNAYSDPLSGKIYCGSCGRKLWKHASNGYVNWMCASQVAKGDVECNGTRITTVAIRNIYKKITDNLEVNKGVVKQYIVKWLNELKATLSDTSVNEKIQKDLDKLERKRTKLLEAYLEDFISKDDYKAKYEAIEGQIEEKKKLLVPVEENEDIKVIESVLQNIDDEIDAYVKTLDMEESKVDFLIEHTKRITVLENRDIIIELDLVAGAIIAGKDFLLYVHDTMPQHHGPKHLHPSGPQTA

SEQ ID NO: 25148 - protein, 517 aa, synthetic construct
MRKITRLEPKKTALPTRKKVAAYARVSKDTERLLHSASAQVSYYSELIQKNPEWEYAGVYVDCGITGTLTCKRDEFKRMLTDCEAGKIDIILTKSISRFARNTVDLLETVRHLKSIGVEVRFEKEGIHSFSEDGELMLSLLASFAQEESRSISENVKWGIHKRFKSGEIGVANKHILGYQYDEEQKKYIIIPEEAESVRWMFQMYIDGVTLRDIADNLNNAGICTILGNDFQEASVRQLIFNEVYAGDIRRQKCYVSDPIKKDKVPNRGELPQYYMADCHEAIIDRDTYAKVKAEMERRASLLNPTYCFTKKIRCGTCGAQFTRKKGKVRGKTYVHWICRSKKETGMTCSSVNFSEEELKNICADVLETDSFDEEIFESRVKDIIVLKNGDIEFHLVGGETRRWKNLRLNPPRHKVTLTDAFQGKIRCAKCGNTYHRVNSANKWVYWYCMGKKKKGMTCDNINYTDFQLRQITAHILGLEDFDEQVFSEQIEGITVLEDGNLEYHFYKGRTERWQRV

SEQ ID NO: 25149 - protein, 513 aa, synthetic construct
MLYAIYLRKSRADLEAEAMGQGETLARHRAALLDYAAHHGLEIGAVYEEIISGESIDARPKMKQLLREVEQGRWAGVLCMDIDRLARGNSADQARVSNTFRISGTLIITPSKVYDQSRESDEEYVDFELFMARREYKAISRRIMRGRIASVKEGHFIGSTPPYGYDKVKVEKGRGFTLLPNSESDTVKQIYSMCISGMGCNAIARRLDMMGVTPRKGSSWSSASIQDILKNPVYCGKIRWQYRKEEKSLTDGIVTTHRRENPDCIIAQGLHPALICEEEFDQAQQFLNSRRIPHKKESTELRNPLSGLVYCGMCGSMMTRLGTSSRNHSDTLRCPNRNCSNVSAKLELVESALVEGVARWLNDCRVNVSRKPAADTAKAERTAAEKVRAELAKLDSQREKIYSFLEQGVYSAGEFRERMESLEKRRTQLSENLRQAEQAVSEAEGNRQLYAQIIPSVERVMDIYAQSTPEEKNRLLKTIISRAEYIKTERNTRGNADRCNFTLNVTPLFPETD

SEQ ID NO: 25150 - protein, 521 aa, synthetic construct
MKTVTKIEANQRTTGSEKKLRVAAYCRVSTGSDDQLESIAEQKKHYETYIQAHENWYFAGLYYDEGISGTKKEKRSELMRLLSDCEAGQIDFIITKSISRFARNTTDCLEMVRKLLAINVAIYFEKENINTTSMESELVLAVLSSLAENESVSISGNEKWSIRQRFQSGTYKMNPPPYGYSWNGEKLEVSNEQAEIVKRIFAEFLSGKGVMHIARNLDSDNIAPARGKHWCQSSILRILKNENYTGNAVFQKTFTDESFRRCVNYGQLDKYLVADHHEGIISKADFEAAAALIDRHAVEKNVTKGSHKYQLRYCFSGKIVCGECGATLKHRTHRLGGETYEAWCCSTHIYNKESCSMKFIRDDDIKLAFVTMMNKLIFGHKLILKPYLLTLRSSSTDSSIQRIQQLRLLIEQNTGQQETLTRLMANGFIDRTLFGRELNAIMAQTDEYRAEIDTLSSSVTGDGAKLKETERLIKLVERGRMFKEFDADLFSKLVDRICAFSRNEIGFALKCGLTLRERIGE

SEQ ID NO: 25151 - protein, 492 aa, synthetic construct
MAAIDFNNVVDLYIRVSTSEQAEEGYSVAEQEERLRSYCAAFNYIINAIHIDPGFSGASLDRPGIKKVMYDVEHGRCKKVIVWKLDRLSRSQKDTLILLEDVFLANDCNFISLMESFDTSTPFGRCIVGILAAFAQMERENIKIRTMMGRQARIRDGHFHGSRCPLEYKFQYAPDGTLLSNDLVVDPYTSKLVQEVFRLFLSGSSLSSISAHMASTYGCSIYDWSNSTAIRRILSNPIYMGNVRVGNELYPGIHEPLVSETDWYMVAAMLKHNKEQQKRTYAYQISGGAYADNLLTGLLFCGDCGARMYARRVSQNKKKYICHSVAKTSPAMIKSDHCTNRLHPFTVHQLDEMVINEILKLSLDRPGFDMLCDQPDESSKSEDKEIYEERLAEVNRQLDRLVKLYQTGLIDLDNISARLGDLNQEKNFLEGNIATINEITPADLRETAWKSIQSLQSVLDNGDMDEVHRIIHTLIDKVVVFNADVTIYWSFC

SEQ ID NO: 25152 - protein, 526 aa, synthetic construct
MAKRIPAAASDCDGMIGVIYARYSSHSQREESIEDQLRECHEFAARNNIKIIAEYTDSALTGRTDSRPDFQKMIRDSARGKFQVVVTYKVDRFARDRYDSAIYKAKLRKNGVRVLYAKETIPDGPEGIILESVLEGYAEYYSAALSQNILRGLEGNAMKCKTNGVQVLGYYTGEDGCYEIDPDYASVVLSIFQKYDAGVPQKEIIDDLNARGFRTTRGFAFNKNSVTRILRNRKYIGEYSWGDVTVPGGMPQIVPLPLFDSVQRKLDRGSRAPAHKWKVADYILTSKLFCGHCGELMVGRAGTGKSGKKYDYYACVNRTRRHGCDKKPVKKEWIEDIVGKYTKEVVLAEDMIEQIADGVMDFLEREKKSNGELDALEASLKNVESSIRNMMQAIEQGIITKSTKQRLMELEEQRDQISAAIAREKIATPDIERDQIVYFLEKFKEGSLDDPDYRTKLVEAFVSSVYLWDDGRIVINYNYTGENSQLTLRQIEQELVDMDGAEGSPLDSSAPSSEMPENTAFSSISK

SEQ ID NO: 25153 - protein, 525 aa, synthetic construct
MANVTVIPATRNIHTGIRKDAVTKRKTAGYARVSTDSEEQLTSYEAQVDYYTSYIQSRPEWEFVKVYTDEGISATDTRHRDGFNEMIKDALDGKIDLIVTKSVSRFARNTVDSLSTVRKLKERGVEVYFQKENIFTFDSKGELLITIMSSLAQEESRSISENVTWGKRKRFADGKVSLAYSTFLGYKKGEDGQMEIVPEEAETVRLIYRMFMQGKTPYAIAKYLTEQEIPTPTGKSGWRHRTVENILTNEKYKGDARLQKCYTVDFLSKKRKANEGEVPQYYVEGSHDAIISPSEWQLVQLEMEHRRAAGRSNCCSPFSAKLKCGDCGAYFGSKVWHSNSKYKRTVWQCNAKFKGEHKCTTPHLYEQRIQELFLEALSSLMENRDSLIDDCRAVMHVLGDCEAINREMEEVRSEMEVTTGLIQKLIDENATRKMDQNDYRKRYDGYVSRYAALESRMDGLEKERKEREFKYDIFSGFLFELGEIHELPLAFDDRLFYQLVDYATVYSDGRVVFTFRNGTEITTEM

SEQ ID NO: 25154 - protein, 503 aa, synthetic construct
MARRITQVTFGSPQLPRDKNVAAYCRVSSGKDAMRHSLAAQVSYYSELIQNHAGWEYAGVYADEAVTGTKDSRKNFRRLLSECRAGKIDMVITKSISRFARNTVTLLETVRELKTLGVDVYFEEQNIHSLSADGELMLTILASYAQEESRSASENQKWRIKKNFEEGKPWSSTLLGYRNVNGRYEIVPEEAETVRMIFTWYLEGAGATIIRNRLNAMGIKTRLGNSWSRSPILKLLRNYAYTGNLILQTTYREDYITKRSVKNNGEKPMYHAQGTHEAIIDMDTFNRVQEEIQRRAEHFASPDGNKSTARYPFTSMVKCSRCGKSYVRSGAPKYRTWTCHTRRKDGLNCCGAEIIPEEELFRLTAEVIGGEVTEDAVRDKITVIRAEKDRTLVFCLKDGKETVKRWREHEIKYICTEEQKRQISLKNSGRKRTDEQKRQQSERMKEYWRTHEFPEERRRLISEKKKAYWSDGEASAEHREMLRQRMKEVRTMRKNGRKEENDG

SEQ ID NO: 25155 - protein, 536 aa, synthetic construct
MKRVYTLYRVSTKQQVDQAKNDIPMQRIECREFAQKQGWEIVRELEEKGVSGFKVSAADRDAIQDLKVAAEKKKFDVLLVYMFDRIGRIDDETPFVVEWFCKHGIEVWSVEEGEQRFDSHVDKLTNYIRFWQASGESGKTSMRIKTRIHQLRIEGAYTGGPVPYGYCLEQKGRLNRKGQPIPDFAIEPHEAEIVREIFRKTLCDGYGSHRMAQYLNNRGLRTHGGARFHSIAIIRILRQKFYCGYIDDETSEGLQNLKIIDLDVFNQVQSILDQRAEKDTEKRQIALRTQGEAMLSGNIFCAHCGGRLNVIRYKDHYTRKDGSEYSVNQIKYACYHKSRKLCDCEGQTTYLAERVDEIVSQVIRQLFATMKCAPQQERLEATLKHQIASNRAQQKKINHELEKRRSRLGKLQEEIANALSGESIYSPEDVAQAISKIKEGISALEQQLYDLENDAFKQRRTMQMITPSYNQFKSWAEEFDQASMEQKKMIACQLFKKIEVGRGYNVTFELNMTYQQFCSEWDGLATIFEQQDLIAQ

SEQ ID NO: 25156 - protein, 519 aa, synthetic construct
MKKVTKIDKIQPSQTSKKKLRVAAYCRVSTDSDAQLESLDTQKEHYKNYITSRDDWAFAGLYFDEGITGTKADKRPMLLQLIEDCKAKKIDFVITKSISRLSRNTTDCLEIVRTLLSLDISIYFEKENINTGSMESELFLSILSSMAEGESASISENNKWSIKKRFLDGTYKLGYVPYGYRWKDGEILVDPAQAKIVKRIFRELLSGKGTEAIAKELNQEQVPTKKGGRWTSTSIRDIIRNEKYTGDCIFQKTYTDNNFNRHKNDGHLDQYYVPDHHEAIISHEDFEAAAALIEQRANEKGIKKGNAKYQQRYAFSSKIICSECGNTFRRRIHSSTYGKYAAWVCNTHLEDTSSCSMLYIRDDDLKLAFITMINKLVYCHKLILKPYLKALHENTGDASLLNIQQLETLLEQNTEQRETLHKLMGQGYIDQILFTQENNALLSQANDYRNEIEALNRSQSLDATKVYETERLLHFCERGEMQMEYSEELFELFVDHIEVYSRQKIGFALHCGLILKEMI

SEQ ID NO: 25157 - protein, 573 aa, synthetic construct
MAKVKLPDKPRVAIYTRVSTLHQIDKDSLPMQRQDLINYARLILNTEDYVVYEDAGYSGKNTDRPKFQEMMQQVRLGMFTHILVWKIDRISRNLLDFATMYSELKQLGVVFVSKNEQFDTSSAMGEAMLKIILIFAELERNMTSERVTAAMLSRAANGQWNGGRVPLGYDYDPETKTFTINESEAAVVKIIHDKYEQERSLVSLARYLNGHGYRTRTGCTYSPSTLLIILRNVFYCGDYRYNVLKDGDRQRRKKESEWITVKDHHQAIISREQKDEIARILKENRRLECERRGIYSKKKNVHVFGGLVICGNCGHAMTSTIRPADQDGIRWSVYVCPTKRRSEYLCKGRATSEVVLGEFVFNYILNMLNVQKNFDSINSVEDMEKMLLSGSTFRDVDGIERAGLDDLYNMLASGLTEKAPFDSSVEVRKKPVVSDIELENLNTEKTRIERAAERLQNLYLYSDDSISQKDYIIQREKLMSQLAEVNEQIGMVMSNADEKDVSDEEFVHAASKFILTQKLEGRTYIYYKRLATTVSREVLRSFVMSIIENITIYDGRVQTIVFKNGLSHTFILK

SEQ ID NO: 25158 - protein, 584 aa, synthetic construct
MAYRKITDIRDTIGMRAVFYARVSTAEEEQLNAIELQIEENRGCIKDHGWKLVGEYIDRSKSGTMVKGRDDYQRLYEDLYEDLFDIVVIKDQERLQRNTLDWYLFINRVVQTGKLLFMYMDGKFYSPDDALITGVRAIIAEEFSRNLSKKLHNYHDHRIEKARQGQEIALQGSGNVYGWDKKDGKYYINPEQAKVRRLMCEGIMARKGSTLIAKELNEAGYRNTVGKLWKPMDIPKFVYDCKNVGTMIINKERHDFESKQTIKLPKEEWVYVENALPPIVTQEEWDLICKIHEERVIATGSDRRGKKTSGYSFSGKLVCGICGAPYWRKQRVSKDEYWVCSTKQTKGRRTRKRDSTMGKAGEINPLGCDNENISYNSLMEIMGVVSERLQANTDTIKHDMINWLTKLRKQLLEANGGHTEADLQRELSRKSKLLDAYLDGILNKQEYQKKAEELDERIIQLKAETEKNKANSGDIAEIDKVLANIDEEVSRYVDGNEKLKVEYLLEHLEQVQIFPDKVIVIVPILSEGIVVEKTQYVSREKRCRQDYLYENDRWSGKADKRRDIHVWIRWKGFVKGTLKSGLPD

SEQ ID NO: 25159 - protein, 440 aa, synthetic construct
MIQKKITTIDAAPRLERLINVAAYARVSSGKDAMLHSLAAQITYYQNLITSHQGWKFAGVYADEAFTGTKDNRHEFQRLIQDCKDGKIDMVIVKAISRFARNTVTLLKTVRILKSINVDVYFEEQNLHTLSAEGEMVLTFLASFAQEESRSVSENMKWRIKKDFEQGLIWGSKPQLGYRIVDRRLVVVPEEAEMVRRIFSLYLDGYGFQGIANLLNAEGQTSTLGNKWSKTAIEAIINNYNYTGDLILQKTFRVDHLTKHKKLNRGEKAQYLVEDAHEPIITKEQYMMAQTLKKQRAQHFNLLDMTKQINLFTGIVWCGACGKHYRRKKQERRMWWTCSTFNTVGKEFCDSKSVPEEVLIEITKKVLGVKEITAEIIKSKVDHIDVLKGNRLVFHLKNGSTIEETWKSLSRKDNWTPEMKEKARQRAIAQYRRKEGKHNG

SEQ ID NO: 25160 - protein, 526 aa, synthetic construct
MAKVTIIPSKINPITLTPVGQVAKRKVAAYARVSTDSDEQYTSYDAQVTYYTNFINGKPNWEFVKVYADEGISGTSTKRRDEFKEMIESALNGKIDLIITKSISRFARNTLDTISITRQLKAKGIEVYFEKENLWSLDDKTEFLLTIMASIAQEESRSISQNITIGKRWGMKEGKVSFAYKNFLGYKKVDGKIVIDEAQAETVRLIYMMFLKEGKTCTGIAEFLKSKGIPTPSGKSCNWTKNTVYSILTNEKYKGDALLQKKYTADYLEHRVVPNNGELPQYYVENNHPAIIEREVWEMVQTEMMRRSMLGAAYSGNSIFASKLICGDCGKPYGKKKWHSTSKYAREIYRCNAKYNKGQTQCQTPSLTEEDIKARFIKAYNLVMCDKQQVIEDTLAVIELLADTTDLDAEIANLQTEIERISSDVSLMVRENARTQQDQIKFAARYEELTKEYETQKAALEKAVKEKAYKTGKATKMRAYLETMKQADDFLEEWSDEAWILMVETATVNRDKTITFKFANGKEIAV

SEQ ID NO: 25161 - protein, 479 aa, synthetic construct
MKTAACYIRVSTDDQTEYSPDSQLKIVRDYAFKHDISLVEKYIFAEDGGKSGKNMTNRTEFMRLISLTKKKPKPFDAILVWKFSRFARNQEESIVLKSMLHKNGIDVISVSEALPEGPFGSLVERIIEWSDEYYLINLAQEVKRGMKERASRGQPVCPPPIGYSMDNGKYVPNADAQFVKNVFADYLAGLGLRAIAIKYGNLGLKTTRGNAPDNRFIEYMLRNPVYIGKIRWSVDGRAASRRVYDDPNIMISDGNHEPIISEEVFNEVQKRIGETKRLYKKYQRPEQPVEYMLKGLVRCSACGSTLTRVITGSAPGLQCHNYSRGSCHVSHSIRISKANDAIIAGLESSIETGSFNIVPPKINKAESTIDYDKLLANEQLRLERVKAAYQNGIDTLEEYKRNKEQIYAFMEKIKAEMEANGTRAAAADNAGFRQKAANVLKIIKDPSQPESAKNIALRSIVERIVFKKPENEFDIFFYV

SEQ ID NO: 25162 - protein, 516 aa, synthetic construct
MARKKKVSPGNRLVAYYRYSGGSQQTEQSIEGQRRDCEAYARQHGLTIVHEYIDRHISGRGVESRLAFQQMIADSSKHLFDLVICWKTDRFARNRYDSAVYKKKLRDNGVRILYAAESSVEGPEGIILEGLMESLAEYYSAELAQKMRRGMRESALKGKAINPNRPLGLTTDEHKRFIIDEKNAPTIRFIFEHYAAGESSASIVDQLNAAGLRTSKGNSFNKCSIPRIIQNEAYHGVYICKAYDVRIDGAIPAIIDDDLWKRAQKMLTLNKQHRAPHSSHADYLLSGKLFCGCCHSLMRGISGHNCRNDVYYYYACGNKADGGTCKKKNIPKDVAENLVVNAICENILRPDTLEDLADAIAAAQQADVNQPDPERAMLEQNLADVHRKINNIIESIENGTASSRLSARLADLEQQESTLNYQLESLKEVHPPVLDRERILFLLEQFLISPNERTEDYNRRIIDTFVNRIEITDTEMLIYFNLSEASASEKQKNPQPNSCSTGNHLVRVARIELTAS

SEQ ID NO: 25163 - protein, 581 aa, synthetic construct
MAYATKTLAASADDRIVAIYVRVSTGYQVDKDSLPFQKKELKAYCKHILHIDMSRVEIFEDAGRSGKNTKRPAYERMMQKVRAGLVSHVLVYKIDRISRNLVDFSLMYDDFKYNRVTFVSLNEQFDTSSAIGEAVLKIILVFAELERKLTSERVKDIMIGRANEGKWNGARVPYGWDWDSSSGWPVHSEKEAPFARAMYEMYLEVKSTGKIRDYNNAHGIPTKRGGEWTSKTVGDFLRNPMNKGDYRYNYRESARGRKKPADEIVYLEGVFDPLVDPEIWEKVNKIMDINRDQRNIGGSHPIEKNCNVFAGLIQCGSCGSGYLVGKKDKRRKNGFTPSLYYCGAKTRAIHCQNLNVSDVKIGPFVINYISAMVRVSNERRKIKTPEDLEEMLLSDKAVFADIMGLSSDSLNTTFELLTGKSATGGALWRADPVDQEGAAADPAEVESLKDQIRKYERAKERLEDAYYFSDDGMSEKEYLEKKNRFDSMRVSAENKLKELTETHIASGVDESTFMKSASAFLLTHKIRAGSHIVYSDLAGMVEEESIKEFFNLVLNHITVKDRRVTEIVFANGLSHKFIYRD

SEQ ID NO: 25164 - protein, 523 aa, synthetic construct
METTKNITVIPARRRVGNTAKETEIPKLRVAAYCRVSTDSDEQATSYEAQVEHYTDYIRKNPEWEFAGIFADDGISGTNTKKREEFNRMIDEAMAGKIDMIVTKSISRFARNTLDCLKYIRQLKEKNIPVYFEKENINTMDAKGEVLLTIMASLAQQESQSLSQNVKLGFQYRYQRGQITVNHNRFLGYTKDEKGQLIIEPDEAEVVKRIFREYLEGASLQQIGRGLEADGILTGAGKKKWRAETLQKILKNEKYIGDALLQKTYTVDFLEKKRVPNNGLVPQYYVENSHEAIIPRELYMQVQEEMVRRANLHSGQNRKKRVYSSKYALSSIVYCSKCGDIYRRVVWNNRGKRSIVWRCCTRVEHGPGACNADAIHESELQNLVVRAINMALGQKDTMYDVLQRNVEAVLMGTDGISLDEIDARLEELQKELLNVANAKGNYDSIVDEIYSLREAKQNAQVEGAEREGIKQRISEMQQFLAEQTQDITEYDEQLVRRLIEKITVYDEKVIVEFKSGTNVDIHR

SEQ ID NO: 25165 - protein, 520 aa, synthetic construct
MKKITKIGTNEPLVGKKKLKVAAYCRVSTASDEQLISLEAQKAHYESHIRANDEWEYVGLYYDEGITGTKKDVRAGLLSMIADCEAGKIEFIITKSISRFARNTTDCLEMVRKLTDLGISIFFEKENINTGSMESELMLSILSSLAESESVSISENSKWSVQKRFQNGTFIISYPPYGYENDNGTMVIVPEQAEIVKEIFAACLAGKGTHAIARELNARGIKTKKNGKWSAGTVNAILNNEKYTGDVIFQKTYSDSSFNRHINYGERDRFLCENHHEPIISHEDFEKVRAVLDQRAMEKGNGTDTYRYQNRYCFSGKIKCGECGTTFKRRQHYKPSGNYVAWTCGKHLENKKECSMLYISDESIKLAFLTMMNKLTYGHQVILKPLLRTLRGMDDKDRLLRIQELDICIEGNTDRKQILTGLMATGVLEPTVFNKENAALVMEEQKLRAEKEKLVNFVGGDKTRIKELQKLMAFTSKGMMLTAFEDETFLAFVESITVESRTKIVFHLKCGLNLTERLVN

SEQ ID NO: 25166 - protein, 587 aa, synthetic construct
MKKITRVSRPMPAIVRRKKVAAYARVSVESERMNHSLSAQISYYNGLIQRNPEWEFAGVYADDGISGTTIDKRKGFKQMLADCEAGKIDIILTKSIQRFARNTVDLLTTVRHLKDLGIEVRFEKEHIRSLTGDGELMLSILASFAQEESRSISTNVKWGTRKRFAQGIPNGRFRIYGYRWQGDQLVPEPKEASVVKLIYDNFLKGLSAETTEKQLEEMGMKSFNGKHFGNSAVRRILENITYTGNLLFQKAYSADPITGKTKINHGELPQYFVENTHEAIIPMETYKKVQEERERRRELGALANWSIDTCCFTTKIRCGICGKSFVHIRSKRKNKDCWTCISHKERGRTCRSKGAIPQKVLVKECTEVLGLSEFDEKVFLNQVDKIVVTEPHVMVFHMKNGEQITRQWVSTARKDAWTSERRKEWGERHKLKSTNPNRKIFNEFTGFIKCGKCGENYRSQQTTYSDGKKERYWRCAGICGNEAIKDSTMKKLTASVLGLDTFNEEKMDESLEKAVVLNGEITFHFKDGHTETRQYRERKRGTRHSEAYRAYMHEIMQYAKRKDPEAKKIMLALKEEWKREDNRWQKQ

SEQ ID NO: 25167 - protein, 525 aa, synthetic construct
MAKTVRAIPATISRYTSSPINSRKKRKVAGYARVSTDHDDQITSYEAQVDYYTNYIKGRDDWDFVGMYTDEGISATNTRHRDGFKRMVKDALDGKIDLIITKSVSRFARNTVDSLSTIRKLKEHKIECYFEKENIWTFDSKGELLLTIMSSLAQEESRSISENVTWGHRKRFADGKVSVAYSRFLGYKKGPNGGLVVVPEEATTIKLIYRLFLEGLGMTTIAKELMTRGIKTPGGKYKWSTSTISSILQNEKYKGDALLQKSYTVDFLTKKTKLNEGEVPQYYVEHDHEAIIEPQTFELVQAELKRRSKARKYFSGTSIFSTKIQCAECGGWYGAKVWHSNDKYRRIIYQCNNKFRNKTGCSTPHLTEEEIKMYFVRAMNKMITEKDEIIQTIEDARQVICDNGDLLTKRDAMQKEIGILVEMAQNTVERNARVAQNQEEYQKQYDEIISRYDAMKIEYEQLCEKIEKRQARNEQLGRFIQELKGRESLLTEFDQSLWCALVDKMVVKDKENVTVVFQDGTEIKA

SEQ ID NO: 25168 - protein, 521 aa, synthetic construct
MKTVTKIEANQRTTGSEKKLCVAAYCRVSTDSDDQLESLAEQKKHYETYIQAHENWNFAGLYYDEGISGTKKEMRSELMRLLSDCEAGQIDFIITKSISRFARNTTDCLEMVRKLLAINVAIYFEKENINTTSMESELVLAVLSSLAENESVSISGNEKWSIRQRFQSGTYKMNPPPYGYRWNGEQLEVNNEQAEIVKRIFAEFLSGKGVMHIARGLDSDKIAPARGKHWCQSSILRILKNENYTGNAVFQKTFTDESFRRCVNYGQLDKYLVADHHEGIISKAYFDAAAALIDRHSVEKNVTKGSHKYQLRYCFSGKIVCGECGATLKHRTHRLGGETYEAWCCSTHIYNKESCSMKFIRDDDIKLAFVTMMNKLVFGHKLILKPYLLTLRSSSTDSSIQRIQQLRLLIEQNTGQQETLTRLMANGFIDRALFGRELNAIMAQTDEYRAEIDTLSSSVTGDGAKLKETERLIKLVERGRMFMEFDAELFSKLVDRICAFSRNEIGFVLKCGLTLRERIGE

SEQ ID NO: 25169 - protein, 524 aa, synthetic construct
MPKYNPEELLPAVAYYRYSPGGGQTEQSIEGQRRDCMAYAKSHGYVIVKEYIDRHLTGRNDKRPAFQLMMKDAELHRFDTLIAWKNDRISRNRRDALNYKDQLRKCGVQICYAEMDIPHGPEGILMESLMDGLAEYYSAELAQKIRRGMTESAHKCRALGSIPPFGLRINKEHHYEPDPTTAPYVRWIFQQYAQGVQITEICNALNEKGLRTSRGNEFNKNSLRTMLSNEKYVGVYEAKGIRTENAIPPILTQELFDAVQQRIPKNAHHGRKLAGVRQFPLSGIAYCAICGAPLIGDAGTGKSGRVHTYYACTAHKHRRNCTKKNIRQAKLEEMVYDATANMVLCPSITRAIAKQVEASAAADTSHAEEMQAVQAHLKDIEKRINNILAAMEEGSFSKAVSSRLTTLETEQSRLEKQLRTLRRVKPNITASRVEYMLSTMCRNPAEQQPDHLKRLLQVFVERIDLSEETMSITYTLTKKSAVPSSTADSTTAKTLRYIDLKQCSTIACYGGADGSRTRVRKEIG

SEQ ID NO: 25170 - protein, 501 aa, synthetic construct
MEIQIMEGSREQKRKLKVCAYCRVSTDADEQENSLENQVRHYETVIKANPDYEYAGVYSDFAISGFKEKRPGLQKMLADAEKGKIDLILTKSVSRFARNTSIVLEATRKLKELNVGVFFELQNINTLSGEGELMLTILAAFAQAESESGSVGAKMVYQRKYEAGIPVQYLERSFGFKKDERGVYIADEEEAVWVRKIYEMAADGYTPAAIKRYLNENGVKTVGGTKWIDSTVFRLIENEIYKGDYIMHKHFVNEERKLVRNRGEVDAWYIEDDHEAIVSPELWQRAQDALEAKRDYLAEGSVIEEFTEENYPYMNKIYCAKCGYPLYKRIYSKGNRLNWGCSGMKRYGKSFCDGINIPDGVLRNAWHFEENTYIDEKASDKGVKEFSYLKERSWKRRHKKKQPPSIPENTEAEYPYREKIYCALCGSRLVRHVDTKSHKVTWVCNGRKRKGKDFCDGTRVPDTILKGWGEIKKDIYIQRKDDKNGKKRYSYTSKKPSGIGA

SEQ ID NO: 25171 - protein, 545 aa, synthetic construct
MNTVIYARYSAGPRQTDQSIDGQLRVCTEFCKQRGLTVVDTYCDRHISGRTDERPEFQRLIADAKAHKFEAVVVYKTDRFARNKYDSAIYKRELRRNGIQIFYAAEAIPEGPEGIILESLMEGLAEYYSAELAQKIKRGLNESALKCQSLGSGRPLGYTVDEQKHFQIDPESSQAVKTIFEMYIKGESNAAICDYLNARGLRTSQGNLFNKNSINRIIKNRKYIGEYRYNDIVVEGGMPAIISKETFCLAQAEMERRRTHRAPVSPKAEYLLAGKLFCGHCKGPMQGVSGTGKSGNKWYYYYCANTRGKERTCDKKQVSRDRLEKAVVDFTVRYILQEDVLEELSKKVYAAQERQNNTASEIAFYEKKLAENKKAIANILRAIESGAMTQALPARLQELENEQTVIQGELSYLKGARLAFTEDQILFALLQHLDPRPGESEQDYHRRIITDFVSEVYLYDDRMLIYFNISSADGKLKHADLSAIESGVFDAGLISSTKQVLDEHLFFCRRLRREMFALIHNRKSAVLGVIPRRRFFYYNIDCAYF

SEQ ID NO: 25172 - protein, 503 aa, synthetic construct
MPEALNAVIYARYSSDRQTEQSIEGQLRECYAFAKANDIAVIDTYIDRAISGKTDNRPAFQKMIEDSAKRQFQAVIVYRLDRFTRNRYDSAIYKARLKKNGVKVLSAMENLNGSPESIIMESLLEGMAEYYSVELSQKITRGMRENALKGKALGGQRVLGYKVNSDCYFEIDETTAPVVVDIFKLYSSGKTVKEICDILNARGVKTARGGAFNKNSLHTILTNKKYIGIYKTKYGEIVGGIPAIIDKELFEMVALRMEQNKKAPARAKAEINYLLSTKLFCGKCRSAMVGESGTSKTGKKYYYYACVKKKREKACDKSNVKKDWIEDLVIQRTVTDILKDDVIEKIADRLVELQKAEAAESGTMLYLENSLAEIQVSIKNIMTAIEKGIITESTKTRLTELEDEKRNVEIEIAKESIARRIISREQIIYWISSFKDGDITSEKYRQQLIDTFVHAVFVYDDKIVITYNYSGENNTATISDLDLSSPPKVKIRTLSSMVIRSDF

SEQ ID NO: 25173 - protein, 463 aa, synthetic construct
MRRKTTAPIEKILLRVAIYIRVSTDKQVKDGDSMRDQLATGQKYIDSHENMILVDTYIDDGISGQKLKRDDFQRLIDDVRAGRIDLIIFTRLDRWFRNLRHYLNTQDILDKHGVSWTAIEQPYFDTSTPHGRAFVNNSMIWAELEAQNDSDRILGVFDDKVDNGEVLSGSTPLGYTIVNKHLVPDDDAPTAVAIFQYYRKTGNLSMTLRYMESEFGLVRSAASLKNMLTNTKYIGEFRDNKNYCPAIIDRDLFFDVQRLLKINIKSGKKHDYIFSGLVVCDDCDHIMSGCQQRARGRVRADGTRIVYKYSVYRCRQGVNLHRCPNRKLVFETTLEKMLLERIRPELENYIAEYEVANLPALRTDAKRRSVEGKMQKLKDLYLNDLITMDEFKLDREKLLMQLEKINAEDSRPVKDLSYLKNFLKMDFESVYDSLSIPERRELWRSIVKEIRVDHDKNIHIIFL

SEQ ID NO: 25174 - protein, 504 aa, synthetic construct
MQKYLMYLRKSRADGEHETIEEILARHEKILQEYAEKNIGKAVPEENIFREIVSGETIKDRPLMNKLLKCIQNEQITGVLVIEPQRLSRGDLHDCGTIIRAFQYTNTLVYTPTKTYDLSEKYDRKFFEMELMRGNDYLEYVKEILMRGRLASVSDGNYIGSIPPFGYSKEKIDKNYVLVENDESNVVRLIFDLFVNQNIGTSKIANHLNSIGIKPRKNNYWSDSTIRDILRNPVYIGKIRWNWRKTVKTYKDGEIVCSRPKSTPDSWIIIDGKHNGLISEEVFNAAQKRFGQNPRVKKEYEIVNPFAGLVKCECGKSMVYKKFNKSSPRIICPNQPRCENRSVLYSEFESEVIIALKKYINDFKIKISNGDNQSESIQNGILESLIKELKTIENQQDKLYELLEQGIYTNAIFIKRNTALAEKRKKITSEIENLKTSIPNSINYEEKIVQLSNALNTLQNPDIHPKIKNEFLKVIINNIYYTRKNDNRTRNDDSPFTIKIILNL

SEQ ID NO: 25175 - protein, 513 aa, synthetic construct
MMQQALNAIIYARYSSHNQTEQSIEGQLRDCYAFAEREGLQVIGEYIDRAITGRTDERPDFQRMIADARKQEFQRVIVWKFDRFSRDRYDSAIYKHKLKQCGVRVLSAMENVGEGDVSIILEALLEASAEQYSLDLSKKVLRGQRESRLKGTFLGGLTPIGYKLENRKLVADERTAPIVRYIFEQYAKGTSKQDIINELATRGILNRHGKPLSHSTLQTILKNKKYIGVYTHGGQDVAGGCEALIDEKTFLKVQEQLSKRKHAPAASKAVIEYLLQGKLYCGYCGFNMFGDSGRGRNGSTYRYYACRRRKKERDCKKKNEKKDFIEWYVVEQTVEYVLTPERIEYIASELVAQYKKDCGIDRIKAYEKQLDRIKAEISRLVDTLAVCPAAARQPIFDKMEQLDAEKQEAELDLSKLRISAKIQISKEHIADWLKQFCNGDALDVDFQKRIIDTFINSVYLYDDKVIIYYNIEGGKQVSYIDMIDSTEEPPFSDDAPGSSGGSDLKRPALRLCC

SEQ ID NO: 25176 - protein, 515 aa, synthetic construct
MGRKCVIYTRYSSDRQREESIEGQIRVCEDYAKRNGLEVLHIYADRAMTGRSDQRPEFLTMIKDAASLTFDVVLVYKLNRFARSRYDSAKYKHKLKKYGVKVVSAMENIADDPSGILLESVIEGMAEYYSVELAENVVRGMTENALEGKWPGGIVPLGYKLDADHHLVIDEPNALVVRRIYQMILDGRTPASICRTLNAEGKRTATGRPFNHNSITRLLSNERYIGTFIWRDVRRTGVVPRILDDRTFYAVQELRKSRQHHKGVAKRSENYLLTGKIFCGRCGSPMVGKSGTGKGGVYYYYNCQKHIDGSGCPARPVRTDKLEDQVVQVTTKILSQPDAIKAIARQAIAIQKERRESLEVQSLKAQVSDLSKKLDNCLKAVDNGAFSETLCNHMREYESRLRDLKAALSRAQLMDRGGKLTERQIEFFFFAISRQLKTEPRYKEILLSSLVRCVIVNDDSIEIQYNYKKELPTLANPVKVKSSHKVLMVIRSEVCANIRFTVCPDYFSVLVGRAA

SEQ ID NO: 25177 - protein, 498 aa, synthetic construct
MPEALNAVIYARYSSDRQTEQSIEGQLRECYAFAKANDIAVIDTYIDRAISGKTDNRPAFQKMIEDSAKRQFQAVIVYRLDRFTRNRYDSAIYKARLKKNGVKVLSAMENLNGSPESIIMESLLEGMAEYYSVELSQKITRGMRENALKGKALGGQRVLGYKVNSDCYFEIDETTAPVVVDIFKLYSSGKTVKEICDILNARGVKTARGGAFNKNSLHTILTNKKYIGIYKTKYGEIVGGIPAIIDKELFEMVALRMEQNKKAPARAKAEINYLLSTKLFCGKCRSAMVGESGTSKTGKKYYYYACVKKKREKACDKSNVKKDWIEDLVIQRTVTDILKDDVIEKIADRLVELQKAEAAESGTMLYLQNSLAEIQVSIKNIMTAIEKGIITESTKTRLTELEDEKRNVEIEIAKESIARRIISREQIIYWISSFKDGNITSEKYRQQLIDTFVHAVFVYDDKIVITYNYSGENNTATISDLDLSSPPNLIWSPASCHA

SEQ ID NO: 25178 - protein, 463 aa, synthetic construct
MLEKIKRCALYIRVSTSEQCMHGKSLEAQRDYLEHYAKEHNMVIVGVYADEGKTARKELKKRKAIHALLEDVKAGKIDIILFWRLDRWFRNLSDFYKVQDILDAHGVSWMSASEPGINMETRDGRLQLNVVLSIGQNEVDTTSERIRFVNDASVRQGKLIFGDANMGFGYKSGIVDGVKRMIKDPETEEATEAFFKYLLSHQNKSATVKYMQKHYYPDFSYSMLRTMVSSEFYKGTYRGFPYCPAYVTEEEWNKLQSLSSKNVKSTPSGRIYLFTSLMRCPVCGQKLVGTGCSSIINRKTKEKRSYCYYRCNRAIIDHLCSNRHRVSQNLIEDYLLENLENEYKKYQIRYKKIREQKKKLRDTRTPEKLNKELDRLNLLFQKDRITWEYYAAEYDRIEKELKEISTALPEVEKDFTYLEELLRSDFKKIYEQLTPENRRAFWRSTIEEIHLNEDSTVKNVDFL

SEQ ID NO: 25179 - protein, 512 aa, synthetic construct
MQRAVIYARFSSDMQREESIDAQVRACKTYAKNKGYIVVDTYADEAKSGRDVTKRDAYNQMLADAMEDKFDVIIFHKIDRNSRNELNYFTFKDKLEKLGIRYEYAAQPIDALSPEGQMMETMMVGMAAYYSRNLAKETKKGLNENAYKALFNGGCPPLGYKIVDKKYVIDEQEAAAVRLIFELYLNGQGYAAICRELSAKGYTTKAGKAFAKNSLHDILCNEKYIGTYTFNKIPRKKGGRNSHAAERPEDFISIENAFPAIISKDDWALVRAKMDRNRHRAASYTAKEKYLLSGKVFCGHCGSAMVGHRIRKRYCYYGCTRKEQTPTSKCPQKMIRAEVLEHWVLQILERVVFTVGGMRRIADAIVDAYEAEQKEQAASQATLLQRKAVAEKKLNNLYKIFEEGNADEFDRQRLNQIKAELREINKSICETSVKPAKLLSKQKIAAILAAMKDEIFVKKNSYYVQQAVDLLVDHVTITDKVLNITLSTQNVCAYLVPRTGIEPVRVSLPEGF

SEQ ID NO: 25180 - protein, 581 aa, synthetic construct
MARKKKSNTFPATKDKAALYIRVSTVYQIDKDSLKVQERELIHYTQLVLNMNDYEIFRDAGYSAKNTDRPDYQKMMQKLRTGEFSHLVVWKIDRISRNLLDFAEMYAELKDLGVTFVSKNEQFDTSSAIGEAMLKIILVFAELERQMTSERVTAVMISRAESGSWNGGKVPLGYTYDKETKSFGIHPEQAEVVKLIYDSYERMQSSTAVAKFLNEKGITTKAGNKWNPSTVCLILRNPVYKGTMVYNKRHISVTGKLKPEDEWVTVEEHHAAIISAEQFERCHTLLKKNMIGSDRSTYFRGNCHVLAGLLFCDYCGSMMAAQIGKPLKSKGGIIPSNYSCYNKRHGLCENPFTSDSTLGPFILNYVANMYRIQRTFGKTTSIETLEKKLLRGEAFKEVDHIEAKGLTQLYQALKAHVFADNSVFYEPNLPEHEATPNQRAIYLSEKASHERALHRLHQLFMYSDSDMSETDYFTGKNKLEAKINDIAQKLAQLESEKNSDVSSEYFSALVSNFILENNLNEERYIDYFALKKKIDPMELKLFLNAVLSKCFIRQGRVASIIFQNGYEHRFIYKDKEAKKNA

SEQ ID NO: 25181 - protein, 436 aa, synthetic construct
MLIEECMAGKIDMVITKSISRFARNTLDCLKYIRQLKDKNIPVFFEKENINMMDSKGEILLTIMASLAQQESQSLSQNVKLGLQFRYQQGLVQVNHNRFLGYTKDEEGMLVIEPEEAEIVKRIYREYLEGASLLQIGKGLEADGILTAAGKAQWRPITLQKILRNEKYIGDALLQKTYTVDFLSKKRVKNNGIVPQYYVEGSHEAIIPRDLYMQVQEEMARRANLHSGSDRKKRVYSSKYALSSIVYCPKCGDIYRRIAWNNRGKHSTVWRCCTRVEHGPKACDAPTIQESDLQDAVMRAINGVLGGREVFLPLLEENIEAVIGYGVDDEIAEIDCRLAEQQKELLKLANVKKDYSKVADEIDRLREERQNILTREADREGRRQRIEEMKDFLQEQADTPLEYDEQLVRRLIEKVTMYENKAVVEFKSGLETNVEL

SEQ ID NO: 25182 - protein, 520 aa, synthetic construct
MKRITKIRANETPVQKKKLKVAAYCRVSTASDEQLISLEAQKAHYENYIRSNDEWEYVGLYYDEGITGTKKDVRSGLLSMIDACEDGKIDFIITKSISRFARNTTDCLAMVRRLLELGIYIYFEKENINTGSMESELMLSILSSLAESESVSISENSKWSVQKRFQNGTFIISYPPYGYDNDNGTMVIVPEQAEVVKEIFASCLAGKGTHAIAKELNARGLKTKKNGKWGAGAVKAILTNEKYTGDVIFQKTYSDSSFNRHVNYGERDRFFCENHHEPIISHEDFDKVRAVLDQRAMEKGNGTDTYRYQNRYCFSGKIKCGECGGTFKRRQHYKPSGDYVAWTCSTHLESKADCSMLYISDDGIKLAFLTMMNKLVYGHNAILKPLLRNLRGMDDKDRLLRIQELEIQLEGNIDKKQILTNLMATGVLEPAVFNKENNALVAEEQRLRAEKEKLVSFVGGDKVRMKELQKLMAFTSKGEMLTEFSDEMFLEFVDSITVESRKKIVFHLKCGLNLAERLVM

SEQ ID NO: 25183 - protein, 523 aa, synthetic construct
MQQTKNITVIPARRRVGNTAKESEVPKLRVAAYCRVSTDSDEQATSYEAQVEHYTDYIRKNPEWEFAGIFADDGITGTNTKKREEFNRMIDEAMAGKIDMIVTKSISRFARNTLDCLKYIRQLKEKNIPVYFEKENINTMDAKGEVLLTIMASLAQQESQSLSQNVKLGFQYRYQQGQITVNHNRFLGFTKDENGQLIVDPDEAVVVKRIFREYLEGASLQQIARGLEADGILTGAGKTKWRAETLQKILKNEKYIGDALLQKTYTVDFLEKKRVPNNGLVPQYYVENSHEAIIPRDLYMQVQEEMIRRSNLHSGQNRKKRVYSSKYALSSIVYCSKCGEIYRRVVWNNRGNKSVVWRCCTRMENGPGTCDADAIHESELQSLVIRAINRVLARKDTMNEALQKNVEAVLTGADGIPLAEIDGRLEELQKELLKVANSKGNYDSIADEIYRLREARQSVLVDNAEREGVKQRISEMQQFLAEQTQDITEYDEQLVRSLIEKITVYEEKVTVEFKSGTSLDVRR

SEQ ID NO: 25184 - protein, 573 aa, synthetic construct
MAYNAQNKTGARVAIYVRVSTLHQIDRDSLPMQKQDLLAYAKLMLNTDDCVIFEDAGYSGKNTDRPKFQEMMSQMRAGAFTHLLVWKIDRISRNLLDFATMYNELKALGVTFVSKNEQFDTSTAMGEAMLKIILVFAELERNMTSERVTATMISRANNGLWNGGRIPFGYDYDYETHEFSVNEEESKVVILMHDMYEQERSLVRVVRELNERGYRSRAGNLWSPVSLLIILRNVFYCGDYRYNMLKEGDRQKVKDESEWVTVENHHVAIIPKDQKERIMATLDSNSKLCKQRNIYKSSKHTHVFGGLIYCGSCGKPLGSTPGNLTRDGWHYSKYTCPTRRKSVTLCTGKSTSDPIIGEFVFNYILNMLNAQNDFDKISSPEELEKLLLIGDTFAYIDHIESNGLNDLFNVLSSGTVNGAVFGKGASLPTKKATVEPEVARLRNEKQKTERALDRLRSLYLYADEAMSEAEYMIQKNKLEETLEDINDQIGMMNTDSWQQSVSDEEFIQRASEFIIAQKLSGRKYVNYKRLAMSVDSEVLKNFVVSIIDSITIQDGLVSNIVFKNGLCHTFIFR

SEQ ID NO: 25185 - protein, 525 aa, synthetic construct
MNFCCYGRKSVYSDHSDSVDNQFRMCREYADLKYSGQVDSFLEYSDEDFTGANTNRPDLQRLLADIKAGGVDILIVYQLDRLSRDVRDFANIYATLEEQRVKFISIKENIDTSTPIGRAMMYVTVVFAQMERETIAARVTDNMIGLAKKGYWTGGNPPTGYVRDRIVVDGKKHCTIVPEPEGVRYITWIYDTFLQWNCSLQGMETRFKNQGIRTQNGKFFSTTQLYKILTMPYCVEATPEVYDFYQAKGCIMDPDSPREKWDGSVGVMIYGRSTEKNKKHQLQPPELWRVCLGIHKPFMPAEKWLAVQARFTSNKCIKDAKWPVPLLKGVLRCKCGSLMQVSRKQKVDGSVSSWYYCRKRMRQGADVCDMSMIKCEALDEKVLEVFKSIQADKTTIYRFAKAKKKDDFSGTDPAAASARVKTCEDKIEKLTASLALASGSTAMKYIVAELERLDLELQALKREQAIALSEDRKRSAAQQSIQERARAISEKLKNFDEFTATEKNAIAREVLKKCTWDGESLFIEL

SEQ ID NO: 25186 - protein, 487 aa, synthetic construct
MPEALNAVIYARYSSDRQTEQSIEGQLRECYAFAKANDIAVIDTYIDRAISGKTDNRPAFQKMIEDSAKRQFQAVIVYRLDRFTRNRYDSAIYKARLKKNGVKVLSAMENLNGSPESIIMESLLEGMAEYYSVELSQKITRGMRENALKGKALGGQRVLGYKVNSDCYFEIDETTAPVVVDIFKLYSSGKTVKEICDILNARGVKTARGGAFNKNSLHTILTNKKYIGIYKTKYGEIVGGIPAIIDKELFEMVALRMEQNKKAPARAKAEINYLLSTKLFCGKCRSAMVGESGTSKTGKKYYYYACVKKKREKACDKSNVKKDWIEDLVIQRTVTDILKDDVIEKIADRLVELQKAEAAESGTMLYLENSLAEIQVSIKNIMTAIEKGIITESTKTRLTELEDEKRNVEIEIAKESIARRIISREQIIYWISSFKDGDITSEKYCQQLIDTFVHAVFVYDDKIVITYNYSGENNTATISDLDLSSPP

SEQ ID NO: 25187 - protein, 516 aa, synthetic construct
MQRAVIYARYSPGPNQTEQSIEGQVRECTKYAEQHDLRIIGTYVDRKISGKTDNRREFQRMIDDSEKHIFDVIILYHTDRFARNRYDSAIYKHKLKENGVELRYATTDIPKGPEGIILESIMEGWAEYYSAELSRKIKRGMRESALKCHSTGAGRCLGYRTAEDKSLVIEPEGAKAVQTVFDMYIKGKSHADICRYLNDCGFRTAQGKLFNKNSVTHIIRNKRYIGVYTYDDITIEDGIPAIISKDTFHLAQLEAARRKTVKRPKEPKAEYLLSGKAFCGHCQKPLVGVSGTGKSGNKWYYYYCQESRAKRGCTKRPVKRDWLEREVVKRTIAEVLQPEVIQHIAKKCYDLQMEYRQDNSDVLFYELKLKDVRKAIKNTMHAIESGVKTKTLPARLQELENEEEALEAELAIAKASDFVITADQIEFLLTQFAEPWECESEEEYHRRIIKCFVHKVFLFDDKLLIHYNVSRDGKTREQSEAELLEEALGEGFDKRSSGSTKRNGHDVSSCPFLLAV

SEQ ID NO: 25188 - protein, 525 aa, synthetic construct
MARAVTVIPPTIQPITHLARNAVVRRRVAAYARVSTSSEEQLTSYEAQVDYYTRFIQSKPEWEFVKVYTDEGISAVNTKKREGFNRMVRDALDGKIDLIVTKSVSRFARNTVDSLVTVRKLKEKGVEVYFEKENIYTLDSKGELLITIMSSLAQEESRSISENVTWGQRKRFADGKVSLPYSHFLGYRKGADGLPEIVPEEAETVRWIYSLFLGGKTTSSIASFLTKEGIPTPAGKKRWAASTVESILKNEKYKGDALLQKAFTVDFLTKKQKKNEGEVPQYYVENSHPAIIAPAEWKLVQRELERRKAIGRSYSGNSIFSSRLVCGDCGGYFGSKVWHSTDKYRRTIWRCNSKFAGEEKCRTPHLTEEDIKARFLDAFNTLVTDKARLLDECRTMQAALTDTGSLDSEIATLLSEMEVVAELTKRCIDENSTTAQDQAAYLERYNGLAERYESTKAKLEKLRAVKAKREAKAEDIGGFMFELAEYGNRITEFDDRLWLTVIDIVTVHRDGQLTFKFQTGHEITV

SEQ ID NO: 25189 - protein, 438 aa, synthetic construct
MARTIQQISFPAPMRPSLKRVAAYARVSSGKDAMLHSLSAQVSYYSALIQKHTGWLYCGVYADEAFTGTKDSREGFQDLLAECRAGNIDMVITKSISRFARNTVTLLETVRELKALGIDVYFEEQNIHTMSADGELMMTILASYAQEESRSASENQKWRIRHGFERGELVNLRFLFGYKIEKGQVEVDPEKAEIVREVFRRALEGESLSSLATDLNRRGFTGVLGGRWNAMRIREMLSNEKYLGNALLQKQYRNNHLEKKEIPNRGELPQYYAEGTHEAIIDRATFDAAQRLLAKLRESTPVRSPWKKSAFTSMITCAVCGRKYKRCTCGKRHFWNCPTAVQTDLPSCGTSQIPEKLLYDLAAQVLGLTQFDEPVFREKVKSIDALQDKTLVFHFYDGSTVARHWEHTSRAKSWTPEMKEKARQRALAQRRGEKWQER

SEQ ID NO: 25190 - protein, 524 aa, synthetic construct
MAKTITRIPASVNRYTAKPIAEKTKRRVAGYARVSTEHEEQATSYEAQMDYYTNYITSRDDWIFVGMYSDEGITATNTKRREGFNQMIEDALAGKIDLIITKSVSRFARNTVDSLTTVRELKEKGVEIYFEKENIWTLDAKGELLITIMSSLAQEESRSISENTTWGKRKMFADGRASIGFKHFLGYDRGPDGEFIINEEQAVTVRYIYKRYLEGYSTYKIACELTEMGVKTPAGKDKWHPSSVMSILQNEKYKGDALLQKTFTKDFLTHKLVVNNGEVPQYYVEGHHEGIVTADQFDQVQAEILRRKGMQKYSGVGLFSSIIKCGECGSWYGAKVWHSNDKYRKVIYRCNNKYADGCKCKTPHINEDELKELFIKAANELFSEREEILANTKVMMEMVCETDSLDRDLQDSITELNIISEQMQIAIAENSRVALDQDEYEKRYAELTARYEKAKAKYDDIAEQIESKKAKRELFKGFIRTLEKQDGLMEDFDAGIWSSLVQEVIVKTKDDIRFIFKNGFEVRV

SEQ ID NO: 25191 - protein, 620 aa, synthetic construct
MSSEKIIVLYERLSREDENLGESYSISNQKKLLEDYCREKGWTRFRHFTDDGISGTTFDRPSFKAMIQLVEDGEVETIILKDMSRLGRDYLVVGQLREFFRKKGVRLIAINDNHDSYNGDDDFLVFRDVMNEMYAKDISKKIKSTFKSKGKSGKHVASVTPYGYLKDENDGNHWIVDEEAAEIVRLIFKWTIDGLGPYQIAKLLQEKKVEIPAVHMARFGQGNNRNKKVKDPYGWGSSTVVGILKKREYLGHTVNFKTQKHFKDKKSHYVSEDNWVIFENTQEPIIDQQTFDTVQKLRENVRRYPDGWGEHHVLTGLMYCADCGAKMYVHRTSNGKRIAQYTCSAYTKVPCGTLCKTQHRINESVVLELIGDTLRAIFEYAKYDRSEFIDTITMAQSTQEDAEVKKVRARIAVAGNRCEELEKLICRIYEDNILGKLPDSRYEVLDKQYAREKAELDAEIKELEAKLTEYEKSRNSAGKFIALIDKYEKFEELTPAMVNEFVDKVLVHERDRKGSIQTTQEIEIYFNFVGRYVPPAMMTEPTAEEQAEIDRINRIKDRRHQQYLRRKESGWQRKYEERVKNEKRAKMQAMKEEIRRQDRENGVYATAGSLALEPTIGMPE

SEQ ID NO: 25192 - protein, 525 aa, synthetic construct
MVRIASYLRKSVYSDKSDSIQAQYTLISDYCNSHYTDFELYRYEDEGFTGANTNRPAFQKLTSDISERKIDILICYKIDRVSRDVKDFSNFFSFLQENKVEFVSIKEQIDTSTPLGRAMMYICSVFAQMERETIAQRVKDSLSELSKSGKWAGGRAPLGYRRERVVEMNGKNHTVLVPDPDGIQLLNLISDKFLEQNMTIVKLDGYCRKNNIKTATGSYFSSSQLWNVLKNPTYCTADSTAYDYFESLGCTMAVDRDRFDGSHAIMPYNRTRGGKTKKHVVNPINEWIISVGLHEPLFTSEKYIAIQSKFGKNVIDKTRKHKVGILHGIVKCSCGWNMRAKHKVLKSTGKTYDNYFCSQRENRGKDACSMPYVRVETLDSAVIDLLKQIKLDKKMIDNYCFDDTSISIHRRNRADVQRDIGRIENKILNLTNTLSNTSGSSAAKYIVSEIEKLDRELSGYKYELMEIGADEKKHAHFQHTKEDKYKMICDIVDNLDRLEYDEIRTLLKDLFKECVWDGAVLHVKL

SEQ ID NO: 25193 - protein, 510 aa, synthetic construct
MQKRRTKYANSQGDNAVIYARYSSHNQKDTSIEQQIEVCTKYARDNGYRITNIYADRAISGKTDARPQFRLMMQDAREHKFDVVISWKSSRLGRDMLDAMTNDIILRNLGIKCFYTEENFDDTAAGRFALRNMMNVNQFYIENMAEDILRGMRDNAKKCRVNNGSPPLGYRRGDDGKYEIVPEEAETVREIFTKVLAGMAFVDIANELNARGIKTKKGAPWGRSSFSRLLSNERYIGTYKWSDIVIENGMPAIIDREVFEMAQKKIKGERPLRRRHNENGDYLLTGKLFCGKCDSPMTGMSGTSKSGAKHHYYACYSARKDGSCDKKAVKRDWVEKTVALFIKEHVLRDEVIEWMVDQYMVYQKATFESQRIMEMRNQLKDVQLQLDNLVDAIARGMYTDSTKDKLLKLEADKKEIEQDIRLATYNLKEYDREHVRCYFLSFKEGSVESKDYLKRLFDQFVTKIYLYDDEIRIAFSGTKDDSPVSFKIIDEAEELAVSSVRLSSASSHHT

SEQ ID NO: 25194 - protein, 498 aa, synthetic construct
MEIQIREGNSIQKRKLKVCAYCRVSTDADEQENSLENQIRHYEEAITSNPDYEYAGVYSDFAISGFKEKRPGLQKMLADAQKGKIDLILTKSVSRFARNTSIVLEATRKLKELNVGVFFELQNINTLSGEGELMLTILAAFAQAESESGSVGAKMVYQRKYEAGIPVQYLERSFGFKKDERGVYIADEEEAVWVRKIYEMAADGYTPASIKRYLNENGVKTVGGAEWIDSTVFRLIENEIYKGDYIMHKHFVNEERKLVRNRGEVDAWYIEDDHEAIVSPELWQKAQDAIEAKRDYLAEGSVIEEFTEDNYPYMNRIFCAKCGHPLYRRIYSNGNRLNWGCSGTKRHGKSFCEGINIPDGVLRKAWHFDGNMYIDEKPSVKGTKEFTYLKESSWKRRHKKKVPEAIPENTEEAYPYRKKIFCGLCGSRLVRHVNPKSHKVIWICNGAKRKGVAFCRGTRIPDSVIRGWGEIKKDIYIQRKDDKNGKKRYSYTSKKPTA

SEQ ID NO: 25195 - protein, 586 aa, synthetic construct
MRCVAYCRVSTDDKEQLTSFKNQREYYLKLFSEDNEYEPVKCGMLYRKGQDPEHNEDGIFADEGISGTKLKNREAFNRMLELARQHMFDLILVKDITRYSRSIVDGIGTLKTLKGYGVDVLFQENGLYFSKNEDIISILMSIGQSESALKSKAIKFGQRRLREKGGWCSSDVFGYDRKGGYLHVNEQEAETVRRIFDMYLNARMGTSKIAKRLNMEGISTKRNSKWRDTTITRMLKNTTYIGKLVTNQRTNTDINMCSNKALGTNFIKPVDENEWIISECPHLQIVDTALFEAVQAEIARRKEAYTFTENTGSIKCTKHNMTDKLLSGLFVCGHCGSTYVRKQRGRGEALERLGYYWTCRNRDKGGMCEHRYMFLESDLIELLRRKIEEMKRTDFSSEFEAYLSLYHNYSPERLSEIEQERELMKRRIDKNFELYSDDSISKEDFQRRDREYKNRERELTQEYDAIINHRAIRKMKEAEYQEYLQCIRDIDLNLLTNKALKTIFRRIVIKSYGRSASAASDTTLIAAEFDFNFMGKSINSLLDDIDNSMCENTEKQELFQKIRYCNFTCIPFKRRGKKFVPDFSSM

SEQ ID NO: 25196 - protein, 513 aa, synthetic construct
MYLVAYARYSSDNQREESITAQLRAIHNWANANGHVIVKEYVDEALSARTDKRPNFLKMIEDSKIEDWNGVVVHKLDRFSRNRYNSAVYKKTLKDNNKKLFSVLEKLDDSPESIIMEAMLEGLSEYYSANLAREVKKGLTENALDCKHNGGIPPLGYSVKDSHYVVDKRESEIIKLIFNMYKTNHSYVEICSELNLRGYKTKRNKNFSKNSIHDILVNEKYIGNYTFGYGNRAKKRGQPNPDMIKIEGGMPAIIDKDTFFIVQEKMKGRKHMGGSYKAKQVYLLSGLIKCGICNEKYVGARKNKYWSVYECSGHKKGMCENKAIKKEEIEKIVVDELKVKINGLFNNVELLEKVNTKYKELYNDTENNLKIEEEKLSNVQTQINNINNAILDGFYSPEMKDKMKLLQSEKEFIERSIYLIRNISEKDEITSADINNILNTDLLKLESDNLNSIKEIIQKYIKEIIITPENINIKVVLDNTNITGDRDVCGSPPPKFEKRAAIILNLAVLFFFI

SEQ ID NO: 25197 - protein, 502 aa, synthetic construct
MEIQIREGNSIQKRKLKVCAYCRVSTDADEQENSLENQIRHYEEAITSNPDYEYAGVYSDFAISGFKEKRPGLQKMLADAQKGKIDLILTKSVSRFARNTSIVLEATRKLKELNVGVFFELQNINTLSGEGELMLTILAAFAQAESESGSVGAKMVYQRKYEAGIPVQYLERSFGFKKDERGVYIADEEEAVWVRKIYEMAADGYTPASIKRYLNENGVKTVGGAEWIDSTVFRLIENEIYKGDYIMHKHFVNEERKLVRNRGEVDAWYIEDDHEAIVSPELWQRAQDALEAKRDYLAEGSVIEEFTEDNYPYMNRIYCARCGHPLYKRIYSNGNRLNWGCSGTKRYGKSFCEGINIPDGVLRGAWHFDENMYIGEKQTDKGKKEFTYLKEASWKRRHKKKEQEPIPENTETEYPYREKIFCGLCGSRLVRHVNTKNHKVIWVCNGRKRKGKDFCDGTRVPDTIIKGWGEIKKDIYIQRKDDKNGKKRYSYTSKKPKGADRA

SEQ ID NO: 25198 - protein, 516 aa, synthetic construct
MARKKKVSPGNRLVAYYRYSGGSQQTEQSIEGQRRDCEAYARQHGLTIVHEYIDRHISGRGVESRLAFQQMIADSSKHLFDLVICWKTDRFARNRYDSAVYKKKLRDNGVRILYAAESSVEGPEGIILEGLMESLAEYYSAELAQKMRRGMRESALKGRAINPSRPLGLTTDEHKRFIIDEKNAPTIRFIFEHYAAGESSASIVEQLNAAGLRTSKGNAFNKCSIPRIIQNEAYHGVYICKAYDVRIDGAIPAIIDDDLWKRAQKMLTLNKQHRAPHSSHADYLLSGKLFCGCCHSLMRGISGHNCRNDVYYYYACGNKADGGTCKKKNIPKDVAENLVVNAICENVLRPDTLEDLADAIAAAQQADVNQPDPERAMLEQNLADVHRKINNIIESIENGTASSRLSARLADLEQQESTLNYQLESLKEIHPPVLDRERILFLLEQFLISPNERTEDYNRRIIDTFVNRIEITDTEMLIYFNLSEASASEKQKNSQPNSCSTGNHLVRVARIELTAS

SEQ ID NO: 25199 - protein, 526 aa, synthetic construct
MPKVTMIPATINPLTHLPKVAAQKRRVAGYARVSTDSDEQFTSYEAQVDYYTKFIQSKPEWDFVKVYTDEGISGCNTKKRDGFNSMVSDALAGKIDLIVTKSVSRFARNTVDSLVTIRKLKENGVECYFEKEGIFTFDGKGELLITIMSSLAQEESRSISENITWGQRKSFADGKVHLAYKRFLGYEKGEDGRPTIVESEAKVVQLIYRLFLDGKSQAAICRCLENLGIPSPGGKDKWSKTTVTSILQNEKYKGDALLQKSFTVDFLEKRMKPNEGEVPQYYVEGSHPAIVDPDEWDHVQTEFARRKALGKAYSGKSVLSAKLVCEDCGGFFGSKVWHSTDRYRRTIWQCNSKFKVEERCHTPTINTETVQRLFTQAYNRMMENREQIIKDCETMRRALTDFAELDAEIERQLEETQVVAELVKAAVKENASTAQSQEAYLRKYEALTERYEKAAAELERLQNLRTTQSQQDKAMALYIRTLKKQPVVLREWSDTIWTVMVEKAIVHRNGAITFVFKNGTEVKVGE

SEQ ID NO: 25200 - protein, 525 aa, synthetic construct
MWMLPQMSVDDIIMYLRKSRTDDPALTVQEVLSKHEQMLDDWVARNIPDDGRRIPESNRYREVVSGETIESRPCVQEVLRRVESPRVKAVLVVEPQRLSRGDLEDIGRLVKLLRYSNTIVITLQYTYDLRDERDRDMFERELKRGNEFLEYQKRIMGNGRLLSVQNGNFIGQKPPYGYNKVVIKEGKRKCHTLEPDPERAPIVKMVFEMYAGGTSASQIAKTLRTMGVTTADGGKWVTSSVKQMLTNDHYIGMVHWNKRKTVKVVEDGEVVATRPRNSDFLVYPGKHQPIIEKELWDAVQAIKGNIPPIKNRAKYANPFAGLVVCQCGGKMVRQQYVRDGVERCAPRLVCPNQAECHTASCSLPEFTEAVIEALEKGIKNFELMMADAPEDDATQQERLIAQLEKRLAELDRLELAQWDKYTQEAMPKHVFDALNKKVVQEKEETLQALKTAMETVPIRVDYEKKRETFAAAVRTLQDPDASVKEKNLLLKQCIERINYNRKPKESDNRRFGNPEPLELEFQFKV

SEQ ID NO: 25201 - protein, 503 aa, synthetic construct
MSKIHKIEAMIPKQIEKKKVAAYARVSALTEMTQYSFSAQVNYYSALIQKNPNWKYVGVYADKGITGRSIKKRKEFNRLIDDCNNGKIDLILTKSVSRFARDTVDTLNTIRHLKNIGVDVYFEKENIHSISQEGELLLTFLAAYAQAESENTSENIKWGIRKGFKVGKPNGYKAPYGYKWNGNSYSIVPEQGAIVKEIYKRYLDGEPAYSIAKALKKRGIKGQTGIPMDDSTIRYIVSNISYTGTLLLQKWFFTQNYVRKENKGELPMYAVENMFEPLISKEDFQKALQIKKERAEAMPNKNPRLTAFSGIVKCGNCGCSVCRRTTRYGKKWVCNAKDRKGMAACDFRDIYEIELEAAATKALAVNEFKEDLVRREVKLITIDNAYIVFNLKDGKKKQILRTYTKGYSGFSCRLFCGNCRKMLEADSRTLSINGQKKRYKIWCCRKCPGQREFDDVIRKATQSLFNEPQCEGLFAQNIEKAIIYNDRIDFYFKEGKVITWEKE

SEQ ID NO: 25202 - protein, 500 aa, synthetic construct
MNTVIYARYSAGPRQTDQSIEGQLRVCTDFCKQRGLTVIDTYCDRHISGRTDERPEFQRLIADAKRKKFEAVVVYKTDRFARNKYDSAVYKRELKRNGIQIFYAAEAIPDGPEGIILESLMEGLAEYYSAELAQKIKRGMHESALKCQSTGSGRPLGYRVDEQKHFQIDPESAQTVQTIFEQYIKGESNAAICELLNSRGLRTAQGKPFNKNSINRIIKNRKYIGEYRYHDIVVEGGMPAIISKDTFNLAQAEMERRRTRKAPKSPKAEYLLAGRLFCGHCKGPMQGVSGTGKSGNKWYYYYCGNTRGKNKTCDKKQVSRDCLERAVVDFTVRYILQEEVLEELARKVHAAQERQNDTASEIAFYEKKLADNKKSIANVLRAIESGAATQTLPARLQELENEQAVILGELSFLKGKCLAFTEDQILFALTKHLEPYPGESEQNYRRRIISDFVSEVYLYDDRLLIYFNISSEDGKLKSADLSNIEGGEFDEGLVSSTKTI

SEQ ID NO: 25203 - protein, 519 aa, synthetic construct
MKKVTKIDKIQPAKNAENKLRVAAYCRVSTATDAQLESLEAQKNHYENYINSRDDWCFAGVYYDEGITGTKASKRPELMRLLADCKAKKIDFVITKSISRFSRNTMDCLEIVRTLLNLNIPVYFEKENINTGSMESELFLSVLSTMAEGESASISSNNRWSIKKRFENGTYRLSSAPYGYKLESGGLQVVSEQADIVKRIFRELLSGKGMYSIAKELNAEQVPTQKGGRWTSTSVHNILTNEKYTGDCIFQKTYADSNFNRHTNNGELNRYLIQNHHEAIISHEDFNATAVLIEQRAAEKGIESGSDKYQQRYAFSEKLICGECGNTFRRRIHKGKYNSYVAWVCNTHLSDTNRCSMLFVRDDALKLAFATMLNKLIFSYRLLLKPYLAAMQSNTADEALLRIQYLENQLDQNAEQRSTLHKLMAQGYIDQILYTQESNELLLQARDFRSEIEALNNTVAGDTTKVYETERLINYCKRGEMLTDFNESLFELFVDHILIYSRQKIGFVLRCGLTFEEMI

SEQ ID NO: 25204 - protein, 484 aa, synthetic construct
MRQGAVYIRVSTDDQTEYSPDAQLKRIKEYAQNHDILISQEYIYIENGVSGRTVAKREQFKKMIQKAKEKPKPFDIVLIHAYDRFARNVKESRIYKELLRDDLGIELISITEDFGSGKNSFLMEGIKDILNEYYSLNLRDEVLKGMYEKVSRGEVCGKAVLGYNLINKKLIINEEEAKTIKLIFNKYAYDNLGLLDIAKLVNQMGLKTKTGNKFENRTIKYILRNPVYIGKLRYSKKGKVDYHTYAVIKEEELYDGIHERIIDEETWNTVQKRLDKNILFSIPHKIDTINADYWLKGIVRCPYCNCTMIRHQKVNLRCNGYGKGKCHNKNTINLKFLEKLVLNQMKQDFDGKKISLNTIKIKSNECNERDIIIRQINNTEAKFARIKEAYVDGIDTLEEYKKNKEIISREISILKERLDKIEKPKEVPKDNLKLKIKDIYDLLTNEKVEMSVKKNAVHMLINKIVIDEKNMKILLTYNESPFWN

SEQ ID NO: 25205 - protein, 554 aa, synthetic construct
MEKSKRVVGYARVSTEAQDITRQVELITAYCTERNYHLIKIIQEKISGARKDRKSLNELLEVDDTVADMIIVSELSRLSREDDILSVLSTINELLKQGVDILFLDKQDRIYKAGTVLSLYDIITLSVEAKASADERYKIAGRMQTGLRSKLAEFTNMFTGGTVPFGYKVIHNPDYKLNLTPKNLLVVDAQEAEAVKYLFQQLIDGNTIRQTVRVYNKLYPYKLSYSGICRIIRNPKYKGEIYRRGKLYGQISELQIISPEDFDKANKQMRENELFQSNAPKYYNPLKGLLFCPCGCGLYMKPNHNSYLIYRCSSAYNDKQKCENYGIKCAYILSSVWTCVKETLHTEEYKRFNTERANELQGINKQIRETITRKVNNVDELKTQSASLIAKIKKLNNDDLINELETDYNGLCKQIKQTEQEISELNGQIAENDAEIKRSVEQKDFSEMEQSALYKEKLQKVVYHSLSAMRGILEIVFKNGMIRYVLIKKHRNGGVFLLPEFWTVDISRAVIIVPTHPSVDPEHPYTLLPTIPREYTFDAIITERDMDEYRITVS

SEQ ID NO: 25206 - protein, 535 aa, synthetic construct
MAKKKKPAGGNAIIYARYSSHNQRDVSIEQQIEACRKHAAELGLTITDTYEDRAISGRTDNRPAFQRMMRDAEDGKFQYVLAWKSNRMGRNMMQAMVNESRLMDCGVKVFYAEEDFDDSAAGRFALRSMMNVNQFYSDNLAEDVRRGLMDNASKCMANGRQPLGYKRGEDGKVVVDEPAAAIVREIYTRIASGEMFMDIARDLNRRGIKTQSGSEWNKSSFKVLCRNERYRGIYIYGDTRIEGGIPPIVDDVLWYKVQEVLKVKKSKNRHHCPSDEDYLLTGKLRCGKCGGYMIGMSGRSKTGDVHHYYACQNRRVGHTCDKKNIRRDVIEPAVAQAIKQYCLTDDAIEWITDQTIAYWEDEDRKLQIDSIENDLSAVQSSISNVMKAIEMGVITETTRDRLIELERQQTDLKSKLALAKEEIVHVDRKDLISSLLAFRHGNVHDRAYQEKLFNAFLIAVYVYDDDHLKLVFNSFGKDDTVNIALDLGENDDNSGLSDVSKSSPILSNGQPEQSHLRKLRWLFCLYDSARKNYYR

SEQ ID NO: 25207 - protein, 478 aa, synthetic construct
MNKVALYVRVSTTSQLEEGYSIEEQKAKLESYCDIKDWHVYKVYTDGGFSGSTTERPALEQLIKDAQSKLFDTVLVYKLDRLSRSQKDTLYLIEDIFLKNNIEFVSLLENFDTSTPFGRAVIGLLSVFAQLEREQIKERMQLGKLGRAKAGKSMMWAKTSYGYNYDKETGSMTVNEYEALAVKEIYASYLAGMSITKLRDKINEEYPKQPAWSYRTIRGILANPVYCGLNQYKGQTFQGTHKPIISLVDFEQTQRELAKRQQTARELSNPRPFQAKYMLSGLAQCGYCHAPLKVILGAVRKDGTRFKRYECYQRHPRKTRGVTVYNDNKKCESGYYDMELLEHYVLTRIAQLQNDPDKIKELFSDDASPAVDRQAIQKQIDSLTLKLSKLNDLYLDDRITLDELRSKSADFIKQRSSLEAEIKKASNDEQAGQREKIEKLLDASSVLDMSYDNQKVIVRELIDKVQVTSDKIVIRWKI

SEQ ID NO: 25208 - protein, 480 aa, synthetic construct
MATHKVAIYVRVSTTSQVDEGYSIDEQKAKLTSYCDIKDWNIYEIYTDGGFSGSNTERPALEQLIRDAKRKLFDTVLVYKLDRLSRSQKDTLYLIEDVFLENNIEFVSLLENFDTSTPFGKAMIGLLSVFAQLEREQIKERMQLGKLGRAKSGKSMQWAKTSYGYDYVKETGTLSVNPYQALIVRKMFEWYLSGMSITKLRDALNEQYGQDKEWNYRTVRVILSNPVYCGYNQFKGQIFPGTHEAIISVDDFNKTQEEIKTRQRTAAQRFNPRPFQAKYMLSGIAQCGYCSAPLAIKLGMKRKDGTRLVKYECKQRHPRKTKGVTVYNNNEKCDSGFYFKDDIEHFVLTEISKLQTDSDYIDKLFSNTDKETIDRDSYQKQIDNLTAKISRLNDLYIDDRISLEELQKRSSDFMAKRAALEKELDTDTSLKAVERKEDVRRVLDTKDIFTLDYEQQKAIARALISKVRVTSESIVILWKL

SEQ ID NO: 25209 - protein, 515 aa, synthetic construct
MYLRKSRKDIEAEKHGEGETLKRHFEMLMSLANRLKIIIREDAIYKEIVSGDTIASRPVMQQLLADIETGKWDGVLVVEVERLARGDTIDQGIVAQTFKYSNTKIITPMKIYNPNDEGDEEYFEFGLFMARREYKKIRQRMQNGRVASVQEGKFVGNVAPYGFSRKKIKGDKGFILVENPEEADTLKLIFELYANLNYSYNRIADHLNSLGIKPRHAKNWTVATIRDILHNETYRGILHWGARKNVKVIKKGIVTMTRPRNKGDYTVSQGLHTPLISQELWEKVLERHRVTAPKCPHKTALQNPLAGIVICGKCGGKMQRRPYKDRQPSLICTNRKCDNISSDLEIIERKIIEALKEWLGDVAINFEKVEEENALQVKALERALAKTKVELEKAELKLKRVCECYEEKTYTREVYLQRSQTVSEEIRKFREDVVNQEKELEETRVKYKSEEDFVPQAQYVLDTYYMTNDPEERNRMLKNILEKVVYTKTERAIRKDSDPTNFVIELYPKISKIDS

SEQ ID NO: 25210 - protein, 538 aa, synthetic construct
MAKKVTVIPSVSESLHTQMKPRLRVCGYARVSTASMAQADSYAAQVEYYTKKIQSNPLWEFAGVYADEGITGTKAKDRDDFKAMIAACEDGDIDLILTKSITRFARNTVECIQTIRKLKAIGVGITFEKENINTLEEKSELLLTIMASVAQGESEDFSGNNHWAVISRFEKGTFIVGTPAYGYRKDEDGNLMIEEKEAEVVRFIFESYLNGTGTYLISKMLNEQNIPTIRESEQWQDSVIKEILKNPVYEGDALRQRTYTEKQFPFVRRGNTGQMPMYLTRDAHPAIVTHEEAEAVRSIMEYRSRTLHMGGEKCQNRYLFSSRIICGECGSHFRRQKIYIGKPYEKIIWTCHRHVEDKESCKMKAIREDMLQQAFITMWNKLYTNQGTVLEPLLKALTGLVANQPDTEEMEQLDREINSLSEQSRILNQVMKKGYMDSALFMEKNNLLAHRLTECRRKKTLLARKQKRTKEIVRTEQLMGLLKKEGYQKEFNEELFDLTVKEIRISLTHEITFCLHNGLRLTEEEGGDADAVAYTNRV

SEQ ID NO: 25211 - protein, 546 aa, synthetic construct
MPATAVPKKVSMIPAKPQYDRSIKLSEKKLRVAAYCRVSTELEEQESSYEAQVEYYTRKIQETENWKLAGIYADDGKSATNTKKRDDFKAMIKDAESGKIDMILTKSVSRFARNTVDSLLTIRKLKEKNVAVVFEKEGVNTLDGTGEILITILSSLAQEESRNISENTRWGVVRKFEKGKVIVNHNKFMGYTKNENGDLVIVPKEAEIVRLVFRLYLEGYSTGKIAKYLEEQKIKTATGLEKWHDTVVLKMLRNEKYMGDALLQKTYTVDFMTKKKVMNKGIVPQYYVEDDHEAIIPKDLFYRVQEELARRASVNKSAVTRKKNMKSKYSSEYALTGILLCGECGQEYRRVTWARNGKKKIVWRCSNRLTNGTKYCKDSVTLEEGILNRTVMEAIHRITCNDGNFASALRQNVIRVIGSYGREQEPDEYDEKIKAKQEEMVSLIAENAAISSYTDEFDERYRRIAEEISTLKEEQLEARRKKKLAESYNRRVQDMDNFLKQQTYQMPEFDNDLVRRLIANIKVVSEDKLLIQFQSGIVMEQEIRYD

SEQ ID NO: 25212 - protein, 502 aa, synthetic construct
MPEALNAVIYARYSSDRQTEQSIEGQLRECYAFAKANDIAVIDTYIDRAISGKTDNRPAFQKMIEDSAKRQFQAVIVYRLDRFTRNRYDSAIYKARLKKNGVKVLSAMENLNGSPESIIMESLLEGMAEYYSVELSQKITRGMRENALKGKALGGQRVLGYKVNSDCYFEIDETTAPVVVDIFKLYSSGKTVKEICDILNARGVKTARGGAFNKNSLHTILTNKKYIGIYKTKYGEIVGGIPAIIDKELFEMVALRMEQNKKAPARAKAEINYLLSTKLFCGKCRSAMVGESGTSKTGKKYYYYACVKKKREKACDKSNVKKDWIEDLVIQRTVTDILKDDVIDKIADRLVELQKAEAAESGTMLYLENSLAEIQVSIKNIMTAIEKGIITESTKTRLTELEDEKRNVEIEIAKESIARRIISREQIIYWISSFKDGDITSEKYRQQLIDTFVHAVFVYDDKIVITYNYSGENNTATISDLDLSSPPLQSNPNIFVTLDVFG

SEQ ID NO: 25213 - protein, 538 aa, synthetic construct
MSTAPNVTVIPAKVQTAESRDKYHQLRVAAYCRVSTELEEQQNSYQVQIAYYTDLINKKKEWTLAGIFADEGISGTQTKKRTEFNRMIRMCRNKKIDLVITKSISRFARNTVDCLEYVRQLKDLGIGVIFEKENINTLTMTSEFMIALYGSFAQAESESISKNVSWGKEKAYREGKVQFQYKHLLGYKKGADGKPEIIPEEAETVKLIYTMFLDGHSMKNIALILHVKGKHTKTGSTEWRTNTITRILQNEKYVGDALLQKTFTSDCITHKVVKNHGERPMYLVTNHHDPIIDRDTYNRVQQELARRNSKRKISDKTVTEQGKYSSKYALSELLICGHCGTPYRRTTWAARGKKQIVWRCLSRLEHGKKYCPDSPTIKEEQLHRGILRAINNYYSCRNDIVRILKANIGSVLECQGQEEILSVEKRLKEIDQARTDLVNLIASGDCDEDKLDSEFAKLYAEEQGLSERLTMLKSQNKTSEETQAKLDKIMDMIEHEKFELETFDNVLIRKLIECVKILSKTEILVIFKGGYEVRTEIE

SEQ ID NO: 25214 - protein, 536 aa, synthetic construct
MALLPRKPAKHPAKPKRGKKLEVEEPGVLYGRYSSHNQKDISIEQQFEKCYELAAEYGIRIIDTYADRAVSGRTDKRVDFQRMMADAAKGKFRYVLAWKSNRIGRNMLEALVNEARFQELGVRVLYVEEDFDDTAAGRFAARSMMNVNQFYSENMAEDIKRGLYDNAANCMVTNGHLPYGYKADETLHYAIDEPRAAVIREIFTRVSCGEAFVDIMSSLNARGITTSYGRPWGRSSFQKILSNERYRGIYIYGDVRIEGGIPRIVSDELYFKVQEAITTKKNPQGRHRVNGDYLLTGKLFCGHCKSPMTGISGTGRAGKLHFYYVCQKRRTEKTCHKKNVRRDVIELKIAKAIRDYALKDDIIEWIADSCVEDHDRRVSESHLSVFEDQLAEVNRSIKNVMSAIEKGIITETTKGRLMELEAERTAIEGKICAAKAAIVPTNRERLVEWLRSLREGDVHDKKYQAGLFDTFLVAAYLYDDNRVKIVFSFAGDKNTIEIPLEDVIDSIDDEASCVRLSSTLSHQERVDESQLVLFVL

SEQ ID NO: 25215 - protein, 519 aa, synthetic construct
MKRVTRLGGDVKKKSTAKVLRVAAYCRVSTGSDAQLESLDAQKTHYENYINGREDWDFAGLYFDEGISGTKKEKRPALLQMIADCKAGKIDFVITKSISRFARNTTDCLEMVRKLLELDIPIYFEKENLNTSSMESELFLAILSSMAEGESTSISENNKWSIQRRFKNGTFKLSYPPYGYNWDGEQMVINPEQAETVRWIFKQVLSGKGTHAISDELNANSIPTKKGGRWTPTTVRGMVSNEKYTGDVIFQKTYTDSQFNRHINYGQKDRYAMSDHHEAIISREVFEAANALIAQRGKEKGIIKGSEKYQSRYCFSGRIVCGECGDTFKRRIHSTTTHKYAAWCCNTHIEDKSRCSIKYIRDDTVKAAFVTMINKLIFAHSIVLKPYVETLQNGCTNAPMRRIQQIQTLLLENAEQRETLTKLMAQGYIDQILYNEENNTLLSQADRYRQEMDTLSKAIGGDGAHVTAAKELLRYVEKAAMLTDFDEALFENTVTCIKVLSREEIAFELKCGLTLKERM

SEQ ID NO: 25216 - protein, 477 aa, synthetic construct
MKIALYPRVSTQEQALNGHSIDEQIERMNKYCEAMGWQVYKTYTDAGYSGANTDRPALKRMIKDIEAGKIDKVLVYKLDRLSRSQLDTLYLIEKVFLANNTDFVSMSENFDTSTPFGRAMIGILAVFAQLEREQIKERMMMGKEARAKKGLYHGSNCYPIGYDYIDGHLVPLEFEAIQIKMIFEMYAEGKAPLTIAEYLNNNGYKTRYGRWNDITVRKILRRKTYLGYIKYHDDWYKGEHEALISEDLFNTVQKIFDQRTEDYSYYKRREGRVNSYLGGMLFCDCCGGKYSKIISNSTKNGKKYRNTYYKCNSRTFKKRTLVRDPNCKNKTWKMDVLDNLVFDEIKKLALDPDYLNKIKTPQENDNRQSVIENQIESIKIQINKLMDLYTIGGMPVDLLQEKIHDLNNQQKKLEAEIEKIEDEKKEKMTNADAMKMITSFSDVLERGDYSEIRASLTALIEKIVIKGEDIKIYWRFV

SEQ ID NO: 25217 - protein, 523 aa, synthetic construct
MRFFSYGRKSVFSDKSDSIDNQFRMNREYCESKFSGQVDSWQQFSDEDFTGANTSRPDLQRMLSFIKGGFCDVLVVYQLDRLSRDVRDFANIYALLEEHGVMFISIKENIDTTTPIGRAMMYVTVVFAQMERETIAARVTDNMLGLAKKGYWTGGNPPVGYVRKHIVVNGKKHCSIEVDPDGARYVTQIFDTFLAYNCSLQGMETRFKNQGIRTQSGKFFSTTQLHKMLTMPYCVEATPEVYDFYAAKGCIMDPGSPREMWDGSVGVIIYGRSTEKNKKHQAQPPEKWTVCLGKHKPFMPAEKWLAVQSRFTQNKCIKDAKWPVPLLKGVLRCKCGNLMQVSRKKKVDGTCSSWYYCRKRMRQGVDACDMGQIKCDLLDGEVLELFRGITADPALIQKFVKAEAPADVPDLKAAQARVSACERKIGRLAASLALAEDSAASKYIIAEMERLDVELGALKREASLAEMESHRAAASAKDAKATAAEIAKLIHGLDGFDDKEKNAIARAVIQECTWDGERLFITL

SEQ ID NO: 25218 - protein, 511 aa, synthetic construct
MNTVIYARYSAGPRQTDQSIEGQLRVCTDFCKQRGLTVIDTYCDRHISGRTDERPEFQRLIADAKRKKFEAVVVYKTDRFARNKYDSAVYKRELKRNGIQIFYAAEAIPDGPEGIILESLMEGLAEYYSAELAQKIKRGMHESALKCQSTGSGRPLGYRVDEQKHFQIDPESAQTVQTIFEQYIKGESNAAICELLNSRGLRTAQGKPFNKSSINRIIKNRKYIGEYRYHDIVVEGGMPAIISKDTFNLAQAEMERRRTRKAPKSPKAEYLLAGRLFCGHCKGPMQGVSGTGKSGNKWYYYYCGNTRGKNKTCDKKQVSRDRLERAVVDFTVRYILQEDILEELARKVHAAQERQNDTASEIAFYEKKLADNKKSIANVLRAIESGAATQTLPARLQELENEQAVILGELSFLKGKHLAFTEDQILFALMKHLEPYPGESEQDYRRRIISNFVSEVYLYDDRLLIYFNISSEDGKLKSADLSNIEGGEFDEGLVISRWRYWKSSSTLSGRR

SEQ ID NO: 25219 - protein, 463 aa, synthetic construct
MPSKIERCAIYIRVSTAEQMMHGKSLEAQKQYLTNYAKEHNMTVAGVYADEGKTARKELKKRKAIHSLLEDVKAGKIDVIIFWRIDRWFRNLSDFYKVQEVLDDNNVHWISTSEPGINMETRDGRLQLNVVLSIGQNEVDTTSERIKFVNEASIRQGKLIFGDVNMGYGYKSGIIDGVKRMVKDPDREDTVNAFYRFFFKHHAKGLSMRYIQENYDPDFTWANMRTLLSSEFYKGTYRGIPYCPAYLTESEWNNLQEIQNANVKRAPSGRIYLFSGMINCPICGRRLSARGGSSIINRKTGAKKVYCYYRCNKAFIDHKCTYKHMVSQNLIEQYLIDHLEYEYNKFKIKCEKIEKEQEKKKKVQTPEKLQKELERLNLLFQKGRIKWDYYSKEYDRIENELNELLNAAPELEPDYAYLEELLNTDFRTMYYNLTQENRRAFWHSIIREIHLNTDHTVDSVDFL

SEQ ID NO: 25220 - protein, 562 aa, synthetic construct
MAGQENQQYTVLYGRLSQEDERAGESNSIQHQRTLLEKYAKEKGFENTIFLADDGYSGTNFERPSWKKIVEMIEVGQVANLIVKDASRLGREYLQVGYYMEIYFPQKNVRFIAVNDGVDSTVESSNDFNPIRNWANELHAKDTSRKVRAVMKMKAEQGERLGGRPPYGYRKSDGDANTLVPDEDTAPVVKRIFSLCAAGNGPKRIATILTKEQVVNPSNAYYRKTGKSHRGLDTTRPCLWSSNSVTSILNNEVYRGHSVGLRTTTISYKNKQRVERPESERFVVKNTHEALVTQEQWDIVQEVRQHKKRVPKHMDEPNIFSGLVFCADCGKPLVLHRASTMKRTEYNFKCYTYGKKGKTVCTPHHIREFELKAVVLEDLRRVTHFARMKEKQFAAYISSKNTLELRREMNTIQKDLDTMRRRREELSKLFKRLYEDNVLGRVTDEQYRMLAGDYTVEQKALEEQIPEKEARLEKLKAASANVNTFVEKAKQYTAIDELTPELLRLFIQRIEVGERTEKYSRSSHQSIRIVYRDIGTVDSEMEQGEAQPRIAPPLSEVFQLPA

SEQ ID NO: 25221 - protein, 559 aa, synthetic construct
MKTKLYSYIRFSSMRQNDGSSYERQIRMAREVAAKYDLELVNDYQDLGVSAFKGANSKTGALSRFLDAIGRSVPVGSWLFIENLDRLSRADIVSAQELFLSIIRRGITIVTGMDNKIYSLDTVTANPMDLMFSILLFIRGNEESQTKRNRTNSSALIKIKSHQENPQNPAVAIEEVGKNMWWTDTTSGYVLPHPVYFPVVQEIVELRKNGRSTAEILDHLNETYAPPPAVSNKKHSKWSRAMVERLFHTRALIGIKEISVDGVNYELKDYYPRVVDDPTFYHLKKNIGARAWNFGDKEEVKPIPLLSGIGLLKCDHCGCAMVKVKGTNKRSDQYRYTCDATRSRRLDCEHPNWSFRGDQLEKAVLQLLADKIWIAEDKANPVPALKVQVDEISRKIDNLIALSAMTGATKELADQITTLNSERETLYNQIKMAEEEMYSVDSQGWEKLAEFDLEDVYNEERLKVRFKIKQALKRIGCSRIDRNKNLFVLEYIDGKTQRVVIENSRGTRKGQIFVDLKTINDRQILESNGLVLHPCLDMLTDKNWKPEEEIPGPLQEFGI

SEQ ID NO: 25222 - protein, 532 aa, synthetic construct
MNAVIYARYSCDRQTEQSIEGQLRECKAFAASEGIHIIGEYIDRAISGTTANRPEFQRMIADSRYKTFQAVIVYKLDRFARNRYDSAMYKSKLKANGVRVLSAKEHITDSPEGIILEGLLEAMNEYYSAELSQKIKRGMRENAIKGKTTGGNVALGYRIGADKQMEIDPAGAALVRRIFTSYDNGRTFTEICDDLNHAGYTTSRGKQFRIDTISRILANQRYTGTFQCAGEDAHCPPIIEPELFRSVQERLTESRHKHRHTQSPHEYVLTGKAICGTCGRRLTGRAGTSKTDKRYYYYCCPNKCCGWLPAAELEHAVLDAIAQYTTPEACEQIANATYALYQQSTHENADLTAAQRRLQETEKKLENAVNAVLNGITSAALQATMQQLEQQKAALETEVRLLQTDAPELKLEHFQYFAHRLLEVQAEGTEKILQLLVNQVIVYKEQITVLVNLTDKTKTPPLEQVTAALRESSCSIACGGGSANAGCRLAQHQSISGTYASKSRSALDRKADSAAGGTSAKQYVLRQRNGAG

SEQ ID NO: 25223 - protein, 573 aa, synthetic construct
MAKVKLPDKPRVAIYTRVSTLHQIDKDSLPMQRQDLINYARLILNTEDYVVYEDAGYSGKNTDRPKFQEMMQQVRLGMFTHILVWKIDRISRNRLDFATMYSELKQLGVVFVSKNEQFDTSSAMGEAMLKIILIFAELERNMTSERVTAAMLSRAANGQWNGGRVPLGYDYDPETKTFTINESEAAVVKIIHDKYEQERSLVSLARYLNGHGYRTRTGCTYSPSTLLIILRNVFYCGDYRYNVLKDGDRQKRKKESEWITVKDHHPAIISREQKDEIARILKENRRLECERRGIYSKKKNVHVFGGLVICGNCGHAMTSTIRPADQDGIRWSVYVCPTKRRSEYLCKGRATSEVVLGEFVFNYILNMLNVQKNFDSINSVEDMEKMLLSGSTFRDVDGIERAGLDDLYNMLASGLTEKAPFDSSVEVRKKPVVSDIELENLNTEKTRIERAAERLQNLYLYSDDSISQKDYIIQREKLMSQLAEVNEQIGMVMSNADEKDVSDEEFVHAASKFILTQKLEGRTYIYYKRLATTVSREVLRSFVMSIIENITIYDGRVQTIVFKNGLSHTFILK

SEQ ID NO: 25224 - protein, 521 aa, synthetic construct
MPEALNAVIYARYSSDRQTEQSIEGQLRECYAFAKANDIAVIDTYIDRAISGKTDNRPAFQKMIEDSAKRQFQAVIVYRLDRFTRNRYDSAIYKARLKKNGVKVLSAMENLNGSPESIIMESLLEGMAEYYSVELSQKITRGMRENALKGKALGGQRVLGYKVNSDCYFEIDETTAPVVVDIFKLYSSGKTVKEICDILNARGVKTARGGAFNKNSLHTILTNKKYIGIYKTKYGEIVGGIPAIIDKELFEMVALRMEQNKKAPARAKAEINYLLSTKLFCGKCRSAMVGESGTSKTGKKYYYYACVKKKREKACDKSNVKKDWIEDLVIQRTVTDILKDDVIEKIADRLVELQKAEAAQSGTMLYLENSLAEIQVSIKNIMTAIEKGIITESTKTRLTELEDEKRNVEIEIAKESIARRIISREQIIYWISSFKDGDITSEKYRQQLIDTFVHAVFVYDDKIVITYNYSGENNTATISDLDLSSPPKINHPQGWIYFCRGPAGVEVYPPLRGKSLQVHQK

SEQ ID NO: 25225 - protein, 527 aa, synthetic construct
MVVQKKVTTIPASLTRFTATPITELKKRRVAGYARVSTDHDDQFTSYAAQIDYYTNYIKSRDDWEFVEVYTDEGITGTSVKHREGFKRMVADALAGKIDLIVTKSVSRFARNTVDSLTTIRQLKEKGIEVYFEKENIWTFDGKGELLLTIMSSLAQEESRSISENCTWGQRKRFADGKVTVPFNHFLGYDRGPDGNLVVNPEQAVIVQQIYAMFLQGMSYHGIAKKLTADGIPTPGGKEKWSISTVRSILSNEKYKGDALLQKSYTVDFLTKKTKVNEGEIPQYYVEDNHEAIISPEIFAMVQREMTKRGRGKNYHSSVHAFSSKIKCGHCGSWYGSKVWHSNSQYRKTIWQCNHKFDGDERCDTPHLSDEDIQRLFLSAANKLLVNKDEVVTNCREMRDLLFDTTELEAEQATLLEETQLISDMVQQTIYENAHVALDQTEYQKRYDSLTQRFETAKQRLETVMAELDRMQTQRADIEAFIESFEALPETLTEFKLENWHSLVDYATVYSIDDIRFTFKHGQEVQA

SEQ ID NO: 25226 - protein, 598 aa, synthetic construct
MRKINKIEPLMPTLPSRKKVAAYARVSLETERLQHSLSAQVSYYSELIQSNPEWEYAGVYADDGITGTKSTRAEFQRLLQDCENGKIDIILTKSISRFARNTVDLLETVRHLKELGIEVRFEKERINSLSGDGEVMLTLLASFAQEEVISLSNNVKWGTRKRMEQGIPNGHFRVFGYRWEGDQLVVVPEEAAIVRRIFQNFLDGKSRLETEREFAAEGITTRDGKRWVDSNIKVVLTNVTYTGNLLLQKEYIEDPLTKKRKKNRGELPQFYVEDTHEAIIDKETFDYVQAEIARRKELGAFANKSLNITCFTSKLKCCICGCSYVRNQRNNRTKHTSTYDDTIVFWGCGTTKKKGGRCSNKDIPERVLREACATALGLDEFDEDIFLERVDHIQVLEGQVLEFHFTDGTTALQKWVSTAKKDCWTDEHKDRQREWIKNYMANALDGRFCEFTTRIRCEHCGSTFKRNTQPSKSANGGKMHYWRCPTSGDCVTTGIREDRLKDITASVMGLTEHDADAFKEQIEYISVSDDMKLTFHFFDGREPVVQYNTKRQGTPWTEERHKKFSESMQGKYTEERREAMSQRMKQIRSEKHWSSKRK

SEQ ID NO: 25227 - protein, 563 aa, synthetic construct
MGDKIVALYVRVSTGYQVDKDSLPFQKKELKAYCEHVLHIGKKRIEVFEDAGRSGKNTKRPAFERMMEKVKSGQVSHVIVYKIDRITRNLVDFSLMYDDFKYNNVTFISLNEQFDTSSAIGEAILKIILVFAELERKLTSERVKDVMIGRAQNKQWNGARVPYGWDWDSEKKCPVHSKKEAPYARAMYQMYLDGGSSVTICDYNNSHNIPTKRGGEWTSKTVADFLRNPINRGDYRYNYRDSARGKKKSDDEVVYIKNVFPPLIDPKIWDEVNRRMDANSQNRNTSVFHPIRKRCNVFAGLMVCGKCGSGYQVKGKDSRKGDGFRPSSYACTGKYQKKNCDNLNVSDVKIGPFVLNYIAAMVDASKSRRFIKDCDSLEQIILSHISFSDVAGISASSLQDTLDLLFGRSGSELLSGKPVSNEAADGSKTEELKEKLQRTDRALERLKKAYLFDDDGMDEKEFLEMKSKLEVDRIKLENSIKGLESSSISENVDQAAFLKSASQFLISHKINSGDYIDYSRLAALDEESMKAFVNSIIDHIVVLDKRITEIVFKNGLPHKLLYR

SEQ ID NO: 25228 - protein, 513 aa, synthetic construct
MKRITKIEAADTGAVRKLRVAAYARVSTDSEEQLISLDAQKNHYEVLIRSRRDWEYAGLYYDEGISGTKMAKRDGLLSMLADCERGLIDYIIVKSISRFSRNTVESIETVRRLCSMGIYILFEKENIDTGKMEGELLLSILSSLAESESRSISENETWSIQKRFRNGTYKIAYPPYGYDYTDGEMVVNQAQSEIVKWIFAEVLSGSSTTQIAKALNARGISTKRGGRWTGHTINGMIKNEKYTGDVIFQKTYSDDTFTRRRNNGERDQFFVQGHHEAIISHEDFDAANDMIARNAAEKGICADSQKYQNRYCFSGKIICGNCGAVWKRRKISGYFGYACTTHLEDKDVCGMKSIREDSIMAAFATMMNKLIFARYKVLLPFSNALKTAEKAECLDEFTALEEGLEKNLQKRQQITQLFTKSYLDPAVYAQQNDELLNASARLTAEKDAIIAKISGGSRQKKALEDILHYTSGASMLTEFDEDLFTRFVDRVIVYSRTEIGFDMKCGPVFRERI

SEQ ID NO: 25229 - protein, 524 aa, synthetic construct
MQALAQNVTVIPARRRVGSQRTAAQVQKIRVAAYCRVSTDSEEQETSYEAQVQHYTDYIRSKPDWDFVEIYADDGISGTNTAKRDEFNRMIADCEAGKIDLILTKSISRFSRNTLDCLKYTRKLKALNIAVFFEKENINTMDSKGEVLLTIMASLAQQESESLSANVRMGIQFRNQQGKVQINHNWFLGYTKDADGNLIIDPAQAEIVRRIYREYLEGASFLQIKRSLEADGTPNGAGHKKWHESNIRQILTNEKYIGDALLQKTYTVSVLDKKRSTNNGQRPKYYVEGSHEAIISKDVFMRVQSEIARRANLNPDGKRRVYSSRYALSGMVYCGHCGDIYRRVKWNNRGCKSTVWRCVSRVLKKDVDFDCPARTVKEEVLQGAVVTAVNDAYARKNIVTALLKKNIESTVFGDLEHRLATVYKELADLQTQMIAVSGDDAAVDALGEKVDALREERQSILAEAAERSDLQERMNDMISFLDEMPEALTEYSDAITRRLVEKITIYDEKIVVELKSGLQIEVEA

SEQ ID NO: 25230 - protein, 521 aa, synthetic construct
MKKITKIEPSSARPTAAKTRVAAYCRVSTGMDDQLVSLETQKNHYKELIGTNPEWVYAGLYYDEGISGTSKEKRPALQRMIADCEKGLIDRIMTKSLSRFARNTTDCLELVRKLLDLGITIYFEKENLDTGSMESELLLSIMSSLAESESVSISENNKWGVRHRFENGTFKIAYPPYGYESQDGVMVINEEEAKWVRWIFEQALSGVASARIAKQLNEKQVPSRRNGNWTPTTIRGMLTNEKYIGDCLFQKTYSDFRFKRHTNNGERDQFYMEDHHEAIISRENFEAVGALIQQRAQEKNIRKNDPRFQRRYPFTSKLVCGECGSVFKRHVNSTGSLKYPVWVCKQHLEDVSSCSMKSIRECDLEYAFTTMMNKLIYGKKAVLDTLLDGIRGETHKENLRRIDAIDQKLEQNVERRQTLTTIMTRGYLDPALFTQESNDLAAEADALTAEKDQLVKEISGNLHKTDALGDLIQYAGHAQPSTSFDGALVERFLDHAVLQTRDEIVFHLKCGLRLTERIGEI

SEQ ID NO: 25231 - protein, 521 aa, synthetic construct
MATVTMIPARPTVGARKKTEEVPKLRVAAYCRVSTETDEQATSYDAQIEHYTDYIEKHPGWELAGIYADDGISGTNTKKREEFNRLIDDCMAGRVDMVVTKSISRFARNTLDCLKYIRQLKDKNIAVFFEKEGINTLDAKGEVLLTIMASLAQQESQSLSQNVRLGLQYRYQQGKVQVCANRFLGYDKDEDGNLVINPEEAEVVRRIYREYLSGQSYYAIGQGLTADGIRTAAGNDFWLASTLKKILTNEKYIGDALLQKTVTTDFLNKKRVANKGIVPQYYVENSHEAIIPRELFLQVREEMVRRARVKTGTGKRRVYSGKYALSHLIYCSDCGDLYRRTQWYLKGEHVPVWRCVSRLEKRKSGIDCPSRTLYETDLHTAVITAFNQMIEQKDEFLPGMRLAMDRALAQNNSPRVAEIDARSEELQKELLKKANAKQGYEELADEIDALREEKQALLLEDANRTAMKQRLDELEAFLDERQEPVTDYDEGMVRRLIERITVFEDHLEFEFKCGLETEVQM

SEQ ID NO: 25232 - protein, 517 aa, synthetic construct
MATVKVIEPNALVPEHLRVAAYCRVSSDSEDQLHSYAAQIRNYTEVIAQHDGWELVDVYADEGLTGTRMDKRDDFNRMMRDCRKGKIDRILVKSVARFARNTKECLASLRELSGMGVTVRFEKENIDTGTLTTELMVSVSGSLAQQESLSISANQRLSYQHRMECGEFITCSAPYGYRIKDKKNLEILPEEAAAVRWAFDAYLKGNSSKWIAEQLTAKGIPTQNGAEKWQETSIRYLLTNEKYIGDTLCQKSYSCGFPFVQKRNQGERMQYYVENSHPAIIDRDTFEKVQELLRKKAQKEKRHRERSPFARKILCGNCGTVFLRRTSKNGYVTWVCRTHDRSADACHVGRIPESEIRAAFLRMYRKLKCNADTILKPAMEQMNALDAVLQQNNPKTLTINRAIAEATEESHKISTLRVNGLLDADTCTARMNVISAKLAQLRRERRRLVENETLDEVMDALRKVRQTILDGPEQMDDFDDDLFESLVEKIIAESQTEIRFRLYGGLELGERLEVAVR

SEQ ID NO: 25233 - protein, 547 aa, synthetic construct
MEAATTTLERRVREIPPTRKPEELLRNYDGKMRVAAYCRVSTDSEEQLNSYEAQKTYYTQKIQDNPDWEMAGIYADEGISGTSLKKRAEFNKMITACKRGRIDFIITKSLSRFARNTVDCLDTVRLLKANGIGVYFEKENINTLTESSEFLVTLFSGFAQAESESLSKNVAWGKEKSAKAGNVHFQYKKMLGYRKGEDGQPEIVPEEATIVRRIYRRYLDGCTLGKIKRELDEDGVPTAQGVECWSPAIIHNILTNEKYIGDALLQKTYVTDCLSKKVRKNRGERVMYYVENNHPAIISREAFDLVRKEMTRRSSKRKVLQKSGKTELGKYSGKYALTELLVCGECGSPYKRVTWARDGKKRIVWRCVSRLEFGTKYCHASPTLDEGKLHSAILNAMNEYAAIRQEVCPDVLAMVEEAKQALTQTGTKLLTLKRRLDEVSHEQADLLDMLLANMADADLNARMKALTDEKASLKEQILETQQEEVGLEEQVAKRQQMWDSLIECSEGYTEFDDEFVRQIIQKITVEDADTIRIQFRDSDVVLEQGLQ

SEQ ID NO: 25234 - protein, 523 aa, synthetic construct
MAKSVTTIPATLSRFTAAPINSTKKRRVAAYARVSTDNEEQLTSYEAQVDYYTNYIHGRDDWEFAGVYTDEGITGTNIKKREGFKSMVADALAGKIDLIITKSVSRFARNTVDSLTTIRSLKEHNVECYFEKENIWTFDGKGELLLTIMSSLAQEESRSISENCTWGQRKRFADGKVTVPFNRFLGYDMGPDHNLVVNPEQAKLVKRIYGMFLQGQSPFQIARTLTEEGIPSPGGKDHWNPSNIKSILTNEKYKGDALLQKTFTVDFLTKKKKANEGEIPQYYVKDNHEAIIDPETFEMVQTLMATRKKGRNRKSSVSIFSSKVKCGDCGSWYGPKVWHSNDAYRKVIWQCNHKFDGQKCATPTLTEDEIKELFLRAANQVIDQKEQFIAIYEQVLSRSLDTTALESELSDLEAEINIAAELIEECIKENAHVALDQAEYQKRYDGLVARFDKAKVRHTEVTDLIAERTARRHQIETYLKDLRGRELLTEFRETDWLAMVDYITVHSKNDIRVTFKDGTEIKA

SEQ ID NO: 25235 - protein, 590 aa, synthetic construct
MKTVEKIERKLPVLKARKRVAAYARVSMESERMQHSLSAQVSYYSTLIQKNPEWEYAGVFADYGISGTGTKKREEFNRMLAECEAGNIDIILTKSIQRFARNTVDLLNTVRHLKDLGIEVRFEKENINSLSGDGELMLSILASFAQEESRSISENVKWGTIKRFKQGIPNGKFSIFGYEWQDDKLVIIPEEAEIIRWMYAEYMKGASRIEIGRALMDRGIYTRQGKPWVDSNVKVILTNITYTGNMLFQKEYCEDPITKHRRKNYGEMPQYFVEDTHEAIIPMDEWQAVQAEFKRRRDLGPFGNKSLKLSAFSTKITCGCCRKHYRHSGKRNTAGEVYYIWICQTKSQKGVSACPSKNIPEKMLQNTAAEVLGLDEFDEDVFSQQIEEVIVIGDDTLTFRFYDGHEVTTKWQSTAMTDWWTDERRKLWGERHKRKDTNPNRNTFYEFTGFIKCGCCGANYRCQSGKRKDGTPTRSWYCTGPKDQCHNPGIRDETMKRLVADVLGLDEFDEAAMDARIENATILDHTVTFHFRDGHTESRDFLDKRHGTPWTEERREKARESMKAAWTDERREAMSERIKKIRSEKKWPNP

SEQ ID NO: 25236 - protein, 534 aa, synthetic construct
MKERVCCLYRVSTDKQVDYNDKNQADIPMQRRKCHQFADQMGWIIVHEEQEDGVSGHKVRAENRDKIQTIKELAKQGKFDILLVFMFDRIGRIADETPFVVEWFVKNGIRVWSTQEGEQRFDNHTDKLTNYIRFWQADGESEKTSIRTKTALGQLVEDGGFKGGLAPYGYDLVKSGRFNKRKHEVFELAVNEAEAAVVRTIFDKYVHEGFGAQRIATYLNDLGYRARTGKMWHHASVRGIICNLTYTGVLRSGKSRSQTLPHLQIIEQELFEAAQHIRTSRANSAEQERRVPLNTRGQSLLAGNVFCGHCGSRLALTTNGKAYPCKEDAHRIVKRVRYICYGKTRKQTECDGQTGYTAHILDGIIDKVVRQIFERMKAIPKSEIVNIRYREKMEERKALLKSAKSDYTKAAAELDMLRAEVIKSLRGESAFSQDLLGSLISDCETKCLEVQHTMEAAQAAYDEGQAMLDALNAQYDDIISWADMYDSASMEAKKMIVSCLIRRVEVYRDYRLHIDFNIDFEQFSAGLDISAIAA

SEQ ID NO: 25237 - protein, 554 aa, synthetic construct
MAERVCCSYQNALSIQNRVCCLYRVSTTKQVDHDDQNQADIPVQRKACREFAERMGWTIVYEEQENGVSGFKVSANDRDKIQLIKEYAEQGKFDILLVFMFDRIGRRAEETPFVVEWLISHGIQVWSVNEGEQRIDTHVDRLTNYIRFWQADGESQKTSMRTKAALGQMVQEGRFRGGSAPYGYDLVPSGTYNKRKHEVFKLEINPDEAKVVRMMFDLCVGSGYGRFKIANFLSEMGIKTRDGKNWHEATVGHILHNIMYTGVLRSGSTQSKAFPDLQIISPENFELAQKLMAERANECNALRTMPRNTRGQSLLSGNVFCGHCGGRLTLTTNGTTRINAAGEKVGRKRIRYVCYNKTRKRSNCDGQTGYTMHILDKMVTDILHQVFDRMRSVEENEIISRTHRSAMVSLKKRLADAKAESAKATKEYESLKLEIIKAVQGESAFPMDILSELVNNARTRMLDANAQLTELNEEVEKSNQRIEAIKADYRRIMEWSEMFDGSDMDVKKMIAGYIIKRVDVYSDYRLHIEFNMSFAQFELGLETEVEYAAQDSVS

SEQ ID NO: 25238 - protein, 516 aa, synthetic construct
MARKKKVSPGNRLVAYYRYSGGSQQTEQSIEGQRRDCEAYARQHGLTIVHEYIDRHISGRGVESRLAFQQMIADSSKHLFDLVICWKTDRFARNRYDSAVYKKKLRDNGVRILYAAESSVEGPEGIILEGLMESLAEYYSAELAQKMRRGMRESALKGRAINPSRPLGLTTDEHKRFIIDEKNAPTIRFIFEHYAAGESSASIVEQLNAAGLRTSKGNAFNKCSIPRIIQNEAYHGVYICKAYDVRIDGAIPAIIDDDLWKRAQKMLTLNKQHRAPHSSHADYLLSGKLFCGCCHSLMRGISGHNCRNDVYYYYACGNKADGGTCKKKNIQKDVAENLVVNAICENILRPDTLEDLADAIAAAQQADVNQPDPERAMLEQNLADVHRKINNIIESIENGTASSRLSARLADLEQQESTLNYQLESLKEVHPPVLDRERILFLLEQFLISPNERTEDYNRRIIDTFVNRIEITDTEMLIYFNLSEASASEKQKNSQSNSCSTGNHLVRVARIELTAS

SEQ ID NO: 25239 - protein, 525 aa, synthetic construct
MYLEISNPMDYHVALYIRLSKEDENEGPSESVNNQKSLLDDFVKKHRLSVYDTYIDDGWSGTNFDRPDFQRMIGDIEAKKVNMVITKDLSRLGRDYIMTGHYMERYFPEKRVRYISLLDGIDTGVESSANDITPFRAIMNDMYAKDISKKIKSVKRDKQRKGQFIGGKPVYGYKMHPTEKNKIVIDEEVAPIVRRIFHMALEGMSCRQIATQLNEEGVPTPATYAGLPVANPGPYTGLWSSERISDMLQNETYIGNMVQGRTVKISYKSKKCLKQDRENWVVVEGTHEPLIDRETFQKVRMLVNSRKHTRSRTYDFLLKGMIFCHECGYPLAVLNRKNAAGEDVLYFVCRTYQRFTKAGVCSCHSIKEKTVTDAVVAKIQEVCEAYLDPSQLQPIAITAVEEVRKAESHDSEIQSLHSKIDGLTANLDKMYMDRLTGLLAESDFERIYQRIKMERNSLEEKLKDLEVQKESPVSTEDRARELVQRFITSAYASRELLVSLIERVELTEDKQIIVKFRFRELEAIS

SEQ ID NO: 25240 - protein, 668 aa, synthetic construct
MAYAKAKKHLKIWTKKKAALYVRVSTRYQVDKDSLPFQRKKLKEYCKFLGLEDYVIFEDDGYSAKNTERPHFQEMMSRVRSGEFSHLIVWKVDRVSRNLLDFAAMYQELKDHKVTFISMNEQFDTSTAIGEAMLKIILIFAELERNMTSERVTGIMLDRAEQGLWNGARMPVGYRWNNETKFPEPDPEEVKIVQLIFDKYEEWKSSIKIARYLNNNNFKSKRGGQWTSKLIHDIIRNPFYIGTYRYNLRESGRGPLKPESEWIVRENNHPTIIDKAQFDRCNKIMDQNGSSRDTSDLRARKYVHTFSGHLVCGKCGANMIASKDRARANGWRPSMYRCAQRSRMLDCDNSRTINESYIGPFIFNYIANLARVQKNFKNITTVEKLERELLKGETFDGVAGILPEGLNLTFQALSFRQVGNGTYIPDVDFLGDSDGASDRDQIELLKSEIEKSKNAVTRLTDVYLFDPDSMTKEEFATKKKELAKKIEGMERQLADLLDDSGNDDLADMSFIKKASAFLVAQRIVSKSFVDYVGMAQELDNEILKDFIDQIVDQIVVLDGRVQSITFINGLKHEFRYATPAELPVCQKCGGRIGSTCGCRTRTFDFSGKRYQRIKVGDQRDTLHGKKNPVCPECFAHEGRWHHWNCKIETCPICGGRLAECEHGTNGKK

SEQ ID NO: 25241 - protein, 453 aa, synthetic construct
MECVAYIRVSTERQVEEGYGLESQKRDIEEYCKKNEMLITDWYIDAGLSGMDMSKRVELQRLISDISKINNIVVYKLDRLARDSVDALYMIEKLFTPKGVRVNSVHDFARYETPQDKFQTHIMAAVAEYDRNTMLLRMRGGMLERVKNGYWMGGGNTPYCYRYDKNLGYLVPIPERAEQANRAMDLFIDGMSDVKIQRLLGYKSEFVVRNILTGVVNIGYIPYKGGTYKGLHESIFEHDKFYLAQELRKSRRKQHIYSFTEPHLLTGLCYCKTCGCKMRYQKITGMGIHKIYCCSHDKYLDYLPNYNADCDNPGAWASDIEKAFEHEILDISINLSQYKPKAKETKLQILTNQLEKQKSKLKRLYTLYAEGNDMVLDMIKTLETEIRETTEKISTERKNGQHEQKKEFVYENIKKLADIWDGISKSQKNSILKTIIDKVIVGKDDIEIQLKNF

SEQ ID NO: 25242 - protein, 463 aa, synthetic construct
MARSVTVIPARNRQASGHRAAPQKKIRAAAYCRVSTDQEDQLHSFEAQVDYYTKYINDHENYEMAGIYADEGISGTNTKKREQFKRMIADCEKGKIDLVITKSISRFARNTQDCLMYSRKLKNLGIGIIFEKENINTLDSTGELLFTILSSLAQDESRNISENCKWGIRTKFKNGEMHLNTFKFLGYDKDENGKLIINREQAKTVRRIYRDFLWGLNPAQIAKELEEEQVLGCLGQTKWYASTVVGILKQEKHMGDALLQKTYTADFLTKRQVRNNGEVAQVYVKDSHKGIIDKETWNAVQEEFDRREKFMQRHGTDRYSYGSECYPFCEKIFCGECGSLFTRHSWKSRGIIQWQCKNHRKDGKVTCTNAYVDNADLEKGFVKAFNRLVSEREKHMERWNAMKADGTPLEKIRAVQMMEATENGQLQKYVPEAAQLVLEEITIFGAKKYEFAFLEGSRVKVSV

SEQ ID NO: 25243 - protein, 538 aa, synthetic construct
MAKKVTVIKAAKEQKHTQEERRLKVCGYARVSTGNQAQATSYTAQVEYYTEKIESNPLWEFAGVYADEGISGTNVKHRDEFQMMISDCEDGNIDLILTKSITRFARNTVECIQTIRKLKEIGVGIYFEKENINTLSEKSELFITILASVAQGESENISSNNRWAIQKRFQDGTYIISTPAYGYGKDEDGNLVIIESEAETVRWIYESYLNGMGVYVIAKALNQKGIPTIRGAEKWQDGVIQDILKNPIYEGDMLQQRTYTETRFPFVRRVNNGQRNQYLIKDSHPPIVTHEEAEAVRNLMAYRVDVLHMNKSDYTKRYLFSGRIICGECGRTFRRQKIYIGKPYEKIIWTCSGHVEDKESCCMKAIREDVLHRAFTDMWNKLYTNQGTILEPLLKELTEFVAARQDSEEIRQLDKEIKNISEQGQILNQVMRKGYMDSALFMESSSRLGWQLTECRRKKTLLTRKLRRTKEIVRTEQLIQLIAEQDGLREEFDEQLFKMTAEKIVVSKEHDITFCLHNGLKLTERGGGQDAVAHANRL

SEQ ID NO: 25244 - protein, 548 aa, synthetic construct
MAETAKKISMIPAKVQYDRNVKLSEKKMKVAAYCRVSTELEEQDSSYEAQVEYYTGKISENENWKNAGIYADDGKSGTNTKKRADFNAMIQDALAGKIDMILTKSVSRFARNTVDSLVTIRKLKEKNVAVVFEKEGINTLEGTGEILITILSSLAQEESRNISENIRWGVVRKFEKGKVIVNCTKFMGYTKNEDGDLVIVPEEAEIVKLIFRLYLEGYSTGKIAKHLEEQGIKTATGQGKWHSTVIDKMLRNEKYMGDALLQKTYTVDFMTKKKVKNTGIVPQYYVEDDHEAIIPKELFYRVQEEVMRRASLCKAAVTRKKNQRSRYSSSYALTGMLICGKCGQEYRRVTWARNGKKKVVWRCSNRLTNGVKKCGESETLEENALNRAVMEAIHRITSDDMEFMENFRQNIIHVIGNYSTAKESGEYEEKIKEKIKEKQEEMVALIAENAKTGSYTPEFDERYRTIAEEINALKEAQKTARNEKRMADSYEQRIQDIDHYLSTSTCQIPEFDNDLVRRLISTIKVESSEKLLIQFQSGIVMEQEIRYE

SEQ ID NO: 25245 - protein, 516 aa, synthetic construct
MARKKKVSPGNRLVAYYRYSGGSQQTEQSIEGQRRDCEAYARQHGLTIVHEYIDRHISGRGVESRLAFQQMIADSSKHLFDLVICWKTDRFARNRYDSAVYKKKLRDNGVRILYAAESSVEGPEGIILEGLMESLAEYYSAELAQKMRRGMRESALKGKAINPNRPLGLTTDEHKRFIIDEKNAPTIRFIFEHYAAGESSASIVEQLNAAGLRTSKGNAFNKCSIPRIIQNEAYHGVYICKAYDVRIDGAIPAIIDDDLWKRAQKMLTLNKQHRAPHSSHADYLLSGKLFCGCCHSLMRGISGHNCRNDVYYYYACGNKADGGTCKKKNIPKDVAENLVVNAICENVLRPDTLEDLADAIAAAQQADVNQPDPERAMLEQGLADVRRKINNIIESIENGTASSRLSARLADLEQQESTLNYQLQSLKEVHPPVLDRERILFLLEQFLISPNERTEDYNRRIIDTFVNRIEITDTEMLIYFNLSEASASEKQKNSQPNSCSTGNHLVRVARIELTAS

SEQ ID NO: 25246 - protein, 576 aa, synthetic construct
MRRKNISKRTVDNTQRLKVAIYIRVSTTYQVDKDSLPMQRKDLIAYSSLVLGIEDYEIFEDAGYSGKNTDRPAFQSMMQRIRTGEFSYVLVWKIDRISRNLLDFAEMYEELQSLRVTFVSKNEQFDTSSAMGEAMLKIILVFAELERNMTSERVTATMISRANQGLWNGGRIPYGYNYDSDSSTFSIRDDEAAVCRIIRDDYLENKSLVHTSRLLNSIGHKTRAGADWSPTTVWIIIQNPFYAGMYRYNRYKGTEYRTVNPEDEWVIINDHHPAIFTLEEHEKMLDILQSNSRTKNILGQKHRAKNVYVFSGLLYCGKCGSRLVSSPGRVQADGFRTAIYSCPKKRKTHECDNPSINDLIVGEFVINYILNMLNAKSSFSSISSPVELEQRLLSGSAFNGITHISETGLHELFNLLSRYGSDKSYSFSISAPRKKKASVDPEIASLRKDKEKQERALKRLQDLYLYSSSAMTEKDFIIQKMEISKKIEDINARLGMITHDIDSTLSDEDFIKQASHLLINKKLQSKEYIYYKNLAQTVSPEILKTYMETILDSIYVTDGRITSIVFKNGLTHKFDY

SEQ ID NO: 25247 - protein, 527 aa, synthetic construct
MYELTQSMESLNVDEIIVYLRKSRSDSPEMSVEDVLKKHEEMIQDYANTHFGSPIPEKNIYREVVSGETIDSRPQVKIVLQKIESPQIKAVLIVEPQRLSRGDLEDCGRLINILRYTNTMVLTLTHSFNLQEEYERKFFEMEITRGNDYLEYTKRILRRGRESSAAKGHYIGSVDPYGYRKIVIKKDGINCHTLEIVPEEANVVKLIHELYAYTPGGIGFTNIAHKLDSMNLKPKKAAHWTPAIISSILCNPLYLGLIRWDTRKVIKYINDGRLEKSRPRSSDAKYYKGLHEPIISQELYDACMARRGTNPSLRRNKELCNPFAGLLYCGTCDHAMSLKIYKNHNSVSQIMLCNHQSYCHTKSVLYSAFLERFISSMENTIHDFELALLADNGNAQAVNQSIVTNLEIRLKKLQEKDMRQKDAYEDGIYSKEEFLERNIKTQQEIASTITALTAAKETKENYVDYGEKIRRFRDCINALNDPELSATEKNQFLKSCVSKIIYYNNMESKAGVGRYVENVFSLEIQYI

SEQ ID NO: 25248 - protein, 563 aa, synthetic construct
MNQSNQIRKTALYCRLSQDDGIEGDSNSIQNQKAILQKFAEDHHFPSPCFYVDDGFSGGTFQRPAFQQMISDMENGEIGIIVTKDLSRLGRNQLHTGLYIEERFPMFGVRYIAINDNVDTDSSESNDLMPFKNLFNEWFIRDTSRKIRAVLKAKAERGERLGTRTPYGYRKDPDTKKLIVDEEAAAIVRRIFAMCAGGSGPSQIARILKKEQILTPTMYAYTRYGITHTCLDTAHPYNWSDSAIANLLENEIYLGNTVNMKYSTKSYKDKRRVEHPREECMVFENTHPALITREVWDMVQRVRKNKRRLTKMEEQSKYSGLVFCADCGSNMVLHRAHTMSASYNHFTCRTYKKDGEACTGHYIRECVLDEIVLEDLRRVTSAAREHPEKFAAYIGSKQSTELQREIRRQEKELAAMRKRKMELDTIFKKLYEDSVLGRITTEQFQMLSGSYTEEQSRITAGIPQKESEIQCLRETVSGTDSFLDKAKRYTDITELTPELLRLFIEKIVVHEKEVKWSKHAPQTVEIYYNGIGYVSSGQQDVEETMGAPEPLQTQDTEKPRQAS

SEQ ID NO: 25249 - protein, 459 aa, synthetic construct
MSTTHFYSHYPTIEYKTCALYVRCSKEEQAKFGDTIEAQIEDLKAFAKLHHLKIYAIYVDEGHTARKKYNKRKEFMRMLQDVELHKFEYIIFTKLDRWFRNIADFYKIQEILDNNGVTWLTALERYEMETTNGKLNVNIRLSVAQDEADRDSDRIKDVFRLKVKKGEAITGSLPIGLMVGENGKVDIDPDTVQIAYDMFDYFEAHNSKRGTLLYLIDKYNRYFCYETIARALRNPLYKGEYRGNPDYCPKIIDPARFDRIQVLGKRNVKVRKNNRYYVFSGLAQCKECGHALVANTTVQKRYNREYTQYRCNYYSNSHLCTHSHGTNEKVIEKYLLDNIKPELEKYVTTYEVKQNAPTKKADPSKIKTKMQRLKELYVNELIDLDDYRIEYEQYKQELDKLASTAAPEIKDLSAIRSFLALDLQSIYDSLTPQERRTLWSSIIDKIIISDGGDIEIVFL

SEQ ID NO: 25250 - protein, 541 aa, synthetic construct
MKKQPTGGNRLVAYYRYSGGSHQTEQSIEGQRRDCETYARIHGMVILHEYIDRHISGKTDDRPEFQQMIADAGKGMFDYVICWKTDRIARSRYDSIIYKKKLRDNGVELLYAAEANVEGSGGIIVEGLMEALAEYYSAELAEKVRRGMRESALKGKAIGSSRPLGLTVDKDKKYIIDPAGAAAVRYIFEQYAAGAASSAIVAHLNEQGLCTSRGNPFNKSSVVRIIQNEVYRGVYVSPKFDVRIEGAVPAIIDDDLWERAQKMFIRNRQSRSPRNDRADYILSGKLFCGECGTAMKGVSGHSSNGEVYFYYNCPCKDCHRRNIPKDELEGLVIRTVCNDVLQPDVMDRIADSVIEAQTAELNQPNPEKEALQHELADVQRKAKNLLSALENGTAGAMLTNRLAELEQQADTLSYQLSSLESEPKYPVFSKEEVLYLLEQFLIAPSEKTKAYRRLIDTFVSKIEVSNTELTIYFNIAEEDCGKMKKAPQSNQPEGCSTEKQMVHLLLPQSNFSIFILPTYFYIAIPIFQARKSISVESVTDL

SEQ ID NO: 25251 - protein, 592 aa, synthetic construct
MTAVIYARYSSDSQREASIEGQLRDCKDYAEKNGITVVGTYIDRAYSAKTDDRPDFQRMIKDSGKKIFDVVLVWKLDRFARNRFDAVNYKYQLEKNGVHLVSAMEPISQGPEGIMVESMLIGMAEYYSAELALKVARGERENALQCKYNGGVVPLGFTIGKEDRLYHIDPETAPIVQEIFSRYANGEPAEKIAASLNERGLRTRTGKPFVKNSFFQIFRNRRYIGEYRYKDIVTPGGIPAIVDQDLFDRVQQRFEQNRIAHGRPAKEDVSYLLTTKLFCGKCGTLMGGESGTSHMGNTYYYYKCGNAKRHGKAHCDLKAIRKEPLERFVVETAIKVIFSDEIIERLIDLIMEAQQQENTRLPVLKDQLRDTEKRLANLLEAIEQGILTPTTKQRLDELEARKEALNTSILEEELKKPVLTREWIRFWLEKFRKGDVGSTEHQRQIIDTFVNSVYVFDDRVVLNFNFTDDAKMVTREEVLGSSAVENAPPQKSLDFRLRIFCLVAVQDSNRAALTTPVGRVSNQPSGLLLSPRVPTRRNVYQGCTHFVPVSFCAREQTSNNTIYYIKESAMNSENSSRFFSYAGSGGRTTKND

SEQ ID NO: 25252 - protein, 513 aa, synthetic construct
MHENRQDLKITALYCRLSADDELKGDSNSIIHQKELLQEYAYKHGLRQIEFYVDDGYTGTNFDRPDFQRLISDVENNLIGSVVVKDLSRLGRNYLKVGYYTEVLFPQNDIRFISVTDNIDSISEAGMNDFVPFKNIMNEWYAKDLSRKQRAVVKSKGNSGKRLTCRTIYGYKKDENGEWVIDEPSANVVKIIFNLYLKGYGQSMIANYLFQQKIETPNAKKSDKTKNPFRWSVQTITQILSHQEYTGDTVNFKISELGTKKVFTDTQPAIIEREVFEKAQLLRTKRKRVYRRFDEQALFANVLFCSDCDSKMYIQRKFNRNCTNSYVCSKSRLSSDCSSHYVNEKKLIAYVLKSINALITTDRKSLVSLIEMKKQLEAQKQKIENEKNLQNANNRISEIDIILINLYEDKVKGNITLETFQMCDKNFCIEKAELQKLIIDSSRQSVVINKQEVEISNFIKMLNKYHTPLSELTPEVIDDFIEKIVVFETEKINNVRNQQINIFYHGIGMISLE

SEQ ID NO: 25253 - protein, 430 aa, synthetic construct
MERKVHRVQQRPPKPKLLKVAAYARVSSGKDAMLHSLAAQVDYFQNLIRQHPGWEFCGVFADEAKTGTKDERPEYQKMLEKCRNREVDLVITKSISRFARNTVTLLETVRELKSLGIDVYFEKENLHSTSGDGELMLSILASFAQEESKSVSDNMKWRIRNDFQQGKIGSITIFGYRRNADGVLEIEESEAKIVQMIFADYCSGMGQCAIAKKINAMGISTRQGNRWTGQRVKEILVNEKYVGNMLLQKYYRQDPIGKRKMKNQGELPKYFVEQSHESIISANLFKKVQNLVKERTEQFSHPGATNRYPLSGMVQCAGCGKSYQRKIYKQGAVWMCATYLRQGKSHCPTAKQISERILHEKICSVLQIKEFDVEIVKSRVDNILISPNQLTFLFKDNTEKTVSWENHSRSESWTTEMRQAAAERSRKCQK

SEQ ID NO: 25254 - protein, 509 aa, synthetic construct
MPKVTVIPPSINRATRQDISAPTRRKVAAYARVSTDFEEQLTSYEAQISYYTNYIQRNPDWEFVKIYTDEGISATSTKHREGFNSMIADALDGKIDLIITKSVSRFARNTVDSLTTIRKLKEHHVECFFEKENIWTFDSKGELLITIMSSLAQEESRSISENVTWGQRKRFADGKVSLPYAHFLGYRKGENGLPEIVPEEAEIVRYIYQRFIDGLTPYKIANELTAQGIPTPCGKEKWSASTVKSILTNEKYKGDALLQKKFTVDFLTKKQQINEGQVPQYYVENSHPAIITPEEFDFVQSEFQKRCVKPYSSTSIYAAKIICGDCGSYFGAKVWHSNSKYRRVIYQCNSKFKGSHFCTTPHLYEPEIQEKFLQAFAQYFSQKDVVIKNCQFALNHLKKQESRKAELQDEFVAVNEKLKEYIQHGGENFDALNAKYEELSAQLDAEEAAEFDRKRRIAKMQKILQTLKKTDSVLETFDESVWNAVLENLTVFHDGSLVFLFRDGTEIKV

SEQ ID NO: 25255 - protein, 535 aa, synthetic construct
MKKKQPNTRHGRAAIYARYSSHNQREASIEQQVKACRELAVRLGLDVVETYEDKAISGKSDRRPSFQRLLRDAEKGYFDCVLAWKSNRMGRNMLQAMTNEARLKDWGVRTFYAEEDFDDTAAGRFALRNMMNVNQFYSENMAEDITRGMMDNASKCLSNGALPLGYKAGENARIVLDKAQAAVVQEIYTRVACREPFVDIAADLNRRGIKTKRGGPWTKSSFYTICRNERYRGIYIYDDVRVEGGVPRIVSDGLFYRVQEVLKVKKTPQSARHHTGAEDYLLTGKLFCGKCGRPMTGVSGTSRSGEMHYYYTCQKRRREHACDKKNVIREQIEKSVAQAIKQYMLTDEMIQHMADATMAYNARQEKDLHLQDLQGQLAAVKTSAANLLKAIEMGVITETTKARMVELEQEQGRLNAQIENARAELVPITRDNFVSLLHIYRDGDINDSKYLASLFETFLVRVDLYDDHFLIWFNPLGQKTPADIPITSIENGDVDEFFDECRSENVFDWGGKWSTKIKTPAVPRRVFLFWCSVSC

SEQ ID NO: 25256 - protein, 574 aa, synthetic construct
MRKKKIDAPKEKPQRAAIYLRVSTAYQVDRDSLPMQRKDLVGDCEYALNISDYTIFEDAGYSGKNTDRPAFQKMMMQIRNGMYSHLLVWKIDRISRNLLDFAQMYEELKMLGVTFISRNEQFDTSTAMGEAMLKMVLIFAELERKTTAERVTATMISRANDGTWNGGRVPFGYDYNKETQTFSVNGDESFIVLEMYDLYEKTDSLVHTARELNDRGYVSRQHNPFSPVSVWTILRNPWYIGTYRYNYYKIPGRKAIKDESEWVVIPDHHTPLVSKERFDRVQKMLDSNARYRNTPGRSATQKNVNIFSGLIWCACCGAAFTASPGKLHASGYRSAKYGCPNVRKTKTCNAKYTSDTVLGEFLLNFILNVINAQKSFDQIKSPADLEARLLRGDTFKNVAGIDSASVAALYEMLAEYSPADSVLLKKPTVKKNLDPELRKLRADKRKTERALARLDHIYLYSNKQMSDKEYLIKKNDLMNDLKEQDKSIGLLTSESWAQSLSDDDFLEQASSFIMSQRLQEREYIYFQGLAECTEPSVLRSFFLSIVDSVRMRNGHVETLTFKNGISHKFTYLAI

SEQ ID NO: 25257 - protein, 518 aa, synthetic construct
MKNMTVIPPKPQKGNSAAKEEVQRLRVAAYCRVSTDNEEQASSYEAQIQHYEEFIKTNPEWEFVGVYADEGISATSTKNREQFNAMIEDCKAGKIDMIFTKSISRFARNTLDCLKYIRLLKEINIPVFFEKESINTMDAKGEVLITIMASLAQQESESLSKNTKMGIQYRFQQGKVMVNARNFLGYDKDEDGHLIINPAEAEIVKRIFREYLEGASCMKIARGLERDGIRTARDNPRWHDSTVRKILENEKYMGDALLQKTYTIDFLNKKRGKNNGTLPQYYIEDDHEAIIPKDIFMRVQEEMARRSSERDLNGRRQGFSANHAFSHMVTCECCGEHFRRLHWNNRGKKTIVWRCKTRLEDKTRCPARTVSEDELQQGFIDAVNEMLGNSDEYLKKLKSNLKTAISLANPQSVEALADRMRQLQQELIDRTESGTNYDDLAEEILHLRELQEQTVMDDTARAAHRERIQELLHFINSQPRTITEFDEALVKKLLESVKVCKDFLEFRFKSGVTISVEK

SEQ ID NO: 25258 - protein, 516 aa, synthetic construct
MIVRTIEAQPAEKKKLHVAAYCRVSTDNDDQRESLETQKAHYEAWIRLHSEWECAGIFYDFGITGTKADVRDGLQALIYECRIGRVDYVLTKSVSRFSRNTTDCLALVRELLSYKVPIYFEKENLDTGSMETELVLAILSSLAQEESESISQNVKWGNQKRIKSGKFRAGTAPYGYEFDSDGRYVIIPTEAEIVQFIFESVVSGTGTHKICKELDRRCVPTRKGGKWSTTTVMGILNNEKYVGDVRYNKTYTDDSFRRHRNKGDVESPEVKDHHEAIISRELYATAHDVLEQRLRERGIRREDEKYQRRYAFSSKIICGACGSTFKRQVISSGISWCCKKHIADKDSCSMKFIHEEAFQSAFTTMLNKLIFTRKILFRPYYNALRVAGSDENLQRIMCLKASIQKNNDRKCKLKKLRVKSIIDAVMYNQELNRMEKQNEEARRKIQSLGNIESGLMLWETEKLLHFIEAAKMLDTYDEKLFTSFVDSIIVYSRDSVGFKLKCGLTLREELCTDTKS

SEQ ID NO: 25259 - protein, 533 aa, synthetic construct
MQTGKITALYARFSFDDGIDTESGSIEHQKALLKNYAESNGFTNISYYADDGYTGTNFNRPDFQRMMDDIRNGFVETVIVKDMSRLGRNYLMVGQYVEIDFPKYHVRFIAISDNVDSAKGMSELLPINNLMNEWYSRDISKKIRSMMRQKGNSGQHITSKLPYGYYNIPENKQEWLIDEEAAEVVREIFELYVYHAMGTKQIAQRLTAEKRVGITYHKKLCQGVEVTGENMYSWCSATVASILKRQEYCGDTVNFRTQITSYKNKTVIYNRSDKIKIFPDTHPAIISRELFQMAQDRREKTIRHPSRPHKYLFGDYLYCMDCHARMHGRQCGTKREEALYCYECTTYRKSKGCYFHGVPEKYLEDEVLKAIQRIISMANSNPDAFYKTIQKHMEKKSDDSKAVISAELEKSQLRITEIDKYIQGLFEAKVRGEIDGSLFASLKKTYDEEKKQLNILVAELIEKLNEKNESSNKVKLFMQAIRKYDVVTELTPQVLADFVEHIEVGKCQSTSTKLPFSKRDNAISVFFWGIGIF

SEQ ID NO: 25260 - protein, 507 aa, synthetic construct
MNVVIYARFSSSGQREESIEGQFKVCTEYAENNDYTVIGTYVDRALTGRNDKRPDLQRLLSDSNNNNFQAVIVYSIDRFGRNLQQCLTNENKLKQNGVALFSATEHFTNDPAGIFYRNLMMAHSQYYCDELSQKIRRGMDINAEKCLSTGGNIALGFKVDDKKNFQIDPDTAPIVQYIFESYASGKTVTEIINQLNSQGLKTSRGVPFNKNSLHSMLKNKRYIGIYTYKGTEKIGGMPRIISDELFNKVAEIMDKNRKAPARARAKVEYLLTTKIFCGYCKEMMTGFSGTGKSGKVYRYYVCNGTKKKACKKKKVNKEYIEDLVVNECRKLLTNENIKKIANSISKISESEKDTAHLKFLKKALSENERKHKNALNAIIECDLESVRKSLYEQIPILEKEHSELQKQIALEEKNFPVLTVPMVHFFLRKLKDGNVDDIKYRKTLINVFINKIYLYDDKLTIIFNSGDNPVTINDLLLSEIEDNSKKAEGLFLDGVAPPYLHLYFDTI

SEQ ID NO: 25261 - protein, 543 aa, synthetic construct
MTDKITALYCRLSQDDMLQGESNSIPNQKAILKNYAEDNGFCNTVYYVDDGVSGTTWEREGFKAMLADIEEGKVGTVITKDLSRLGRDYLKAGEYIEIIFPDHDVRYITINDGVDTLKSENELMAFKNIFNDWYARDTSKKIRAVFKAKGQSGKHLSNPIYGYKHSETDRNLWLIDDEAAEVVRKIFHLCIDGYGPAQIARILTEEGIPTPTAYALSQSRDNGHKNANLSRWGMETISGILEKPEYAGHTVNFRTHVKSYKNKKRVDNPKEDWLIFENTHEPIVTQQEFNLVQELRKNKRRPTKHEEVNPFSGICYCADCGKKLYLCRAITMTADQEHLKCGTYAKDKNGCTIHFIRTIVLKEIILGELNKMVAFVKNNEDEFVQAAMDNSVQKQSSELAKSRKKLRDAEKRIAELDRLFIRLCEDNVSGKISDERFSIMSAGYEDEQKKLRATVAELTDFIETAEQKSADVTAFIQVVQKYEHITELTPEIMHELIEKIVVHAPDKSSGHRTQKIEIHYSFNVAVTNAVADSMKYDKKRKAA

SEQ ID NO: 25262 - protein, 472 aa, synthetic construct
MKDKIVKKVEHLPQLTDVKRTDKLIQRVAAYARVSTEKEEQQTSIEAQKDYYSTYIKTHVGWEFVGVYADEGISGCSTKRRVQFNQLMNDCRDGKIDMVLTKSISRFGRNTVDTLNAIRELKSNGIGVYFEKEQIWTLDSKGEFVITLMSSLAQEESRSMSENILWAVRKRYAQGKGSFAYSRVLGFDRGKEKFEIVINPKEAVQVCKIFRMFLQGLTPHTIGIAMTAAGIPSPGGKDKWNSATVRRMLSNEKYKGDMLLQKEFTVDFLSKKKKKNEGELPQYYVSNNHEPIIDPWLFDYVQEQLQKRTRTKEHRYSGIGYLNSKIFCTKCGAAFGPRPWHSTSYNNIVWQCRNRYSDVKCKTVNIYDNLLFYVLHDVARKKIVAKDIRTAIVEFAVDEVSPKKLKAIEQYLTDFETMSPLEMLSDADDLSFVIQRIMVKPDRQLEVKWLDGSMDRYEIPKYTPRRGIEKPV

SEQ ID NO: 25263 - protein, 526 aa, synthetic construct
MDEYCLYLRKSRIDLEAEANGQGDTLARHRADLLKLARKRGLNITGCYEEVRSGESIAERPEMQRLLNDVEAGRWTGVLVMEVERLARGNTTDQGVVADTFKYSDTKIVTPNKVYDPGDEFDEEYFEFGLFMSRREYKTINRRLQRGRRASLSEGKYIAGKATYGYERYKLSGEKGYSLRIIPEQAEVVRQIYDWYVNGEFLPDGTLRPLGSYTIAKRLDARGIPSPTGGKWPPCTVKDILTNPTYIGKLRWSYRPTVKRMVDGELVKTRPVDRSVHLSDGRHEPILDEVLWHRAQLMLKNRSHAPVPKSTNIRNPLAGLLICSKCGRSMERRKFKHGRDTVACPNKDCNCKSSVLEEVEAGMLDSLRIWLSDYKIKLAQSQETISHTGPTAEQEITSLQRTLGTLQAQMDNLYNLVEQGVYSTDLFLQRSQALTARMAEVNQQIETTQAALTASRRIARNRFEIIPRIERVLALYPTLTDPREKNTILKEVLEKILYTKTTGSRWEASDMNLYVFPRVETDGEQL

SEQ ID NO: 25264 - protein, 513 aa, synthetic construct
MKKQPTGGNRLVAYYRYSGGSHQTEQSIEGQRRDCETYARIHGMVILHEYIDRHISGKTDDRPEFQQMIADAGKGMFDYVICWKTDRIARSRYDSIIYKKKLRDNGVELLYAAEANVEGSGGIIVEGLMEALAEYYSAELAEKVRRGMRESALKGKAIGSSRPLGLTVDKDKKYIIDPAGAAAVRYIFEQYAAGAASSAIVAHLNEQGLCTSRGNPFNKSSVVRIIQNEVYRGVYVSPKFDVRIEGAVPAIIDDDLWERAQKMFIRNRQSRSPRNDRADYILSGKLFCGECGTAMKGVSGHSSNGEVYFYYNCPCKDCHRRNIPKDELEGLVIRTVCNDVLQPDVMDRIADSVIAAQTAELNQPNPEKEALQHELADVQRKAKNLLSALENGTAGAMLTNRLAELEQQADTLSYQLSSLESEPKYPVFSKEEVLYLLEQFLIAPSEKTKAYRRRLIDTFVSKIEVSNTELTIYFNISEEDCGKMKKAPQSNQPEGCSTEKQMVRVARIELTAS

SEQ ID NO: 25265 - protein, 565 aa, synthetic construct
MTCNPIRFDSTEPERLGKDEKIMKSNQQKITALYCRLSQEDELEGESNSIKNQKSMLEKYAADNGFGNCRFYIDDGYSGVSFERPDFKRMIADMEKGEIGTVITKDLSRLGRDYLKTGTYIEIIFPQNDVRYIAVNDGVDSEKGCNEFIGIRNYFNDFFVADTSKKIRAVQRAKAERGERIGSKVPYGYMKSEDNRLVPDPDTAPVVKRIFDMYVNGVGTRTIAMTLERDKIMSPSAYAYYKYGRKESGLKLNNPYLWSDVTLRGMLVNEVYIGTTANYKTTTKSNKLKKQIHNNRKDWLVFENTHEPIIDKSTFEMVQKWFAGRRKPNKSGKTDVFAGLVYCADCKSRMYLRRVLKYPRENNYLCKTYQRYGNNHCTAHRISEQDLHAVILQKLREVTAYVRENPEEFYEIASRNARVEAEREMKTYLREKEAAEQRIAELESIIRRLYEDRVLGRISVERYESLSSGYEAEQSELKAKLNEMNAVLDENEKREQLIQNFIENAKKYIDIQELTPEILRAFISRIEVHEKAKWHSTECGNDIVIYFTVERKEQLNIWHKEIKTA

SEQ ID NO: 25266 - protein, 498 aa, synthetic construct
MTAVIYARYSSDNQREESIEGQIRECTAYAEKNGITVVKHYIDRALSAKTDNRPDFQQMIKDSEKRLFDIVLVWKLDRFARNRYDSAHYEYQLERNHVKLVSATEPISDSPAGIMVKSMLTGMAEYYSAELSEKVVRGMTENVLKGKYNGGTIPIGFKVDEEKFFQIDPLKAPFVVEAFQRYNDGATMKELMNWLNDSGVTTNRNQKFTYNSVQKLLTNKRYIGENHFKDIVMPDSIPAIVDKDLFEEVQLKIKKNSRAPARHKAEDDYLLTTKLFCGMCGAMMFGECGTGRNKVVHHYYKCATAKRFKTCKKKTVRKEWLEDLVIAETMKLIQDDAVIDAIVAEVMELQDQENTTLPLLEKQMREVENGIENMLNAIQAGVLTNSTKSRLEKLEAQQKELEVRIAEEKIARPRLSENQVRFWLTRFRKLDPNVKSHRETLINIFVNAVYLYDEKVLITFNYKDGTKTITFDEIAAKDAPEGNGSDLGCFAPPRTPVL

SEQ ID NO: 25267 - protein, 569 aa, synthetic construct
MKQSSNKKSREATAFLYERLSRDDNLEGESYSIGNQKKLLTKVAKEKGYTNLVHFLDDGISGVTMNRPGFVEMMQQLEQGKASAVFVKDLSRLGRNYIEVGRLTEEFFPDHDIRLVAVSDNIDTAEGENELAPIRNLFNEWYARDISKKRRISNKIKGNSGEPMGLPPYGYIKDPNNPKHWVIDEEAAQVVRRIFDMTLEGFGTEQIATQFEKEGILTPQAYWIQKGIGRPGRSKIRPATKWNGSTITHLLYQQEYCGDVLNFKTYSKSYKNKKRIHNDPENWVVFQDVHEPIIERAVFEQVQQKRGKMRKRRTSNGEHNMFSGLLVCADCGCNLHFHFNQGNPEIKYFNCSNYKGNRGTCQSTHYIRVDFLEEVVLGEIRRLTKFASLYEDDFLKAVIGHSQQADEADRKLKEKELKALLARDEELDGLFERIYEDNVSGKISDERFSRMSRRYEDEQKELTEKIKQLRSEIEKQSSRTMTTDMFISLVRKYTRAKKLTPRMLNELVEKIEVFNAEKVNGVWEQRLRIHYNCVGTIEIPSALPLPTPDVSVNTRKGVVVNYAPCDVAI

SEQ ID NO: 25268 - protein, 492 aa, synthetic construct
MTAVIYARYSSDNQREESIEGQIRECTAYAEKNGITIVKHYIDRAISAKTDNRPEFQQMIKDSDKKLFDIVLVWKLDRFARNRYDSARYKTQLKKNGVKLMSATEIISEGPEGIILESVLEGYAEYYSADLSEKVIRGMTENALKGKFSGGAIPFGYTINADRRFEIDPLTAPFVAEAFQRYNDGQTMREIRDWLNEKGIKNKRGGPMSFNTIQHMLSNRRYIGELKYRDILIPDAIPPIVSVELFDDVQEKMLKNKKAPARRKAEDNYLLTTKLFCGYCGALMFGESGTSRTGEVHRYYKCATAKKHKGCKKKTVRKQWLEDLVVNQTMQLVRDDAAMESIIAKVMELQNKGNTNIPLYEKQLRDAESGIQNMLNAIQAGILTSSTKERLEQLEETKRELEARIAEEKLAKPKVTEEFIRFWLLRFRKLDMSLKDQRQALVDTFINAIYLYDDKVLITFNYKEGTQTVTFGEAAEVASEGNGSDLDCFTAP

SEQ ID NO: 25269 - protein, 530 aa, synthetic construct
MEQYLIYLRKSRSDIEAEAHGEGETLSRHEHTLLELAKRQHLNVTDIYREVVSGDTIAARPMMQRVLSEVEQGVWSGVLVMEVERLARGDTIDQGIIAQTFKFSGTKIITPIKTYDPDNEFDEEYFEFGLFMSRREYKIINRRLQRGRLASAKEGKWPSGLAPFGYRRVKLKNEKGCSLEPIEEQAAIVRMIFDLYTVGLQDEDGSARPLSLGSIATRLNDMHIPSPSGSQWARITIRGIIKNPTYIGMVRWGSRETKKKVVDGKVVSVRGPADPEKECVFKGIHPPLVPKETFELANDKLARSENTSTHKEKVVRNPLAGLLVCSECGRQMMRMINPVHPDMPVVRCPRRGCPNCSSYLPIVEERVIQGLSEWMKGYELEWSSAAASSSVSSVGVREKALASAEAELRKLQQQLERTHDFLEQGIYDTDTFLSRSRMLSDKIAAAKDSVTRCSRELTEEKLRETSRRDIIPKVKNLLDVYPLLETAEEKNALLKEVLEKVVYQKLNEKRKKSPDGFTIEIYPRIPKSEK

SEQ ID NO: 25270 - protein, 574 aa, synthetic construct
MRKAKENPQKEKPQRAAIYLRVSTSYQADRDSLPMQRKDLVGYCEYALNISDYTVFEDAGYSGKNTDRPAFQKMMMQIRNGMYSHLLVWKIDRISRNLLDFAQMYEELKTLGVTFISRNEQFDTSTAMGEAMLKMVLIFAELERKTTAERVTATMISRANDGTWNGGRVPFGYDYNKETQTFSINGDESYIVLQMYDLYEKTDSLVRTARELNKLGYVSRQHNPFSPVSIWIILRNPWYVGTYRYNYYKIPGRRAVKEESEWVVIENHHSPLVSKERFDHVQKMLDSNARYRNTPGRSSKQKNVNIFSGLIWCSCCGAAFTASPGKLHASGYRPTKYGCPNVRKTKTCNAKYTSDPVIGEFLLNFILNVINAQKGFEKINSPADLESRLLRGDAFRDVAKIDSASVAALYEMLSSFSPADSVLLKKPTVKKDLDPELRKLRADKRKTERALARLDHIYLYSNKQMSDKEYLVKKNDLMTDLKELDKSIGLLTSESWAQSLSDDDFLEQASSFIISQRLQEREYIYFQGLAESTDPAVLRAFFVSIIDSVRMRNGVVEILTFKNGISHTFTYKAI

SEQ ID NO: 25271 - protein, 519 aa, synthetic construct
MKKVTKIDKIQPSQASKKKLRVAAYCRVSTDSDAQLESLDAQKEHYKNYITSRDDWTFAGLYFDEGITGTKADKRPMLLRLIEDCKAKKIDFVITKSISRLSRNTTDCLEIVRTLLSLDIPIYFEKENINTGSMESELFLSILSSMAEGESASISENNKWSIKKRFLDGTYKLGYVPYGYRWKDGEILVDPAQAEIVKRIFRELLSGKGTEAIAKELNQEQVPTKKGGRWTSTSIRDIIRNEKYTGDCIFQKTYTDSNFNRHKNDGHLDQYYVPDHHEAIISHEDFEAAAALIEQRASEKGIKKGNAKYQQRYAFSGNIICSECGNTFRRRIHSSTYGKYAAWVCNTHLEDTSRCSMLYIRDDDLKLAFTTMINKLVYCHKLVLKPYLKALQENTGDASLLNIQQLEILLEQNTEQRETLHKLMGQGYIDQILYTQENNALLSQAGEYRSQIELLNRSQSLDATKVYETERLLHFCERGEMQLEYSEELFELFVDHIEVYSRQKIGFALHCGLILKEMI

SEQ ID NO: 25272 - protein, 573 aa, synthetic construct
MAKVKLPDKPRVAIYTRVSTMHQIDKDSLPMQRQDLINYARLILNTEDYVVYEDAGYSGKNTDRPKFQEMMQQVRLGMFTHILVWKIDRISRNLLDFATMYSELKQLGVVFVSKNEQFDTSSAMGEAMLKIILIFAELERNMTSERVTAAMLSRAANGQWNGGRVPLGYDYDPETKTFTINESEAAVVKIIHDKYEQERSLVSLARYLNGHGYRTRTGCTYSPSTLLIILRNIFYCGDYRYNVLKDGDRQKRKKESEWITVKDHHPAIISREQKEEIARILKENRRLECERRGIYSKKKNVHVFGGLVICGNCGHAMTSTIRPADQDGIRWSVYVCPTKRRSEYLCKGRATSEVVLGEFVFNYILNMLNVQKNFDSINSVEDMEKMLLSGSTFRDVDGIERAGLDDLYNMLASGLTEKAPFDSSVEVRKKPVVSDIELENLNTEKTRIERAAERLQNLYLYSDDSISQKDYIIQREKLMSQLAEVNEQIGMVMSNADEKDVSDEEFVHAASKFILTQKLEGRTYIYYKRLATTVSREVLRSFVMSIIENITIYDGRVQTIVFKNGLSHTFILK

SEQ ID NO: 25273 - protein, 534 aa, synthetic construct
MARKKKQASGDAVIYARYSSHNQRDVSIEQQIEACRKYAASLGLKITVTYEDRAISGRTDNRPAFQRMMNDAEDGKFCYVLAWKSNRMGRNMMQAMVNEARLVDCGVKVYYAEEDFDDSAAGRFALRSMMNVNQFYSDNLAEDVRRGLMDNASKCIANGKQPFGYKRGSDGKVVLDEPAAAVVREVFTRVASGETNTSIARDLNRRGIKTGSNGEWNKCSFHGLCTNERYRGIYIYGETRIEGGIPRIIDDRLWHKVQEAIRMRNRRKNGRHRPGEDDYLLTGKLRCGHCGGYMIGMSGTSKTGTIHHYYACQNRRVGRTCDKKNIRRDIIEPAVAQAIKQYCLTDDVIEWIADKTIEYWEDEDRKLQITSLENELADIKSSISNVMKAIEQGVITSTTRDRLIELETQQSDLSAKLNSAKEDLVHVDRKNLISSLLLFRNGDVYDRQYQEDLFNTFLVAAYVYDDGNRLKLVFNCFGDSNTVDLDLCSDENNDNSSISNEANCGNLFAQALKQSTKKNQPSMFGWFFFSLFPL

SEQ ID NO: 25274 - protein, 516 aa, synthetic construct
MKAIYVRQSLDKKDSLSIDAQIEDCINLCKRNGWNDYKVYKDKGWSAKNLDRPAFRQLNQDVQNGLIDGVICYKIDRISRSIRDFVNLIVDYQDLGVHFISFADNINTAAPGGMMMATLFVSLAQMEREAIITRVTDNYYYRCELGFWGGGPAPYGFRLAKTTENGQKHTILEPVPEEAEVIRTFFAWYLEPGATVRSIMNRAHLAGMQTRSGSDWTSRVLSDMLSKPLYAPNSMDIYNFYASQGVRVKISPEQCDGKQSLNIFGMRDRNSAHPKRSRPVSEMTLAIAKHKPIVDSDTYLKVQYKKKSRLAVTPRAGTSRTAVLSGLVRCGYCGRAMSPSGAKNGRYFTCSGRRNYAKGVCQGKSVKMDFLDDYVLNDLADFISQPEIKSMFKDGKAQRIPSSEQAKINEYKQRIATIDIDIQKLLDACLTSGDVAVKYLNERIDLLDTEKQNLQAEILAIQNKSNRKLELEGLDINSAPTALAGGEFDTIKYLCNFFIEQIIFYDRDNVQIRYKM

SEQ ID NO: 25275 - protein, 519 aa, synthetic construct
MVIAIYPRKSVYRDNSDSVQVQVQMCKEYAGVIYKDKDLQFRVYDKDEGFSGKNMNRPSFRELMQDVKNNEIDVVMVYKLDRISRNVQEFSSMYEIFQQHNVSFVSVKESFDTTTPMGRTVMYILAAFAQLERENTSERVADNMQALGMSGKWTGGTLPTGFTSVRRRMGEKEHSFLMVDKNTIGIVKRLYGLILDGYSITKTERYCRDNGIRSRSGKFLNTSQIYGILTNPVYCQNAPDAYYYLQAKGCTLPEPDLFDGKKGLIGYGRTKTGASSQKIQDKSNWIISIGIHEPVIPATQWIAVQNRMGVNRFIHTSVKHERGILRGVIRCRCGARMDVRTYTKNGISFSYYYCSDMARQGKQKCNSGYIRIEEVEQSFLQQLRDIRLTPACIKMRELPSVVTDIKAVKSDLQTTEESIHNLTLALAQAMDTAASGYIIKEIAELDKKKNSLELSIRKAEVRMQAERDAAATRKDVYNSICYLLDNFDDISYTGKNELIKKIVKTCILDTETKSLCIVF

SEQ ID NO: 25276 - protein, 467 aa, synthetic construct
MIRMARSVTVIPARNRQRETGRRAVQEKKIRVAAYCRVSTDQEDQLHSFEAQVDYYTKYINDHENYEMAGIYADEGISGTNTKKREQFKRMIADCEGGKIDLVITKSISRFARNTQDCLAYSRKLKNLGIGIIFEKENINTLDSTGELLFTILSSLAQDESRNISENCKWGIRTKFKNGEMHLNTFKFLGYDKDEKGKLVINKEQAKTVRRIYRDFLIGINPAQIAKELTEEKIPGCNGQTKWYPSTIVGILKQEKHMGDALLQKTYTADFLTKRQVKNNGEIAQVYVKDSHKGIIDKETWNAVQEEFERRERFMKDHGTDRYSYGADCMPFCEKVFCGECGSLFTRHSWRSRGIVQWQCKNHRKDGKVACTNAYVDNADLEKGFVKAFNRLVTDRDKHMERWDQMKTDGSPLEKIRAEQMMEATENEPLGRFVPEIAQLVLAEVTVLGAKKYEFFFLEGSRIKVSV

SEQ ID NO: 25277 - protein, 498 aa, synthetic construct
MEIQIREGNREQKRKLRVCAYCRVSTDADEQENSLENQIRHYETVIKANPSYEYAGVYSDFAISGFKEKRPGLQKMLADAQKGKIDLILTKSVSRFARNTSIVLEATRKLKELNVGVFFELQNINTLSGEGELMLTILAAFAQAESESGSAGAKMVYQRKYEAGIPVQYLERSFGYTKDERGVYIADESEAVWVRKIYEMAADGYTPATIKRYLNENGVKTVGGTKWIDSTVFRLIENEIYKGDYIMHKHFVNEERKLVRNRGEVDAWYIEDDHEAIVSPELWQKAQDAIEVKRDYLAEGSVIEEFTEDNYPYMNRIFCAKCGYPLYKRIYSNGNRLNWGCSGTKRYGKSFCGGINIPDGVLRKAWHFDGNLYIDEKPSVKGTKEFSYLKESSWKRRHKKKVPEAIPENTEEAYPYRKKIFCGLCGSRLVRHVNPKSHKVIWICNGAKRKGVAFCMGTRIPDSVIRGWGEIKKDIYIQRKDDKNGKKRYSYTSKKPTA

SEQ ID NO: 25278 - protein, 433 aa, synthetic construct
MSGRITAVSKPPKLERKKRVAAYARVSSGKDAMLHSLSAQVSHYSDLIQRNSDWLYAGVYADEAKTGTKDSRADFQRLIADCHAGKIDMVITKSISRFARNSVTLLQTVRDFKAWEVDIFFEEQNIHTMSADGELMLTILASYAQEESRSASENQKWRIKRNFEEGMPWNGAMLGYRLKDGRYEIVPKEAALVRRIYNEYLAGDGYQAVAKRLTEEGVPSRFGGKWNQSVVSKILSNYTYTGNLLLQKTFRENHITKKTVINHGELPKYHAENTHEAIIDMKTFHAVQTEKARRAAQFNKKPAPRTTYPFTSLLVCDNCGKNYRRKTTKTGIVWVCGTFNTLGKSACASKQIPETTLQQVTAEVLGVKAFTREQLHSRIQSIRVCNGNILIFCFKDGSEVTRTWKDRSRSESWTDKMKEAARQKALERSKHNA

SEQ ID NO: 25279 - protein, 526 aa, synthetic construct
MPKVTMIPATINPLTHLPKVAAQKRRVAGYARVSTDSDEQFTSYEAQVDYYTKFIQSKPEWDFVKVYTDEGISGCNTKKRDGFNSMVSDALAGKIDLFVTKSVSRFARNTVDSLVTIRKLKENGVECYFEKEGIFTFDGKGELLITIMSSLAQEESRSISENITWGQRKSFADGKVHLAYKRFLGYEKGEDGRPTIVESEAKIVQLIYRLFLDGKSQASICRYLEDLGIPSPGGKDKWSKTTVTSILQNEKYKGDALLQKSFTVDFLEKRMKPNEGEVPQYYVEGSHPAIVDPDEWDHVQTEFARRKALGRAYSGKSVLSAKLVCEDCGGFFGSKVWHSTDRYRRTIWQCNGKFKGEERCHTSSVDTETVQRLFIQAYNRMMENRERIIKDCEAMRRALTDFVELDAEIERQLEETQVVAELVKAAVKENASTAQSQEAYLRKYEALTERYEKAAAELERLQNLRTTQSQQDKAMALYIRTLKKQPVVLREWSATIWTVMVEKAIVHRNGAITFVFKNGTEVKVGE

SEQ ID NO: 25280 - protein, 537 aa, synthetic construct
MARKKKVSPGNRLVAYYRYSGGSQQTEQSIEGQRRDCEAYARQHGLTIVHEYIDRHISGRGVESRLAFQQMIADSSKHLFDLVICWKTDRFARNRYDSAVYKKKLRDNGVRILYAAESSVEGPEGIILEGLMESLAEYYSAELAQKMRRGMRESALKGKAINPNRPLGLTTDEHKRFIIDEKNAPTIRFIFEHYAAGESSASIVEQLNAAGLRTSKGNAFNKCSIPRIIQNEAYHGVYICKAYDVRIDGAIPAIIDDDLWKRAQKMLTLNKQHRAPHSSHADYLLSGKLFCGCCHSLMRGISGHNCRNDVYYYYACGNKVDGGTCKKKNIPKDVAENLVVNAICENVLRPDTLEDLADAIAAAQQADVNQPDPERAMLEQGLADVRRKINNIIESIENGTASSRLSARLADLEQQESTLNYQLESLKEIHPPVLDRERILFLLEQFLISPNERTEDYNRRIIDTFVNRIEITDTEILIYFNLSEASASEKQKNSQPNNCSTGNHLVQQSWTNPNFFPPPNQRSKCPQNGRFVCHPCS

SEQ ID NO: 25281 - protein, 517 aa, synthetic construct
MTAVIYARYSSDNQREESIEGQIRECTAYAEKNGITVIKHYIDRAFSAKTDNRPEFQQMIKDSGKKLFDVVLVWKFDRFARNRFDSANYKMILKKNGVHLISVMEPIAEGSQGILVETLLEGMAEYYSAELSEKVIRGQTENALKGKCTGGTGTIGYKIDEDKFYHLDPLTSPLVLEAFQRYDNGEKMVEIVNFLNDKGVRNMQGGKMTHSSVNTMLKNRRYIGELSFRDIVVPDAIPAIVPKDLFDRVQKRMDKNKRAPACGKADEEYLLTTKLFCGKCGALMFGESGTSATGRTYYYYKCANVKRRKGCNKKTVQKDWLEDLVVRETMKLIRDDAVIDKIVQLVMDVQNQENTTIPLLEKQLREVDKKLDNLMKAIEDGLYTRTTKERLEALEIQKDELTEKIADEKLKKPSFNEDFIRFWLLKFRKFDISQKKQRKALIEIFVNAIFLYDDRMLITFNYKDGTQTVRFEDTLTADSAEEKSSDLSSSAGPDDSQSNNCSAGNFFVFRKQTLRKD

SEQ ID NO: 25282 - protein, 576 aa, synthetic construct
MRRKNISKRTVDNTQRLKVAIYIRVSTTYQVDKDSLPMQRKDLIAYSSLVLGIEDYEIFEDAGYSGKNTDRPAFQSMMQRIRTGEFSHVLVWKIDRISRNLLDFAEMYEELQSLRVTFVSKNEQFDTSSAMGEAMLKIILVFAELERNMTSERVTATMISRANQGLWNGGRIPYGYNYDSDSSTFSIRDDEAAVCRIIRDDYLENKSLVHTSRLLNSIGHKTRAGADWSPTTVWIIIQNPFYAGMYRYNRYKGTEYRTVNPEDEWVIINDHHPAIFTLEEHEKMLDILQSNSRTKNISGQKHRAKNVYVFSGLLYCGKCGSRLVSTPGRVQADGFRTAIYSCPKKRKTHECDNPSINDLIVGEFVINYILNMLNAKSSFSSISSPVELEQRLLSGSAFNGITHISETGLHELFNLLSRYGSDKSYSFSISAPRKKKASVDPEIASLRKDKEKQERALKRLQDLYLYSSSAMTEKDFIIQKMEISKKIEDINARLGMITHDVDSTLSDEDFIKQASHLLINKKLQSKEYIYYKNLAQTVSPEILKTYMETILDSIYVTDGRITSIVFKNGLTHKFDY

SEQ ID NO: 25283 - protein, 514 aa, synthetic construct
MRKKKVKDGNRLVAYYRYSGGSGQTEQSIEGQRRDCENYAKLHGLTILHEYIDRHISGKTDDRAAFQQMMNDGDKGAFDMVICWKTDRFARNRYDSAVYKKRLRDNGIEILYAAESNVEGAEGIIIEGLMEALAEYYSAELAEKMRRGMRESALKGQAINRCRSLGLTTDENKKYVIDEKTAPTVRFIFEHYAAGESSASIVEQLNAKGLRTSQGNPFNKCSIPRIIQNEMYRGVYTSKAYNVRIEGVIPAIIDDDLWKRAQAMMKTNRQLKAKYEPKAEYLLSGKLFCAKCGCTMKGVSGHSGGNDEVYRYYACSNPQCRKRNIPKDDLEGKVIRSICDHLLQPETMELLAETMVDVQKADMEKPNAERDVLEQELWDVRRRSKNIMDAIETGSANPQLVARLDDLTQQENTLTYQLSTMEAEKPLLFTKEQYLFLLQQFYAQPTEQDDAYKRRLINTFVTNIEVSDSELLIYFNISEETENKNKNASQSNFDKSSSTEKRLVRVARIELTAS

SEQ ID NO: 25284 - protein, 499 aa, synthetic construct
MPKTEEKQAAKAVIYARYSSDRQREESIEGQLRVCEDYARRNNITILHTYADRAMTGRSDQRPEFQMMIRDAATMAFNVILVYKLNRFARNRYDSAKYKHKLKKYGIKVVSAMENIADDPSGILLESVIEGMAEYYSAELSENVLRGMTQNALEGKWPGGVIPLGYKLDKGGRLIINEEKAPIVRMIYQMFLDGMSVARIERKLNDKKYTTDAGKVFSRSRVYYILHNERYIGTFQWKDIKKEGIIPPIISKEAFHAVQERINAMKSSSYRTNNNYLLAGKAFCASCGAKVSGTSGKSQNGNKYCYYGCSHHHRSARYEYCETKNIRADVLEKLVCDKTHEILSSKKAIKEIARQAVKLRPRDESELEIRAIKNHISSCQKKIDNCIKAIENGVMSNALVESLNENERTLDVLKEKLAKASLMQGSGLLTEEKIQFFFETIREKAKETEKYNDILLTSLVRAVYICNEYVEIQYNYAEQLPILTNPVRIESCSYKCTNG

SEQ ID NO: 25285 - protein, 582 aa, synthetic construct
MRVSVNLNAQKPDTTTNAVIYARYSSHGQTEQSIEGQLAKGHEYAAAQGYTVVHEYIDRAMTGRNDNREAFQKMLSDTGKHQFQVVIVWKVDRFGRNREEIAFNKHTCKKNGVRVEYVAESLPNSPEAVILESVLEGMAEYYSIQLSQNIRRGQLESAKKCQCVGGSVPLGYTLDSDKHFVIDPQTAPVVKKIFDLYAEGATISEITGQLNEQGIRTIRKQLFTKNSLTKLLKNEKYIGVYTYKDIVRVEGGVPAIVDKSTFDRVQELLKINRRAPSHTWTKVEYLLTDKLFCGHCGSPMVGESGFSHTGAKYSYYGCIKRRREKACDKKPVRQDWIEALVLDETVKLLHDDELMEYIIDRTWEYYQITDKVQEEKAVLEAQLAEVDKAINNLVRAIEAGIFNAATKSRMDELDAQKAALTASLADLELTSGIRITRDHIEYFLLRLRDLDVKDRECQKRLVQTFVNAVFVYDDGRVKITYNYSGQSSTITLNQIASAEKGKGFVCCLPCSTSSPRFPRGVAALFLFWGKSGVNRLPISAVLCYNGSENGRGGRKNEKAACCVPDGARLLGLCGVRGRNAGR

SEQ ID NO: 25286 - protein, 537 aa, synthetic construct
MKQQIYNTALYLRLSRDDELQGESSSITTQRSMLRLYAKEHHLNVIDEYIDDGWSGTNFERPSFQRMIEDIEAGKINCVVTKDLSRLGRNYIMTGQYTELYFPSHNVRYIAIDDGVDSEKGESEIAPFKNIINEWVARDTSRKVKSAFKTKFAEGAYYGAYAPLGYKKHPDIKGKLLVDEETKWIVEKIFSLAYQGYGSAKITKVLREEKVPTASWLNFTRYGTFAHIFEGKPDSKRYEWTIAHVKAILKSEVYIGNSVHNRQSTVSFKSKKKVRKPESEWFRVENTHEPIIDKEVFYRVQEQIKSRRRQTKEKATPIFAGLVKCADCGWSMRFGTNTANKTPYSYYACSFYGQFGKGYCSMHYIRYDVLYQAVLERLQYWAKAVQQDEEKVLNKIQKAGNAERIREKKKKASALKKAENRQNEIDRLFAKMYEDRACEKITERNFIMLSGKYQKEQIELEQQITNLREELSKMEQDMIGAEKWIELIKEYSVPKELTAPLLNAMIEKILIHEATTNEDNERIQEIEIYYRFIGKVD

SEQ ID NO: 25287 - protein, 528 aa, synthetic construct
MIAVINCCLFIMEDKMHENRQDLKITALYCRLSADDELKGDSNSIIHQKELLQEYAYKHGLRQIEFYVDDGYTGTNFDRPDFQRLISDVENNLIGSVVVKDLSRLGRNYLKVGYYTEVLFPENDIRFISVTDNIDSFNEAGMNDFVPFKNIMNEWYAKDLSRKQRAVVKSKGNSGKRLTCRTVYGYKKDENGEWVIDEPSANVVKTIFNLYLKGYGQSMIANYLFQQKIETPNAKKSDKTKNPYRWSVQTITQILSHQEYAGDTVNFKMSELGTKKVFTNTQPAIIEREVFEKAQLLRKKRKRVYRRFDEQAIFADVLFCSDCDSKMYIQRKFNRNCTNSYVCSKSRLSSDCSSHYVNEKKLIAYVLKSINALITTDRKSLVSLIEMKKQLEAQKQKIENEKNLQNANNRISEIDKILINLYEDKVKGNITLETFQMCDKNFCIEKAELQKLIIDSSRQSVVINKQEVEISNFIKMLNKYHTPLSELTPEVIDDFIEKIVVFEAEKINNVRNQQINIFYHGIGMISLE

SEQ ID NO: 25288 - protein, 530 aa, synthetic construct
MEQYLIYLRKSRSDLEAEAHGEGETLSRHEHTLLELAKRQHLNVTDIYREVVSGDTIAARPMMQRVLSEVEQGVWSGVLVMEVERLARGDTIDQGIIAQTFKFSGTKIITPIKTYDPDNEFDEEYFEFGLFMSRREYKIINRRLQRGRLASAKEGKWPSGLAPFGYRRVKLKNEKGCSLEPIEEQAAIVRMIFDLYTVGLQDEDGSAHPLSLGSIATRLNDMHIPSPSGSQWARITIRGIIKNPTYIGMVRWGSRETKKKVVDGKVVSVRGPADPEKECVFKGIHPPLIPKETFELANDKLTRSENTSTHTEKVVRNPLAGLLVCSECGRQMMRMINPVHPDMPVVRCPRRGCPNCSSYLPIVEERVIQGLSEWMKGYELEWSSAAASSSVSSVGVREKALASAEAELRKLQQQLERTHDFLEQGIYDTDTFLSRSRMLSDKIAAAKDSVARCSRELTEEKLRETSRRDIIPKVKNLLDVYPLLETAEEKNALLKEVLEKVVYQKLNEKRKKSPDGFTIEIYPRIPKSEK

SEQ ID NO: 25289 - protein, 571 aa, synthetic construct
MKQSNNNKKSRDVTAFLYERLSRDDNMDGESYSIGNQKKLLTKVAKEKGYTNLVHFFDDGISGVTMDRPGFADMIQQLEQGKAAAVFVKDLSRLGRNYIEVGRLTEEFFPNHDIRLVAVSDNIDTDEGENELAPIRNLFNEWYARDISKKRRISNKIKGNAGEPMGQPPYGYIKDPENPKRWIVDEEAARVVRRIYRMTLEGVGTEQIAAKLEEDGILTPRAYWHSKGINRPGKVKDLPPTHWNSSSVIKMLSVQEYCGDILNFKTYSKSYKNKKRLENDRENWAIFKDVHEPIIERAVFEQVQQKRGKMRKRQAKDGERSMFSGLLVCADCGSNLHFHFNQGNPEIKYFNCSNYKGNRGTCGSTHYVRVDFLEQVVLGEIRRLTKYAGLYEDDFLKEVIGHSRQAEETERRLKEKELKSLLARDDELDGLFERIYEDNVSGKLSDDRFAKMSRRYEEEQKELSEKIKKLRSEIEKQSSRATSTDMFVSIVRKYTRARKLTPRMLNELVEKIEVYNAEKIDGEWVQRLRIHYNCVGEMNIPNEPALPIPAVTVNTRKGVFVSYTTDDRPAV

SEQ ID NO: 25290 - protein, 538 aa, synthetic construct
MLEATMQRSVVIIPAKTKESLQTTAKLKVAAYCRVSTDHEEQESSYEAQISYYTEKIGNNPDWSMVKIFADEGITGTQDKKRDQFIEMIRLCRKRKIDLILTKSISRFARNTVDTLKYVRELKAIGIGIIFEKENINTLEIETEMILTIMSCFAQAESESISKNVAWGIRQSFREGNVPMHYNTMLGYRKGADGKPEIVPEESEIVKEIYHSYLTGMSLQQIADSLNARRIATKGSNAQWKNNKILNILTNEKYTGDALLQKTYIIDCISKKSRKNNGELPMYLVKNHHEPIISRTEFNRVQEEMARRKSKRKVAEKFCKTEQGKYSAKYALTELLVCGECGTPYRRVTWTAKGFKEIKWRCINRLQYGKKKCHNSPTLSEEVLHKAIVSAINNFCEVKDDVVEILRESISEVLDPSKNGSVLVAQQRLDELANNMNELLRLATTPESSKTAMADIQKFSDEMKALREFIETEKSKVATAEQDTEHMNMVLKRLEQADFTLTEYEDVVVRQMVERITVVDRETVRIRFVGGVELTQEI

SEQ ID NO: 25291 - protein, 517 aa, synthetic construct
MAEIKIIPARDRSEDIIRTAAYARVSSDSEDQINSYNAQIRYYTEMLSSSINTVFVDMYADEGITGTSADKREDFLRLMKDCRRGRIDRVLTKSVSRFARNTKECLEAVRELKTLGISVYFEKENIDTGELSSEMLLALHSQFAQEESISISKNCRMGVHKRMADGTYITPSAPYGYHLKDGRLVIDKRRAEVIRQIYAKFLDGMGTVAIANELNKIHAPLPVKAKQWYSTTVMYILRNERYIGDSLYQKKYTTDTLPFTTKYNNGEKPQYYVMDTHEPIISKEQFEAAKQIIEQRKLPPDAKKRKVYPFSKKIICGLCGTTYKRKIVGDRIYWVCRVHNQKSADLCKAKPIPETQFQLAFIKMFNKLAAHYQDIITPAYRQLQKLSDIGELANTQVAEIRKEIAEQKAQFHLLSQLNSQGVLDSVYFTSRSQELDRNLVQLHKQLHAILNSDEDEERLTKIKRLISIFESSEQLTEFDEDKFSCIVERIIVLSEKKIRFELIGGITFNEPIQRKGR

SEQ ID NO: 25292 - protein, 512 aa, synthetic construct
MAKKKKPAGGNAIIYARYSSHNQRDVSIEQQIEACRKHAAELGLTITDTYEDRAISGRTDNRPAFQRMMRDAEDGKFQYVLAWKSNRMGRNMMQAMVNESRLMDCGVKVFYAEEDFDDSAAGRFALRSMMNVNQFYSDNLAEDVRRGLMDNASKCMANGRQPLGYKRGEDGKVVVDEPAAAIVREIYTRIASGEMFMDIARDLNRRGIKTQSGSEWNKSSFKVLCRNERYRGIYIYGDTRIEGGIPPIVDDVLWYKVQEVLKVKKSKNRHHCPSDEDYLLTGKLRCGKCGGYMIGMSGRSKTGDVHHYYACQNRRVGHTCDKKNIRRDVVEPAVAQAIKQYCLTDDAIEWITDQTIAYWEDEDRKLQIDSIENDLSAVQSSISNVMKAIEMGVITETTRDRLIELERQQTDLKSKLALAKEEIVHVDRKDLISSLLAFRHGNVHDRAYQEKLFNAFLIAVYVYDDDHLKLVFNSFGKDDTVNIALDLGENDDNSGLSDVSKSSPILSNGQPD

SEQ ID NO: 25293 - protein, 501 aa, synthetic construct
MNIREDVIYARQSVDRKDSISIESQIDFCKYELKGGSCRVFKDKGYSGKNTDRPEFQKLLGEIRKGKVRRVVVYKLDRISRSILDFANMMELFQEYDVEFVSSTEKFDTSTPMGRAMLNICIVFAQLERETIQKRVTDAYYSRCLKGFHMSGQAPYGFDLEPTVVENIRTKMMVADPIAASHVRLMFEMYAEPETSFGDITRYFEERGIKVYGKSLTRSYLSQLLRNPVYAQADLEMYEFFKSQGTVVVNDAADFAGTNGCYLYQGRDVKEDKDKSLKDQILVIAPHEGFVSADVWLRCRKKLMTNTTFQNGRKARNTWLAGKIKCGKCGYALKTTHNPSGYEYLRCSKRADHKGCPGCGTLRKTEFEQFIFTAMGEKFREFKLLRGGEEKANPKITAYQVELAQVEAEIEKLLDTLTGANATLLAYANKKIEDLDNRRKTLSKAIADLSVETLSSQQIELLSGYLDDWENISFEDKRKAADGLISSISATSDYVKIEWKI

SEQ ID NO: 25294 - protein, 530 aa, synthetic construct
MEQYLIYLRKSRSDIEAEAHGEGETLSRHEHTLLELAKRQHLNVTDIYREVVSGDTIAARPMMQRVLSEVEQGVWSGVLVMEVERLARGDTIDQGIIAQTFKFSGTKIITPIKTYDPDNEFDEEYFEFGLFMSRREYKIINRRLQRGRLASAKEGKWPSGLAPFGYRRVKLKNEKGCSLEPIEEQAAIVRMIFDLYTVGLQDEDGSARPLSLGSIATRLNDMHIPSPSGSQWARITIRGIIKNPTYIGMVRWGSRETKKKVVDGKVVSVRGPADPEKECVFKGIHPPLIPKETFELANDKLTRSENTSTHKEKVVRNPLAGLLVCSECGRQMMRMINPVHPDMPVVRCPRRGCPNCSSYLPIVEERVIQGLSEWMKGYELEWSSAAASSSVSSVGVREKALASAEAELRKLQQQLERTHDFLEQGIYDTDTFLSRSRMLSDKIAAAKDSVARCSRELTEEKLRETSRRDIIPKVKNLLDVYPLLETAEEKNALLKEVLEKVVYQKLNEKRKKSPDGFTIEIYPRIPKSEK

SEQ ID NO: 25295 - protein, 456 aa, synthetic construct
MRNKEIAPALVRVALYIRVSGEEQKIKGLSLEAQQERLEAYARERGWVIVGIYIDAAKTARKNIHKRTEFQRMMDSVKRDEVDILLFARLDRWFRSVADYYKVMEILQAHNCDWKTTDEEYDTTTANGRLYINVKLSIAQNEADIDGERIDVVFDSKIAHGTVVSGSAPFGFRVNEEKRLEVVPEDAAIVQDAFNYFENTVSQRATVRYVRETYGVNWCDAIFRRMLKEKLYTGVYDRGGRYNDQFCPAIINRQQFDRVQALLTRNVRSAPSGKVYIFTSILTCAECGHKLVGYKSSDYFYYRCNQHFQRGRCSHNHSAREDVVEQWLFEHLGEELERCQLEWGVEAAKKKASIARTDKAALKRKLTKLKELYVNDLIDIEDYKKDYQIYVSALNQIPEPAQEAPPDFAAVRRLLDNSFRTIYDTLTREEKRTLWRSVIKEIRIDNDQNITGVVFG

SEQ ID NO: 25296 - protein, 522 aa, synthetic construct
MELLNVCIYLRKSRADREAEARGEGETLARHERILLDLAKKRGYNVGAIYKEIVSGETISARPVMQQLLREVESGMWDGVLVVEVERLARGDTIDQGVVARSFQYSNTLIITPLKTYDPNNEYDEEYFEFGLFMSRREYKTIRRRLTAGRESSAKEGKYCGSKPPYGYSRVKLVGEKGWTLQPVPDQAEIVKLIFNLYVHGVSGERIGMAKICRKLNDSGIKTMDSGLWTISRVQAILRNPVYEGMIRWNSRKAVKHIKDGQITISRPFAQDYILVKGRHPAIVSRELFQQAQDIVNKNPARPLNSLHVLRNPLAGIVRCGKCDHVMTRKSPNGRQGDLIRCPYSSCSNISSKLPLVEKALLDGIQELVDGYRLNNSVSDQEYSLSISEREKMIQGKLKEIDILKKRKQRQYDLLEQGIYSTEEFLERSRATAAELSACDAVILSLKQEIEHEQELQFQRSSFIPKCEDLLANYWTWDTSTKNRFLRELIEKAVYTKNAKNTWKNGDDISFTLDIYPKIQQK

SEQ ID NO: 25297 - protein, 539 aa, synthetic construct
MLRQATQNLITALYPRLSHEDELQGESNSISNQKRILETYAKQNGFTNLRWYTDDGFSGANFQRPGFQAMLADIEAGKVGTVIVKDMSRLGRNYLQVGFYTEMLFPQKGVRFIAVNDNVDSANGGMDNDFTPLRNLFNEWLVRDTSKKIKAVKRAKGMSGKPVTSKPVYGYLMDEDENYLVDEETAPVVQQIYQLCLAGNGPTKIARMLTEQQIPTPGTLEYRRTGSTRRYHPGYECKWATNTVVHILENREYTGCLVNFKTEKPSYKVKHSVENPVEKQAVFENHHEPIIDRETWERVQELRKQRKRPNRYDEVGLFSGMLFCADCGHVMYQQRYQNKNRKQDCYICGSYKKRTRDCTAHFIRTDLLTAGVLSNLRQVTEYAAKHESRFVKLLIQQNEIGGKRKTAAATKQLEQAQERIAEVSRIIKRLYEDNVNGKISDERFMELSADYEQEQRELKDRAAALQAELDKSQAATVNAEKFMGIVRKHLAFEELTPTLLREMIEKIVVHECSYDENGTRRQDIEIYYSFVGKIDLPEA

SEQ ID NO: 25298 - protein, 540 aa, synthetic construct
MKQPYNTTIYNTALYLRLSRDDELQGESGSIQTQRMMLRQYAAEHGLTVVDEYIDDGWSGTNFERPSFQRMIDDIEDGKINCVVTKDLSRLGRNYILTGQYTEIYFPSKGVRYIAINDNVDTINGESELAPFLNILNEMHARQTSKKVKAAMHTRFANGAHYGAYAPLGYVKDPDKKGHLLIDPETRWIVEKIFDLAVHGRGAASITRILVEEKVPTPGWLNYERYGTFANIYAGAPAEKAYAWTIAQVKSILKEETYIGHSIHNKQSNISFKNKKKVRKPQEEWYRVENTHEAIISEEVFQKVQELIASRRRKRRNGTTQIFAGLIKCADCGWSLAYGENKQNKKPYGYYHCSKNGQGLRQCSMHYIRYDVLYAYVLARLQYWSMLAQKDEDKLLKRLLNASDRERNSAKKKQAAELKKAEKRKAEVDGLFAKMYEDWSAGRITEYNFNMLSEKYQNEQKELETKIRQLHETMEAAVQTAADAEKWIALMKQYVNPVELTAELLNTLIEKITVHEAVKGEDGSREQEVEIYYRFIGKID

SEQ ID NO: 25299 - protein, 576 aa, synthetic construct
MKKKFSSVPDPDIQDAVIYARYSSHSQRDCSIEQQVADCELFAQQNGLRVVKIYADRHLSGTTDNRPEFQQMLKDAAHGHWPFVICWKIDRFARNRYDSATYKYKLKKAGVRVLYAKESIPDGPEGILLESVLEGSAEYYSASLAQNIRRGMRFNAENCKVNSGSIPFGYCKGPDGRFAIHETNAEIVREIFRKAAAGVPFVDIATELNNKGLKTSRGGRWNKNSFVLLKNESYIGVYHFSDIRIEGGMPAIIDLGTFLAANERMNANRRVRGRHHDGGDYLLTGKLKCAHCGSYMVGFSGTAKNGESHYYYGCQKRRRERACKKANVPREWIEKVVVKAALDYVLQPDVMEWITDAVMEYQEREAASSQLAALTAELEENQKATDNMMKAIEAGIITATTKQRLLDLETKAKDLKRAIELEKLSHVRLEREQILYWLEQFQGGSLQSQEFRRKVIDTFVSVVYLSDDHLRIAFNYSGQNRSEADFNLIMDAETASADYYPINSLSLPLCPPDKKNPNLFPSGKGSDFFVCRISYRVIFISSLSSAAFLSMPPAYPVRLPFVPTTRWQGMMIEITL

SEQ ID NO: 25300 - protein, 514 aa, synthetic construct
MPKKNPSGGKRLVAYYRYSGGSHQTEQSIEGQRRDCETYARIHGMVILHEYIDRHISGKTDDRPEFQQMIADAGKGMFDYVICWKTDRIARSRYDSIVYKKKLRDNGVELLYAAEANVEGSGGIIVEGLMEALAEYYSAELAEKVRRGMRESALKGKAIGSSRPLGLTVDKDKKYIIDPAGAAAVRYIFEQYAAGAASSAIVAHLNEQGLCTSRGNPFNKSSVVRIIQNEVYRGVYVSPKFDVRIEGAVPAIIDDDLWERAQKMFIRNRQSRSPRNDRADYILSGKLFCGECGTAMKGVSGHSSNGEVYFYYNCPCKDCHRRNIPKDELEGLVIRTVCNDVLQPDVMDHIADSVIEAQTAELNQPNPEKEALQHELADVQRKAKNLLSALENGTAGAMLTNRLAELEQQADTLSYQLSSLESEPKFPVFSKEEVLYLLEQFLIAPSEKTKAYRRRLIDTFVSKIEVSNTELTIYFNISEEDCGKMKKAPQSNQPEGCSTEKQMVRVARIELTAS

SEQ ID NO: 25301 - protein, 495 aa, synthetic construct
MTAVIYARYSSDSQREASIEGQLRDCKDYAEKNGITVVGTYIDRAYSAKTDDRPDFQRMIKDSGKKIFDVVLVWKLDRFARNRFDAVNYKYQLEKNGVHLVSAMEPISQGPEGIMVESMLIGMAEYYSAELALKVARGERENALQCKYNGGVVPLGFTIGKEDRLYHIDPETAPIVQEIFTRYADGEPAEKIAASLNERGLRTRTGKPFVKNSFFQIFRNRRYIGEYRYKDIVTPGGIPAIVDEDLFNRVQQRFEQNKIAHGRPAKEDVSYLLTTKLFCGKCGTLMGGESGTSHMGNTYYYYKCGNAKRHGKAHCDLKAIRKEPLERFVVETAIKVIFSDEIIERLIDLVMEAQQKENTRLPVLKDQLRDTEKRLANLLEAIEQGILTPTTKQRLDELEARKEALNTSILEEELKKPVLTREWIRFWLEKFRKGDVGSTEHQRQIIDTFVNSVYVFDDRVVLNFNFTDDAKTVTREEVLGSSAVDNAPPKKHCTS

SEQ ID NO: 25302 - protein, 582 aa, synthetic construct
MARKKNIAAGLDAVIYARYSSHNQREVSIEQQIAECTKHAAALGLRIVGTYEDRAISGKTDNRPRFQQMMRDAEKGKFQAVVAWKSNRIGRNMLQAMVNEAKLDDYGVKVFYAEEDFDDTAAGRFALRNMMNVNQFYSENMAEDITRGLYDNANKCMANGRQPLGYKRGADGKVMLDEPAAAVVREIFTRVATGDLFVNIARDLNAKGIKTSKGAAWNKGSFQSICQNERYKGIYIYGNVRIVDGIPRIVSDELWYKVQEAMRMKKNPVGTRHRVGAEDYLLTGKLRCGHCGSYMTGVSGTSRNGELHYYYTCQKRRTEHACNKKNVRRDVIEPAIAQAIKMYCLTDDVIEWVADRTVEYWEKHDNDLHIEALEQQLEENKKATSNMLKAIEMGIITDATRSRMIELETEQSKLAVQLNAAKADVVKIDRDDLIDELQIFRDMDVNNRSVQAELFKDFLVAAYLYDDNRLKLVFSFMGKEKNVEIPLETGEDPPDGGDSPDTKMFVFAPDCSTIQFVLEPDSLRKRVRVRFLFTRGSEKALLGTVSRNEQRQGITMAVVSCLLLCGIKFALCELGRPPYMAH

SEQ ID NO: 25303 - protein, 527 aa, synthetic construct
MVVQKKVTTIPASLTRFTATPITELKKRRVAGYARVSTDHDDQFTSYAAQIDYYTNYIKSRDDWEFVEVYTDEGITGTSVKHREGFKHMVADALAGKIDLIVTKSVSRFARNTVDSLTTIRQLKEKGIEVYFEKENIWTFDGKGELLLTIMSSLAQEESRSISENCTWGQRKRFADGKVTVPFNRFLGYDRGPDGNLVVNPEQAVIVQQIYAMFLQGMSYHGIAKKLTADGIPTPGGKEKWSISTVRSILSNEKYKGDALLQKSYTVDFLTKKTKINEGEIPQYYVEDNHEAIISPEIFAMVQREMTKRGRGKNYHSSVHAFSSKIKCGHCGSWYGSKVWHSNSQYRKTIWQCNHKFDGDERCDTPHLCDEDIQRLFLSAANKLLVDKAEVIANCREMMDLLFNTTELEAEQATLLEETQLISDMVQQTIYENAHVALDQTEYQKRYDNLTQRFETAKQRLETVMAELDRMQTQRADIEAFVESFEALPDTLTEFKLENWHSLVDFATVYSTDDIRFTFKHGQEVQA

SEQ ID NO: 25304 - protein, 592 aa, synthetic construct
MRKINKIEPLMPTLPSRKKVAAYARVSMETERLQHSLSAQVSYYSELIQSNPEWEYAGVYADDGITGTKSTRAEFQRLLRDCEDGKIDIILTKSISRFARNTVDLLETVRHLKELGIEVRFEKERINSLSGDGEVMLTLLASFAQEEIVSLSNNVKWATQKRFQQGLHNGRFQIYGYRWEGDQLVIHEEEAAIVRLIYDNFLNGLSAESTEKQLAEMGVKAYKGGHFGNGSIRQILSNITYTGNLLFQKEYTVDPVSKKSKINRGELPQYFVENTHEAIIPMEVYQAVQDEKARRRELGVFANWSIQTTCFTSKIKCPHCGCSYVHNKRTKNGNVQEYWNCGSKKKKKVGDGCPVGGTISQKSLLKACTEVLGLTEFNEDVFLDQVDHIDVPEKYTLVFYLKDGTTVTKEAPNTGHQDCWTAEYRAKVSKRRMGKNHNKKHLNPFTGYFRCPDCGANFRRQTHKYKDGTMRIYWHCPDAPRCGNQAKPNEDTMKNLLAELLGLPEFDEATFKETVSHIDLTGNYEATVYYKAGGTDIITWEPVPKKSYPHTEEYKELMRERMNEYWTDERKAEMSTRVKKLRSEKHWSSKRK

SEQ ID NO: 25305 - protein, 474 aa, synthetic construct
MKKTITEISSKDTKSKKVTTKSKLNVAAYCRVSTESDEQMNSLANQKEYFEKLIKSHEDWNFVDIYYDEGISGTSLKKRDGFNKMIADALAGKIDMIVVKSISRFSRNTVDALQTIRNLRNHDIRIFFEKESIDSNDIKSEFMLTIMSSLAQEESQSLSENVKWGKRKIAQKGFVQIPYSNVLGFQQKGKYGIEIDREQAKTVVLIYDMYLHGKTTGEIIKKLIEDGTPTPTGLEASHWCNTAILSILRNEKYCGDAILQKTYTKDFLNHKKCINYDAFPKYYVKNNHEEIIPRATWEYTQELLEKYSKRSVNVRYGDLIFCLACGSKYRRFHWYHKYYEETILSYRCLGKYDKSVNCSNIKLFEKQLDELYHETVLQLLSYYKKELVEYFKFTIPKVIKGKRKSNRIIKLLDNMISFIQSDYEYYSLHILIKNIFVHPDKTLEFTTLDGNIIKTSIPKYRLVDHYGRKKTSGY

SEQ ID NO: 25306 - protein, 436 aa, synthetic construct
MQITKILATKKLEKKKLVCAYARVSSDKDAMLHSLSAQVQYYKDYITSNNDWLFVKVYHDEGISGTKQDRPAFQQMLQDAKDGKIDLIITKSISRFARNTVTLLEAVRKLKSYDVDVYFEEQRIHSISSDGELMLTILASYAQEEARSVSENMKWRVKRNFEEGKPWGRAPYGYTIENSKFIIVPKEAEAVKLIFKLYLDGIGSYRIKDIMNKSEYPTRNNCLWTETTIRGMLKNYIYTGNAVFQTTYVKNYITKKKAKNNGEKPMYHVEECHDAIISIEDYNKVQKIIKERTEKIHKGITPKDNPFKGKLICAHCGCTFRMKKNYKKYVWRCGTYIRLGSKKCLSKQIPNDALKNIAKEILGVDELTSEIIDERIEKVIVGDDKLLTFYLKDGNKIDAHWMQKSRSESWTEEMKENARRKAVERNGKSNSNPIND

SEQ ID NO: 25307 - protein, 529 aa, synthetic construct
MAKVTVIPSTINPITKLPNNGLQKRKVAGYARVSTILDEQCSSYQAQVDYYTNLIKRNPEWEFVEVYADEGISGTNTKRRGGFNQMMQDALDGKIDLILTKSVSRFARNTVDSLTFIRKLKEKGVEVFFEKENIYTFDSKGELLITIMASLAQEESRSISENVTWGKRKAFSDGKVSMPYKHFLGYKKGEDGRPTIDEKESLVVKEIYSLFLKYGYSTTKIAKEFNERGICTPSGKGKWTLTTVESILSNEKYKGDALLQKKYVVDFLTHKSKPNDGEIPQYYVENSHPAIIDKIEWDLVQAELERRKKLYKTYSSKNIFASKLVCEDCDSFFGRKIWHSNDEHRAIVYQCNGKFKNKEKRCNTPTLREEEIKSMFLEAYNHFVLDKTALVDDCKLMIETIANVSLIDEQISKQIEKMEELAQKVKELVSSNASTLDSQTDYINNYDNLCTMHSIEETRYKFLLKEKNGRLAKAKSMELFIESIKDKPDVIDSWNSDLWILLVDKAIVHHDKSITFVCKNMKEITIAAE

SEQ ID NO: 25308 - protein, 443 aa, synthetic construct
MLHIEEIPAKPKEQKTIRVAAYARVSSDKDAAFHSLEAQTEYYEQYVAAHPGWQLVGIYSDNGISGTTINRPEFQRMLQDCRDGKIDLVVTKSITRFARNTVILLETIRELKRLGVDTYFEKEDMHSISPDGELLVTLLAMYAEEEARSASENQKWRIQKLYDQGKPAGGHAFGYRLVDERFEIVPEEAEIVKEIFHLYLSGMGYGKIARTLIERDVSARFGGTWSNTSVRDILSNEKYTGDLLLQKTFREDFRTKKKRRNTGELRKVYVKNSHDAIIDRQTFEAVQAEIKRRSIRQTEIMAHRNAAHENSAKLFTGLIQCGCCKSAYIRKYTNAKSGDQPIWICSQAFKYGKAACLSQRISEAVLIEKTKEVLGIDELDRTTITDRISQIIVPEHHHLLYKFTDGSTADVCWQHPSRRLSWTSEMREAARQKALNQQKKGGK

SEQ ID NO: 25309 - protein, 423 aa, synthetic construct
MPEIEFIAATKTLQQQPFSSATRKKRVAAYARVSTEQDEQQSSYEAQVDFYTRHIQSNPDWEFVSVFADEGITGTNTKKRDGFNLMIQKALNGEIDLILTKSISRFARNTVDTLQTVRELKAAGVEVIFEKENLHTFDSKCEVMLTIMSSLAQEESRSISENVRWGQQKSMRDGNVHLAYSHFLGYSKGADGRPEIVEEEAVIIRKIYDLFLSGKTINEIASILTEMGIPTPAGKAKWRVSTVRSILSNEKYKGEALLQKTFTVDYLTKEVRKNNGEVPSVRVRNSHEAIIEPEVFDKVQKLLAEYSKRRAKVRTKHPFAGKIICGDCGEFYGHKVWRLRSTGERYNVWYCNHKYDGNETCDSPRLRETEVKEAFEKMLQNCGDLNPIYTDERWNELIQSVKVYKGNHLIFTLTSGEIVKITL

SEQ ID NO: 25310 - protein, 668 aa, synthetic construct
MAYAKAKKHLKIWTKKKAALYVRVSTRYQVDKDSLPFQRKKLKEYCKFLGLEDYVIFEDDGYSAKNTERPHFQEMMSRVRSGEFSHLIVWKVDRVSRNLLDFAAMYQELKDHKVTFISMNEQFDTSTAIGEAMLKIILIFAELERNMTSERVTGIMLDRAEQGLWNGARMPVGYRWNNETKFPEPDPEEVKIVQLIFDKYEEWKSSIKIARYLNNNNFKSKRGGQWTSKLIHDIIRNPFYIGTYRYNLRESGRGPLKPESEWIVRENNHPAIIDKAQFDRCNKIMDQNGSSRDTSDLRARKYVHTFSGHLVCGKCGANMIASKDRARANGWRPSMYRCAQRSRMLDCDNSRTINESYIGPFIFNYIANLARVQKNFKNITTVEKLERELLKGETFDGVAGILPEGLNLTFQALSFRQVGNGTYIPDVDFLGDSDGASDRDQIELLKSEIEKSKNAVTRLTDVYLFDPDSMTKEEFATKKKELAKKIEGMERQLADLLDDSGNDDLADMSFIKKASAFLVAQRIVSKSFVDYVGMAQELDNEILKDFIDQIVDQIVVLDGRVQSITFINGLKHEFRYATPAELPVCQKCGGRIGSTCGCRTRTFDFSGKRYQRIKVGDPRDTLHGKKNPVCPECFAHEGRWHHWNCKIETCPICGGRLAECEHGPNGKK

SEQ ID NO: 25311 - protein, 533 aa, synthetic construct
MKTAVIYARYSSDSQTEQSIEGQLRVCQDFAKNNDILIVDTYIDRAMTGTNDMRPDFQRMIKDSNKRQWDYVLVYKLDRFSRNKYETTIHKHTLKENGVKLLSAMENIPDSPEGIILESLLEGMNQYYSAELSQKVHRGLNESYRKGNFTGGFQIFGYKVVDKKNIVDPFEADIVREIFRRFSKGETGKSIANDLISRGVRTKAGHYLDDKKIYKIIQNTKYIGKVKHGDTVYTNIYPAIIDEATWQTVQSIRNANKHRPGSKKEKFDYLLSGKLICGNCKEFMVGITSTNRWGTVYKYYTCLSKRRKKHNCGTLSIHRKELEDLVFTETWKMLFDNEDLNALMEYICKLHKNETQESAIIKSLEKKRTEALKASKNLISAIEQGIITEQTKVRLKEIETQISQYDFDIEQAKQRTYSYVTPELMMDFFRKAVCGDIESNEVRKVIVRNLIREIVLYEDKVVITFNFIDTPITKKRPPDDIDEIEEKVRQAEKSANKNTKGEYKNTGFPPQGNNTNTEIKTEFVLFFIMTISA

SEQ ID NO: 25312 - protein, 541 aa, synthetic construct
MRIAIYSRKSKFTGKGESIGNQIEMCRDYIATNYNGEEHSIQVFEDEGFSGKNLDRPQFKKMMEIENVIPFDLIVVYRLDRISRNVGDFASLIEKLNKKNTSFVCVKEHFDTGNSMGRAMMNIAAVFAQLERETIAERIKDNMYLLAKEGHWLGGTTPLGYKSIEVTNGKRTHFELIIDESQIDLVNIIFSKYKQLGSINGVETYLFVNGYKTQKNNYWHKSNVKRILTNPIYCIADIDSLNYFTELGCNVCFTLDDCNGKKGIYPYNRFSGQKREMQSYDRWIITISEHQGILTGKEWVAIQQQLKANSKDGFGGKANERRSTSNTSLLSGILFCSCGAYMRPKKYPSGNTFYICENKMDKKITECNNSNINADELDKIVLNELFSFDIKDGVVDSQIQNLKEQITNIDNDLQKQIGRLKKQIETNKNMVNKFMNIVALSIENNTPEQVVEVYNQKINELLNQNKITQKRIDELQDTNIIQAKMNDRLNSLTDAMAYLKENFNKLTIVEKRGFVKEIVDRIVWDGNNINIFIKGISELSE

SEQ ID NO: 25313 - protein, 499 aa, synthetic construct
MKDKYALYLRKSQADQPDESIAEVLAKHRTMLMELADKMGVDVAQADIFEEVVSGESLYARPEMLRLLEQVEAGAYAGVFCMDIDRLGRGSMSEQGIILETFRLAETKIICPGKTYDLTNDADEELTEMKALFARFELKMIRKRMRRGLMQTIQAGGYVANQPYGYRKCTVGKLPSLEIDEEQAKFIRHIYKRYREGVGAHIISEELNAMGSVPNRSGRWSRNTVRHVLRNPTYAGKVAWNRVKRYKPTKNNPRPRAEHQKMEDWILVDGLHPAIIPWEEWQQVQEIRKGRYIPSQNHGQVANVLAGLIRCGNCGHNMQRMGQNKCDPRILCTEKGCVPSTKYDLVVERFLESLERIRDDLQIEVQQAKAPDISGLLAEQSTIAAKRKKTATKIDTLHDLLEDGTYDRATYKERMAKAEAEQAALLLQQADVELRIQRAMSRDKANMLSRLTSVLQLYPTLDNEGKNHILKSIVNYAVYRKSPKSKPGDFTLEIILKDI

SEQ ID NO: 25314 - protein, 572 aa, synthetic construct
MASRIAEKLAAKKAAIYIRVSTHWQVDKDSLKVQRRELIAYVTLVLGITDYVVFEDPGYSAKNTDRPEYQAMMDRIRTGEFTHLVVWKIDRISRNLIDFAAMHDELQSLGVTFVSKNEQFDTSSAIGEAMMRIILIFAELERKTTAERVTAVMLSRASDGQWNGGRVPFGYSWSKEAKTFSIVPEEAKAIRRMAELYEQYQSLLYVAKYLNDAGIVTKTGGQWTPTTVRTILTNPWYIGQYVYNVHSDGKGIEKRDSDEWITVENHHEPILSEDVSYRMKFLLTRNKRGGVPSHKTYVRKNIHIFAGLLRCGQCGSNMTANLDRRRANGFRPSQYACGSRRRKGTSCTNKYISDTTLGPFVLNYVANIIRASKNSSETTTSEVLERKLLRGEAFEDVASVSTDALGQLLDAFRSAGDAVEYRPQIAFSGDDNSIREIDTLRARRRKLDNALARLNALYLYDDEAMPEKDFVMQRGQITKQLEEVNARIEELQNQESSEELGDDFIGKASYYIMANKLIEDRYIDYEKYIRAIDPSIPRSFLQQIIDHIVVNDGRVISITFKNGSTHTFTYKT

SEQ ID NO: 25315 - protein, 585 aa, synthetic construct
MKTTDQPQVKQYVIYSRKSKFTGKGESIENQIELCRQYIAMHFGEDEAEHALVYEDEGFSGGNLERPQFKQMMKDSQKIEFAAIVVYRLDRISRNIGDFAKLIEDLGDRHIDFISIREQFDTSSPMGRAMMYIASVFSQLERETIAERIRDNMHELSKTGRWLGGTTPTGYASESLSSVTVDGKVKKACKLKPIPEEIQLVKTIFSVFTESGSLSKTDQYLLEHRCVTKRGKQFTRFAIRGILTNPVYMIADDTAYQYLKENNVDLFAEPSEFDGEHGIMAYNRTLQRPGKATQIRPMEDWIVAVGKHPGIISGANWVRVQSMLDVNKSKSYRKPRSNVALLSGLLRCGECGDYMRPKLTGRTNANGELIYTYMCSTKERSHGTVCSMKNCNGNTLDAKIVEEIRKVATDKKDFGQLLSKTKKVINDNKASYEAELTLLVKNHAETEARIKRLVESLSVASETSAKYVMEQIDELHRQSEQEQTRIAELEKLARQSNALSQNLFFYRDMIESFADTVDSTTIEERRRLLRTIVKKVVWDGKNVYVYLFAEDGELNLPPIGQLMCPSGEDSECYRSGFFGCGKDER

SEQ ID NO: 25316 - protein, 523 aa, synthetic construct
MAKSVTTIPATLSRFTAAPINSTKKRRVAAYARVSTDNEEQLTSYEAQIDYYTNYINGRDDWEFVGVYPDEGITGTNTKKREQFRQMVADALDGKIDLIITKSVSRFARNTVDSLTTIRKLKEHNVEVYFEKENIWTFDSKGELLLTIMSSLAQEESRSISENCTWGQRKRFVDGKVTVPFKRFLGYDMGPDHNLVVNPEQAKLVKRIYGMFLQGQSPFQISRTLTEEGIPSPGGKDHWNPSNIKSILTNEKYKGDALLQKSFTVDFLTKKKKTNEGEIPQYYVKDNHEAIIDPETFEMVQTLMTTRTKGRNRKSSVSIFSSKVKCGDCGSWYGPKVWHSNDAYRKVIWQCNHKFDGQKCATPTLTEDEIKELFLRAANQVIDQKEQFIAIYDQVLSRSLNTTALESELSDLEAEINIAAELIEDCIKENAHVALDQDEYQKRYDALVARFDKAKARHTEVTDLITERMARKHQIEAYLKNLRSREPLTEFRETDWLAMVDYITVHSKKDIRVTFKDGTEIKA

SEQ ID NO: 25317 - protein, 590 aa, synthetic construct
MKTVEKIERKLPVLKTRKRVAAYARVSMESERMQHSLSAQVSYYSALIQKNPEWEYAGVFADYGISGTGTKKRDEFNHMLAECEAGNIDIILTKSIQRFARNTVDLLNTVRHLKELGIEVRFEKEKINSLSGDGELMLSILASFAQEESRSISENVKWGTIKRFKQGIPNGKFSIFGYEWQDDKLVIVPEEAEIIRWMYAEYMKGASRIEIGRALMDRGIYTRQGKPWVDSNVKVILTNITYTGNMLFQKEYCEDPITKHRRKNYGEMPQYFVEDTHEAIIPMDEWQAVQAEFKRRRDLGPFGNKSLKLSAFSTKITCGCCRKHYRHSGKRNTAGEVYYIWICQTKSQKGVSACPSKNIPEKMLQNTAAKVLGLDKFDEDVFSQQIEEVIVIGDDTLTFRFYDGHEVTTKWQSTAKTDWWTDERRKLWGERHKRKDTNPNRNTFYEFTGFIKCGCCGANYRCQSGKRKDGTPTRFWYCTGPRSECRNPAIRDETMKRLVTEILGLDEFDEAAMDAQIESATILDHMVTFHFRDGHIESRDFLDKRHGTPWTEERREKAKKSMKAAWTDERREAMSERIKKIRSEKKWPNP

SEQ ID NO: 25318 - protein, 471 aa, synthetic construct
MIPAIVYARASTDHQEYSVKDQLKYIKDWAKHHGYKIIKVYIDDGISGAFVAKRPGFLSMIEDVTTNISGAKALLIWDSYRFARNMVEFLTYKQMIRQHGVSVIAVTEPIVEDEDAQLYIDAINGASGELYLRKLSKDSKRGLRAKVVERHEHLGFAPYGYRMDRNTGQLEIQPEEARWVQYIFQSVIDGAPYLQICEALRKAGVKTRKGCAWTNTQVKYTLTNKTYCGLLEVHLDGKHGVYDGKHEPIIDRETFDNVQTIIEERAAKHKKYARNTNKYKHWLSGLMRCPYCGGALSYVQGSGGRADRYRCNSRTDGKGCVNTSVKVNVAADFVLDQLQQIYDRPEILCTLKTTTPQPANRVDYDAEIKKLRGQLTRAKKAYMEEIDTLEEYRENKTRITAAIEDMETQKNAAAAGIIKFDPAAFQKKCLSALSVLQSDVDTEKKVAVSHNLIEKIDCDNLNKVLTIYFYS

SEQ ID NO: 25319 - protein, 544 aa, synthetic construct
MRVSVNLNAQKPDTTTNAVIYARYSSHGQTEQSIEGQLAKGHEYAAAQGYTVVHEYIDRAMTGRNDNREAFQKMLSDTGKHQFQVVIVWKVDRFGRNREEIAFNKHTCKKNGVRVEYVAESLPNSPEAVILESVLEGMAEYYSIQLSQNIRRGQLESAKKCQCVGGSVPLGYTLDSDKHFVIDPQTAPVVKKIFDLYAEGATISEITGQLNEQGIRTARKQLFTKNSLTKLLKNEKYIGVYTYKDIVRVEGGVPAIVDESTFDRVQELLKINRRAPSHTWTKVEYLLTDKLFCGHCGSPMVGESGFSHTGAKYSYYGCIKRRREKACDKKPVRQDWIEALVLDETVKLLHDDELMEYIIDRTWEYYQVTDKVQEEKAVLEAQLAEVDKAINNLVRAIEAGIFNAATKSRMDELDAQKAALTASLADLELTSGIRITRDHIEYFLLRLRDLDVKDRECQKRLVQTFVNAVFIYDDGRVKITYNYSGQSSTITLNQIASAEKGKGFVCCLPCSTSSPRFPRGVAALFLFWGKNGCESTTNFSCIVQ

SEQ ID NO: 25320 - protein, 558 aa, synthetic construct
MSKRVRTLLRVSSRQQLHDDDIPIQRAEATEFIAKHEDWVFDREYLEKGVSAYHNGVEDREILQEIVKDAKNKEFEILLAYMSDRIGRQEEYSFYVAELNRMGIEVWTIKDGQLKTEEHIDKLLNYIRFWQNEGESKKTGMRVHDTMVEMVKDGKFVGGKAPYGYKLVLSGEISNHGRALHKFVIVPEQADNVRKIFSYAVNQGMGFQKIAKTLNEENIPAPILAEWKSGTVRSILTNPIYMGYIAYNRRKNSHSSSTYLDRKEWTYSRERNPEITIVSQDIWERAQEIREARKKRINASKQATNELYMEQYNVPFSTRGRLALTGLVYCGYCGKKLKNTGYANHWTCKKTGEKKVAYVGRYGCPNQCKPRHTYTQKYLEEVVFATVGTYLENLKKIDISDELEEMQSQQDKNIKREIKDLEREIKGLSADIMTLEEKLPEAIRGEFAFSVDKLSAIISDKESLKKEKEAGKNKLQKQLDEINVQGSELKAFIDAMPKWDEIFFESDVQTKQMILSTLIDRIIVKDDNITINFKIRLENFLDEKLLENNGSDLSRKGL

SEQ ID NO: 25321 - protein, 453 aa, synthetic construct
MECVAYIRVSTERQVEEGYGLESQKRDIEEYCKKNEMLITDWYIDAGLSGMDMSKRVELQRLISDISKINNIVVYKLDRLARDSVDALYMIEKLFTPKGVRVNSVHDFARYETPQDKFQTHIMAAVAEYDRNTMLLRMRGGMLERVKNGYWMGGGNTPYCYRYDKNLGYLVPIPERAEQANRAMDLFIGGMSDVKIQRLLGYKSEFVVRNILTGVVNIGYIPYKGGTYKGLHEPIFEHDKFYLAQELRKSRRKQHVYSFTELHLLTGLCYCKTCGCKMRYQKITGMGIHKIYCCSHDKYLDYLPNYNADCDNPGAWASDIEKAFEHEILDISINLSQYKPKAKETKLQILTNQLEKQKSKLKRLYTLYAEGNDMVLNMIKSLETEIRETTEKISTERKNGQHEQKKEFVYENIKKLADIWDGISKSQKNSILKTIIDKVIVGKGDIEIQLKNF

SEQ ID NO: 25322 - protein, 620 aa, synthetic construct
MNPVDKIAVVYARYSSHGQTEQSIEGQIAAAQKYAEQHGYTIIHVYADRAMTGRNDDREQFQKMLSDTAMHQFGVILLWKIDRFGRNREEIAFNRYRCKKNGVRVERVAEDVPDGPEGVILDSVLEGMAEYYSLQLAQNVRRGQRESAKKSMSIGGNKMLGYIVNPETKRYESDPKTASYVTEIFKRYANGETISEIVAWLNAQGIRTTRGSEFTVNSLHRLLKNEKYTGVYIFHDIRNEGGMPALTDRTTFDKVQEMLKVNRRAPVRVWSKTEYLLTDKLFCGHCGAMMVGESGHGRNGIKHSYYTCLNRKKKKSCDKKPVRQDMIEPLVLRAIGKLLENPATLENIADQVWAAYERSDTSGDAIKALDKQIADVDRALSNVMKAIEMGIINEMTKTRMDELTNQKQALSTARAEAGLAEGFKLTRDMILFFLQEISALDMADRDSQKRLIKTFVNAIYLYDDHFDIAFNYTDNGKVVVRMQEINDAVRGEVFGCCAQSPTKKDPQLRLRVLFCAGAGRIRTGRPSADGKKQSCGLFFRPRLANPPAPTKKLWQRCCRSFFSLLYRTKPAKAMTDFQSAFYRDVQLLPGGWTFFVANLYNSKCRYGERGAAAAGAVLEP

SEQ ID NO: 25323 - protein, 570 aa, synthetic construct
MKIAAYCRVSTEKEAQIDSLEKQIEFFNEFTQKNGYELYKLYADEGISGKQIKNRKQFLAMMKDAKAKKFERVIVKDVSRFARNTVDLLQSIRELKSYGIQVDFLNNGEVMEGGSEFILTILGAMAQQESANMSKRVKFGKDITAKKGRVPNLVFGYDKIPGEKYTLKINEEEAKIVKEIFESYVYKGIGTTKIAWELNDRGIRTKKTKSKWVQTSIVRMLKNPIYTGRVTNKKSEITDFITGARKDLPEEDWIVADKPEMRIISDELFNRTQEILEQRSNEFKLKSKREKTEYVFSTLIYCKHCGYSFRRIKRKYTDDGPEYIRWVCSGRNSMGVNHCPNTTVIDEEELLNAIKEYLKSIISNKKNFMKAVEKEFEKITALRENNERSEESLLKEIEKVTVKKQKYMEMFQNEVINMQELKQYTNPLNEDIARLERELKLITSEIKEKDVLEKELTKTISTVDDILNNETITNSMLKTIIDVIEVGSEGNIEVRLKLLNEIGSSPMVITNFDDIKNQNSTVTKSNNGTQRCLRTTNKNKSKFSKRSKRDTWWKQSRKTHKRWNGNEIKI

SEQ ID NO: 25324 - protein, 483 aa, synthetic construct
MKQKIAAPPADPVVDLVDLYIRVSTTEQALEGYSVAEQESRLRRYSEAMGFRIHKVHIDAGFSGASLDRPAIKEVIRDIQSHLVSKVIVWKLDRLSRSQKDMLVMLEDVFLANDCDFISMMESFDTSTAFGRAIVGILAAFAQLERENIKERTTMGRRARLAKGHYNGSRPPLGYRFLENSNDLKVEPYEANMVHEIFSSFLAGQSINAIAATMQRKYPTTRTWNNTMIRRTLKNPVYMGKVKDVDVIRDGIHEPLISESEFVMANAVLSHNREIKKQSCRSNSLLTGLLYCGDCGARMQPRQIARGYPLRRYVCYSVSRTNKSMIRSDHCTNRLHPYTLEELDDIIIGEIRKLAADEDYLRALIREDAGPILDESELLKDRLSEIDKQTDKLLNLFQIGVVDLSQIEQRLADLKQEREALKERLERTAPVVQMDIQKIQSYADAFQAALDSGDAECQSSIIRLLIDKIVVLNEDIEIHWTFC

SEQ ID NO: 25325 - protein, 526 aa, synthetic construct
MPKVTMIPATINPLTHLPKVAAQKRRVAGYARVSTDSDEQFTSYEAQVDYYTKFIQSKPEWDFVKVYTDEGISGCNTKKRDGFNSMVSDALAGKIDLIVTKSVSRFARNTVDSLVTIRKLKENGVECYFEKEGIFTFDGKGELLITIMSSLAQEESRSISENITWGQRKSFADGKVHLAYKRFLGYEKGEDGRPTIVESEAKIVQLIYRLFLDGKSQASICRYLEDFGIPSPGGKDKWSKTTVTSILQNEKYKGDALLQKSFTVDFLEKRMKPNEGEVPQYYVEGSHPAIVDPDEWDHVQTEFARRKALGRAYSGKSVLSAKLVCEDCGGFFGSKVWHSTDRYRRTIWQCNGKFKGEERCHTSSVDTETVQRLFIQAYNRMMENRERIIKDCEAMRRALTDFVELDAKIERQLEETQVVAELVKAAVKENASTAQSQEAYLRKYEALTERYEKAAAELERLQNLRTTQSQQDKAMALYIRTLKKQPVVLREWSDTIWTVMVEKAIVHRDGAITFVFKNGTEVKVGE

SEQ ID NO: 25326 - protein, 433 aa, synthetic construct
MSGRITTVSKPPKLERKKRVAAYARVSSGKDAMLHSLSAQVSHYSELIQRNGDWLYAGVYADEAKTGTKDSRADFQRLIADCRAGKIDMVITKSISRFARNTVTLLQTVRDFKAWEVDIFFEEQSIHTMSADGELMLTILASYAQEESRSASENQKWRIKRNFEEGIPWNGAMLGYRLKDGRYEIVPMEAELVRRIYTEYLAGDGYQAIAKRLTEEGVPSRFGGKWNQSVVSKILSNYTYTGNLLLQKTFRENHITKKTVINHGELPQYHAEDTHEAIIDMETFQAVQAEKTRRATQFNKEPAPRTTYPFTSLLVCDICGKNYRRKTTKTGIVWVCGTFNTLGKAACASKQIPEATLQQATAEVLGVKAFTQEQLHSLIQSIRVCNGNILIFCFKDGSEVTRTWKDRSRSESWTDEMKEAARQKALERSKHNA

SEQ ID NO: 25327 - protein, 502 aa, synthetic construct
MEIQIREGSREQKRKLKVCAYCRVSTDADEQENSLENQVRHYETVIKANPNYEYAGVYSDFAISGFKEKRPGLQKMLADAEKGKIDLILTKSVSRFARNTSIVLEATRKLKELNVGVFFELQNINTLSGEGELMLTILAAFAQAESESGSVGAKMVYQRKYEAGIPVQYLERSFGFKKDERGVYIADEEEAVWVRKIYDMAAQGYTLAAIKRYLNENNVKTVGGAKWLDSTVLRILENEIYKGDYIMHKYFVNEERKLVRNRGEVDAWYIEDDHEAIVSPKLWQRAQDALEAKRDYLAEGSVIEEFTEENYPYMNRIYCARCGHPLYKRIYSNGNRLNWGCSGTKRYGKSFCEGINIPDGVLRGAWHFDENMYIGEKQTDKGKKEFTYLKEASWKRRHKKKEPEPIPENTETEYPYREKIFCGLCGSRLVRHVNTKSHKVIWVCNGRKRKGKDFCDGTRVPDTIIKGWGEIKKDIYIQRKDDKNGKKRYSYTSKKPKGADRA

SEQ ID NO: 25328 - protein, 460 aa, synthetic construct
MKTNLKLADAYYRLSVEEANGGESSSITNQRSIVRQYCEDNELRLTIMSSMAQDESRKISTRVRFGHQQAIKKGTVLGTNNMYGYIKKDGKLMIDETQADFVRELFEMYATGKFSMKQMEKHFYQKGIRNSKGKMLSHSTMSNIIRNPKYKGYYAGNKVRITDLFTKKQKFLPEEEWVMYKDETGETVPAIVSEELWDKANEVLYMRSQDVITAQHKTVHQNLLTGKLICAHCGMPYYRKDAVSKGGEKISKWVCSGKIKNGASSCPSRAIYESEIKPIIEDIFKSGQQHIEELSACVLKLVSEVLDTNENKDELNRLNQELITRQKMKAKLLQYNADGRMDDSEFIRMTADCDNEIKDIEKKLNALNKTSKTEREMKKELAEIKTILKAAEKHIDGEEIDRAFIDRYISDITVYPDEEITRFEIHLKAGTTVTKTLQNLTSRAGSNSKKMIKAYEESMK

SEQ ID NO: 25329 - protein, 583 aa, synthetic construct
MKKFPIDLSCLTEEEISQFQEDPYTLYNGDQNVAIYLRYSSTGQSDQSIEGQLRDCRTFCKANHYRIVAIYVDRATTARKDVEKRVHLMEMISDSAKQNWEYIIVWKLDRFARNRNDSAIMKMRLRKNGVKVLSATEHLTDSPESIILESVLEGMAEFFSAELSQKVTRGMRESALKCHSVGGHIPLGYKVENHKLVVDPDTAHIVQEAFSLYANGESVADICRKFNSAGYKTAKNTEFNRSSFKAMFRNTRYIGTYTYKDIVIENGIPAIIDKELFETVQRRLSKTATAPARGKAKVDYLLSGKLFCGHCGASMNGESGAGRHGKVYHYYSCYTKKRKLGCDKRPLKKDYIEGIVARDALNLLTDQLIDEIADMAIRQSEQDLINDTHIPQLTAQLSEVEKSITNITAAIEKGIASETLMNRLVQLEHEKKTLNKEIKAEEKFVYRIDRDQIVFWLSQFKYGNIEDENFRRRLIDLLVNSVTVWDEPDGYKITTAYNLTSCKTKTFRVEKNPAAEEATGFDFGESECTKSPRNRLISRTFAFHKLPFLVCRLSLTQTLTQTGRGAETIRPHGRGCSPWFAPL

SEQ ID NO: 25330 - protein, 521 aa, synthetic construct
MPYCMYLRKSRKDFEAESAGQGETLARHKAALLETAQRLHLAVSEIYQEIVSGDSIAARPEMQRLLADVETGKWDGVLVMEVERLARGDTMDQGQVQRTFVYTGTKIITPTRTYDPSDPADAEYFEFGLFMSRREYQTINRRLLAGRERAVREGKWPQGHAPYGYRAVKVPKGKGYMLEIVPEEAEIVKSIFNWYVNGAEYNGAFLRVGARRISTMLNSMGLTTQAGNLWSAPAVRVILKNHAYIGKVTWYKQTLRKSMSNGAVVKKLERTPERTLICDGLHEAIISDELFEAAQARLSADSTGPATKGPLQSPLAGLLYCGLCGCVMARQHEKGKPSYYVCRNPLCRCRGSKLEVVEQRVVATLALWLAGYEITAKAQAQTVDIGALQSALDGAQRELLAYQQQQTRLYDLLERGIYTEQVFLQRQAAITGEVQRLQAAVADTEAAIAKAVRINASAREIVPAVHAVLDAYPTYTTAQEKNDALRMVLSRVEYTRTVGGFGSDPQDFEVKIFPRLPEPVE

SEQ ID NO: 25331 - protein, 582 aa, synthetic construct
MNQDKLTDKLSSQKCALYIRVSTHWQVDKASLPVQREDLINYAKYALGIDKYEVFEDAGYSAKNTDRPAFQQMMARLRTGEFSHLLVWKIDRISRNLLDFAGMYSEIKKLGITFVSKNEQFDTSNAMGEAMLKIILVFAELERNMTSERVTAIMLSRANNGQWNGGKVPFGYDYDKENRTFTINEAEASVVNLIYDAYEANNSLLTVSRTLNEKGLLSRKGSPWTPTTISIILKNPFYIGVYRYNYHDETKSGGNARSTQLKNKSEWIYVKDHHPAIIDAERQARIISLLERNRRSNKDSAKSYVRKNTHIFAGLLYCGCCGSQMQSTIDRERSDGYRPSIYACTRKRRFNDCENKYISDVTIAPFVLNYIANILKAQNNFGKSTSIETFERKLLRGKMFEDVEHIERIGLTEMYDILKRGNLSDAVYSTRLQGTIDEQAIIDERNLLSVEKRKKERALARLKSLYLYNDDAISERDYIIEKKTLTDSIERIDKRLEEIERNSSQHFTMTDDEFMTKASVFIMTHHLQGKRYIEFEKLIRKIDSRVIKDFVSSVVQKVVIKNGRVMSIRFRNGIEHNFLYKT

SEQ ID NO: 25332 - protein, 493 aa, synthetic construct
MPEALNAVIYARYSSDRQTEQSIEGQLRECYAFAKANDIAVIDTYIDRAISGKTDNRPAFQKMIEDSAKRQFQAVIVYRLDRFTRNRYDSAIYKARLKKNGVKVLSAMENLNGSPESIIMESLLEGMAEYYSVELSQKITRGMRENALKGKALGGQRVLGYKVNSDCYFEIDETTAPVVVDIFKLYSSGKTVKEICDILNARGVKTARGGAFNKNSLHTILTNKKYIGIYKTKYGEIVGGIPAIIDNELFEMVALRMEQNKKAPARAKAEINYLLSTKLFCGKCRSAMVGESGTSKTGKKYYYYACVKKKREKACDKSNVKKDWIEDLVIQRTVTDILKDDVIEKIADRLVELQKAEAAQSGTMLYLENSLAEIQVSIKNIMTAIEKGIITESTKTRLTELEDEKRNVEIEIAKESIARRIISREQIIYWISSFKDGDITSEKYRQQLIDTFVHAVFVYDDKIVITYNYSGENNTATISDLDLSSPPNLNPVA

SEQ ID NO: 25333 - protein, 668 aa, synthetic construct
MAYAKAKKHLKIWTKKKAALYVRVSTRYQVDKDSLPFQRKKLKEYCKFLGLEDYVIFEDDGYSAKNTERPHFQEMMSRVRSGEFSHLIVWKVDRVSRNLLDFAAMYQELKDHKVTFISMNEQFDTSTAIGEAMLKIILIFAELERNMTSERVTGIMLDRAEQGLWNGARMPVGYRWNNETKFPEPDPEEVKIVQLIFDKYEEWKSSIKIARYLNNNNFKSKRGGQWTSKLIHDIIRNPFYIGTYRYNLRESGRGPLKPESEWIVRENNHPAIIDKAQFDRCNKIMDQNGSSRDTSDLRARKYVHTFSGHLVCGKCGANMIASKDRARANGWRPSMYRCAQRSRMLDCDNSRTINESYIGPFIFNYIANLARVQKNFKNITTVEKLERELLKGETFDGVAGILPEGLNLTFQALSFRQVGTGTYIPDVDFLGDSDGASDRDQIELLKSEIEKSKNAVTRLTDVYLFDPDSMTKEEFATKKKELAKKIEDMERQLADLLDDSGNDDLADMSFIKKASAFLVAQRIVSKSFVDYVGMAQELDNEILKDFIDQIVDQIVVLDGRVQSITFINGLKHEFRYATPAELPVCQKCGGRIGSTCGCRTRTFDFSGKRYQRIKVGDPRDTLHGKKNPVCPECLAREGRWHHWNCKIETCPICGGRLAECEHGPNGKK

SEQ ID NO: 25334 - protein, 559 aa, synthetic construct
MSEARTYEPTVTRVKTVRVIPPTIQPLSDIPAFSARPRRVAAYARVSTSSEEQLTSYEAQVKHYTEYIKSKETSDNWQFVDVYTDKGITGVSTKKREGFNRMIQDALAGRIDLIITKSVSRFARNTVDTLTAIRKLKEYGVEVYFEEQNIYTLDGKGELLLTIMSSIAQEESRNISENVTWGMRKRFADGKVTMPYGQFMGYRRGKDGTPEVVEAEADVVRTIFRRFLEGATPAMISRELNLAGVPCPSRKSLLSENEAEIAKARKKTSRWGTSTVENILTNEKYKGDAILQKTYCTDYLLKTFVVNDGSVVPKYYAQNSHPAIVSPEVFDLAQQELAWRRSLNCRYSGRSCFASRVVCGDCGAFYGSKVWHSTDEYRRTIWRCNNKYAGETKCATPHVTQEALEKAFVQVIQQMLSQKDRILTACREALDEAFDTMELDKAATRLQDQALGMAARVRQLVDENARVQRDQDEFKNDYEALLAEHARLSEKIRTIAEQKKDKAERRRRIEIFLHMLEEQKECADFEPGMFVALVDKVIIQHDGHMGFCFRNGMKCEYPQ

SEQ ID NO: 25335 - protein, 545 aa, synthetic construct
MNIAIYPRKSKFSPTSESIANQVAMCREYCDRCFDDPHYLVYDEDEGFSGKSTNRPAYTQMLEDMRAGKFQVLCCYRLDRISRNVRDFAELLDDLQRHNIAFVSVRNNFDTSTPFGRAMVYISSALAQMERETLAERVKDNLYEMARSGRWLGGVTPLGFVAKAQEVHRDDKKRKLLMLSPVEEELAQVRDLFDHFLRLGSVTKLLQYCLEHRIVSRNGNDYSRTTLRLLLTNPVYCTADAEAWAYFSSGDYQLCAQREDFDGVRGIQPFARTRKDDGGTVSRPTSDWIIAPGLHRGVLPGAIWVRAQQILQDNRDLGSAYKAPRTENALLSGVIRCAGCGAYMRPKAYGKPLPDGKRRFSYVCLTKIDSCGARCAMPNAPGRDVDALVIRELTSLTSDGGAISTLRSEARLAQGEARRTHAEAVATHEKAIASMQKKVDKLVDALAAGAPEGARQRILCEIDRYEQEIEQHRDALSELNASVLLDTDPSALLDAAFSALESFRTSFSSLTHDEQRRAIRALVDRVTWDGKNVSIEVFGEKTLPK

SEQ ID NO: 25336 - protein, 569 aa, synthetic construct
MKTAAIYARYSCENQTEQSIEGQLRVCQEYAASLGILIVETYIDRAMSGTNDNRAAFQQMLKDSSKKQFQYVIVYKLDRFARNKVESVINKKTLQDNGVSLLSAMERITDTPEGRMMETILEGFNQYFSEELTQKVNRGLRESWLKGNATGGHSVFGYDIIDKKYVPHPIEAPLVVEMFTKCAQGYTANAIEKYFKECGYRNRDGKTISLAVIYRALSNQKYTGTVERQGVKYDNIFPRLISDEIWNIVSKIHEENKHAPSRKKEVFNYLLSGKLICGDCNQKMVGISGTSKTGDTHYYYSCLSRTRKKINCNSKPIQKKLIEDLVIEITTKVIATESNINMLAQKISSAHKSTCEDNSKLKMLEKSRAEAVRSQNNIIKAIEQGIITSATKNRLNELETLITQYDFDIQQEKAKTESFLTVEQVKEYLHEFVNADTTDLNVRKLIINTFVRDVILYNDNIVITYNFKDVAGVPQVTKEYVKDIEQQIESADPSAVSFIKSSHISLARTPQKIIRTQILSSYYFYVIRDSNGRNRTQSCELCARSGVIAQTNYCRARRLQTLMLCVFFA

SEQ ID NO: 25337 - protein, 590 aa, synthetic construct
MKTVEKIERKLPVLKARKRVAAYARVSMESERMQHSLSAQVSYYSALIQKNPEWEYAGVFADYGISGTGTKKRDEFNHMLAECEAGNINIILTKSIQRFARNTVDLLNTVRHLKELGIEVRFEKEKINSLSGDGELMISILASFAQEESRSISENVKWGTIKRFKQGIPNGKFSIFGYEWQDDKLVIVPEEAEIIRWMYAEYMKGASRIEIGRALMDRGNYTRQGKPWVDSNVKVILTNITYTGNMLFQKEYCEDPITKHRRKNYGEMPQYFVEDTHEAIIPMDEWQAVQAEFKRRRDLGPFGNKSLKLSAFSTKITCGCCRKHYRHSGKRNTAGEVYYIWICQTKSQKGVSACPSKNIPEKMLQNTAAEVLGLDKFDEDVFSQQIEEVIVIGDDTLTFRFYDGHEVTTKWQSTAKTDWWTDERRKLWGERHKRKDTNPNRNTFYEFTGFIKCGCCGANYRCQSGKRKDGTPTRSWYCTGPRSECRNPAIRDETMKRLVTEILGLDEFDEAAMDAQIESATILDHMVTFHFRDGHIESRDFLDKRHGTPWTEERREKAKKSMKAAWTDERREAMSERIKKIRSEKKWPNP

SEQ ID NO: 25338 - protein, 523 aa, synthetic construct
MAKSVTTIPATLSRFTAAPINSTKKRRVAAYARVSTDNEEQLTSYEAQIDYYTNYINGRDDWEFVGVYPDEGITGTNTKKREQFRQMVADALDGKIDLIITKSVSRFARNTVDSLTTIRKLKEHNVEVYFEKENIWTFDSKGELLLTIMSSLAQEESRSISENCTWGQRKRFADGKVTVPFKRFLGYDMGPDHNLVVNPEQAKLVKRIYGMFLQGQSPFQIARTLTEEGIPSPGGKDHWNPSNIKSILTNEKYKGDALLQKSFTVDFLTKKKKTNEGEIPQYYVKDNHEAIIDPETFEMVQTLMTTRTKGRNRKSSVSIFSSKFKCGDCGSWYGPKVWHSNDAYRKVIWQCNHKFDSQKCATPTLTEDEIKELFLRAANQVIDQKEQFIAIYEQVLSRSLDTTALESELSDLEAEINIAAELIEECIKENAHVALDQDEYQKRYDALVARFDKAKARHTEVTDLIAERMARKHQIEAYLKNLRSREPLTEFRETDWLAMVDYITVHSKKDIRVTFKDGTEIKA

SEQ ID NO: 25339 - protein, 533 aa, synthetic construct
MAKKQTDGNLALEQQRVIVIPAHDEIVARKLRVAAYARVSSSSEDQLNSYRVQNQYYSELISSNPDWEMVDIYADEGITGTSVEKREDFQRMIKDCRKGKIDRILVKSISRFARNTKDCLAAVRELKELGVSVQFEEQGIDTSKVSSEMVTAIMASLAQKQSESISGNVKWGVQKRIQDKTFVTCKEPYGYRLVDRRLCIVESEAIIVRMIYEKYLAGISMEFIRDQLNVANIPFRENEKQHRWTRKAISYILANEKYIGDSLWQKTYSGDTFPYKQRKNKGEKEQYYVENTHQAIVEKSVWHAVAELRMQRAGEKHPEDYYAPSAFRKKVLCGCCSSMFRLRQNRGCTYWSCRQHDIDRNSCPNSQIPETVMQEAFCRLYYKLKHHGSPIFTQMLSNLQKIRYSRMLWSEDVISLNKKISDTLSQVQFLAQLQQAGGVDPDTFISSNNKLSEQLRRLKQEKARLLDTDSDDLADRTRDLMDVLEDGPDFLDSFDAELFDALVEKIIVDSNERLRFRLKNGLELLEQIERTRR

SEQ ID NO: 25340 - protein, 534 aa, synthetic construct
MLELQTANKNKRTKNGGGEGITALYCRISVDDNGSEGESNSIKNQRDILGRYAKQHGYRNIEYYIDDGYSGTNFNRPDFQRMMSDVDEGKVKTIIVKDMSRLGRDYLKVGYLTEFTFAEKNIHFIAINDNVDSENGSDNELIPFKNVFNEWLARDTSKKIRAVIRNKGESGKPLTNTPPLGYMKDPNDKNKWLIDERCAPTIREIFRLCVNGYNALAIAKILTEKGYDTPKAFYLKQGRNMYRNDTTEPYLWHRSTVYKILRNPNYIGHLVNFKTTRKSYKNKRFVYRDPSEWKIIENHHEAIVDKETFDLAQKLTQVKRVVKNHFDDINIFAGLLYCADCGFPITLRRVAKNRNYDFYVCSKYNRRTKIQCTAHSILKRVLNELVLEDIKRVMKEVKTHEAEFIEKYRKCLVKEMRSVRLSAQTKIVKAENRIKTLDDIIANLYEDNVTGKISDGRFDLLAKKYEAEQTALKSEIVELKKALDLVNDEESNIREFLKVVNSYTEIEELTPEILNNFIDRIYIGEKYADGSAHK

SEQ ID NO: 25341 - protein, 486 aa, synthetic construct
MQWYDDQANSHDNWIVLKKYIDEGITGTQAKKRPAFLQMVQDAKQKKFDLIVTREVCRFARNTVDTLVVTRELKNYGVEVYFVVDNIWTMDRDGELRLTIMATLAQEESRRTSERVRAGQKISRDKGVLYGNGNILGYDCDKNTGTYVINPEQAETVRMIYDLYSAGKGISQIRDEMIRRGRKDSLGLVRWENTKISRILHNATYKGYQGYLKSRRNNFLDQKIIKNYDEDTYLYVKGNYEPIISEEQWDRCKEIREQKKRYCHYLTQNGEVRKESGIYSSKDIWSKKLRCRCGYRMRRNKWHKNKSGEMIYGYKCYNQLNNGSKTVREQAGVDSSGACDLREVCDWKFEMMARHIFSGLWGSRKDILGEVSSLYRVNAREGKMENDKRKGELDQQIATIDAKMRRLTQMRIDDELPKSEYLEFKSDLEKKKEELVGQRSTLDSKAETDPDCLTERIQDFLLEKMDFTAHCIDRDVISKFVVVNKK

SEQ ID NO: 25342 - protein, 562 aa, synthetic construct
MRNQSAINKIPFAEGDETALYTRLSRDDELTGESNSIKNQRELLLQYAKSKGYANIQVYVDDGYSGTNFNRPDFKRMMERVEAGLIKRVIVKDMSRFGRNYLEVGYYTEVIFPEYDVQFIAVNDNVDSEVQTDNDFTPFRNIMNEWYAKDISKKMKSAIKAKGNSGKHTNPLPPYGYIKDPNDKNKWLIDEEAATVVRRIFGLCMQGFGPSQISRILTDEGIDTPKIHAKKMGRKVTIRENEMPEAWADQTVAAILGYWEYLGWTVNFKTKKKSFKSKKVILLPSDEWQVFKDTQEPIIDEETFWAVQKIREGKRRLDSLGEPNALSGMLFCGDCGHRLYLRRQRNPHQKDYFVCSVYRKKRKYFCTSHFIRLEDIEKILLRDLRQVTAFAREHESEFLDLAKKRSLRETEKLRAENKASLDKAVRRIAEIDGIIQKLYEDNVSGKISDERFAKMTATYEAEQNGLQQTAQRLKDEISAVREEGESVDRFMKLVNKYSDITELNAEIIRTFVEKIIVYEAEKIDGVKTQRVKIVYNCVGTVSVPNADNEPVKTDKTKIIEVA

SEQ ID NO: 25343 - protein, 548 aa, synthetic construct
MYKEYPKFYYYESLEYGRKSRMDDPLLSVEETLQRHSEIIDEYARKYLGGSIPEENRYMEVGSGESLKDRPEITRLLKAIENPAIKAIIVVDVQRLSRGDLEDAGKLIRLLRYTNTCVITPHKIYDLRDEYDRDAFERELKRGNEYLEYFKKIQARGRLASVKAGNYVGSVAPYGYDRVERYDEVLKKNYFTLVERKDQADVVRMIFNWYCNDDIGVTTICRRLEELGVKTKTGCSTWKPSIIFGILENVHYIGCVRWNWRKTIKVIENQEIKKLRPKAKVDEYLIFEGKHDGIISEELFYKARAIKGKRHRTKQNLSLKNPFSGIMFCTKCGSKIGYNTYNRNGVEFAPPKLVCNNQVHCKTGSVDYNEVLDYMCKVLRDCIEDFKVRIENDQDDSLKLHKDLIERLTKQLKDAEQKEQDQWEAQYDPDPNKRLPQHIFEKLNKKVLAEKEEINKALDKAKGSAPKHIDYKDELIKTTEALKALEDADLDAKITNQYLKSIIDRIEYDRPQIVRINKKNAEIFETDVRKGLQYHVAPYTIRVKLKCE

SEQ ID NO: 25344 - protein, 442 aa, synthetic construct
MDEKQVEVIKKVDGPVIRDRRKMGKPLTITRKRVAAYVRVSTNGEEQIQSFNSQKQYYQDKIDSNKEWVMVGIYADEGITGTKTTKREQFLKMIDDCMNGLIDIVITKSVSRFSRNLVDTLQYTRMLKVKGVTVIFEKENIDTSKMESEMQLSLLSALAQNEVESLSQNVTMGVQMKMSRGELMGFNGCLGYDYNPEDKSITINEAEAETVRLIYDLYLQGYGAYRIAKELTRLGKVNKKGNVKWTDSGVRGILKNEKYKGDLLMGKTYTVDPISKRRLDNHGESNKYYTKNHHEAIISEEEWDKVQDILKSRYRTNENVSDAERIKFARKYAFSSMCQCGFCGTNLTRRSHNQDTKHKKPVWKCRTATNKGIANCPHSKAVDEVVIENAFLEMFKLLAENFDDVLESVLSSVEETLSKDDSTEKLKRIEKEISSLEKKRKN

SEQ ID NO: 25345 - protein, 524 aa, synthetic construct
MVSAAVYLRLSDEDRNKKSEADESESIQNQKSLLTDYCRQRNWDIFDIYCDEDYSGTDFYRPDFQRMLADCESGCINVVLCKSQSRFSRDMAVVETYIHDKFPEWGVRFVSIIDHADSLDVTNKKTRQINGLVNEWYCEEVSANVRKVLQHKREEGKFTGSFAPYGYLVDPEDKNHLIIDEIAAPVVRDIFSWYLQGWGYRKIAAALNEAGIPNPTSHKRRTNSRYVNSNESKSSSKGLWTVSTIYNIIRNETYTGTLVQGKSHTVSYKNKKRKRTAEEEWIKISGSHDAVIDAKTWEMVRQKLKSRVRAGRTDQELSPLAGKVKCAVCGKPMKRNVYYNKKKTIRYYSLICGTYKTGAMNCSNKASISGMALERLLLEQINKLIENYCQQDKINVVNGIDESISRLIKLSESVCRDVSENNEKLIRLYEDKLDGTISKEQYIMMSRRYTDKIEGLKARKESIRHSIEELEEKRSATEKRDMIIDRYSRIEKLTRTVAEEFIESVLIGEKNESGQREITINWNL

SEQ ID NO: 25346 - protein, 522 aa, synthetic construct
MREQYLIYLRKSRNDAQLEAMGVDVLERHEKTLLALAKSMNLQIGAIYREVVSGDSIAARPEMQRTLKEVEAGLWKGVLVMEVERLARGDTVDQGIVQRTFQYSETLIVTPAKIYDPNNEFDEEYFEFGLFMSRREYKTIRRRMRAGVTAAVREGKWPFNRSPYGWKRVKLEDARGWVLAPDPDEAPVVKLIFDMFTGPDRVGITSICKYLESHGIPPRNGDRWLECTILGILGNIVNDQKVGIGHRKQITTVKDGVLTKSRESRLSNNYDLIATGLQPRLIDHDVFVEAQGYLGKGTPKPPESYGIKNPLASLVVCSCCGQKMQRRPKTTTPGCHGAPYDVLMCHTRGCPTIGAPLELVEKEVINVLSDWVAGYQLNPSQEVKNNVTEKQALLSAAIANRDALLKQNEKLYDLLEREIYTTDVFLERSSTLHERIEEAELSISALEKDLEYEKQKFENSSRFIPECKELLSSYWDLSVPDRNKALKLLIDRIEYKKTVKNKRGTVDTPTFELTLKPRIPRI

SEQ ID NO: 25347 - protein, 684 aa, synthetic construct
MSILQTIKTIIRVVLYLRLSDEDKNKLSKEELSQSIKNQEIMLRDYAEEQGWEVVGVYNDDDWSGSDATRPDFNRMIEECKNGNVDILLCKTQARFARDMELVEKYVHNLFHEWNVRFITVVDRIDNARKETKKTSQILGLTDQWYLEDTSLNIRETLKSKRKDGQLTSSFATYGYMKDPENKNHLIIDPISAEVIKRIYDEYLSGTGLDKIARRLNEDKILSPYEYKLLNGCKLKIPVIKDYVNYGYIEKTGTYMLDVSFTNKEEYILKDLVSFNYITTDMKSFNNKCDIVLKKYTNNRTKIYYSENDNIDINNFNIDDCILLNENDVIPKTAKVIISYTKELDRTHTINYQFEITLKENREHEDYYINICGKATDEIKKSDFIHNIRKKFKWSSSTIRTLLTDEVYIGNMVQFKSTTVSYKNHTVVWNDDETRIRKDNTHESIIAKDIWYTVQERLENTARSCKGGTVHPLCNKVYCSNCNQIFTKTGARRSDGTGYLCCKDKKTNWSNCDNKTSIREDQLHQFILEKMNEMLKKFYEEDDLKEMQNEVIEQDLYKDKLNSLEKELQSINKELQGKSTYFQKLYEDRTNGILPEKEFLILMNKYKDDNEKLEERQKIVKKEISSTLAKKETVKTKKNIFKKYRHIEELSIEIVEDFIDKILIGNYDETTNSRDIKIIWNFTI

SEQ ID NO: 25348 - protein, 520 aa, synthetic construct
MSRKLIRVAIYARFSCDKQRDASIEDQLYECNKYAERHGYTVVMQYCDYAMSGRSDDRPNFLRMIEDAKTGMFEIILVWKMDRFARNIEEQYYYEHVLRKNGGVTFESVKENIAGTSIEATSTKALNALFAEVRSRQSAEDTMRGMLGKARKCQYLGYPLYGYSHDGDKITLDPEKAPIAKRIHVDFLSGVAPKQILDWLLSIGVKTARGKDPGYGFVVSMLKNVRYAGVYMWGVKKDEAGNDVLDDLGRPVPLVYIEDGMPAIVSMSQKLSCIEKLGFRRRLKTNADYLLSGKLICSKCKEPMHGETAIGGSGIEYWRYSCRGRRKACLGSFNKETVEQGVVSGVREMLRDAALVDYLIDRHIQFRDERQSKATIEAVRKDIRAVKKQRDNLLSAVAEGLDFNHVKPKIAALDAQERALEKRIEELKREQNSVSREELRAFFSDMSKGALSDEQITLTFVSKVWLYESTAVAVMNFDSCESTQYEIELALKKHERPDQQAVRETSKWCPRRDSNARHPL

SEQ ID NO: 25349 - protein, 511 aa, synthetic construct
MSTNRAVIYARYSSNKQTEQSIEGQLRDCYAYAEKHDITIVGEYIDRALSAKTDNRPEFQRMIKDSANGAFNIIIVWKLDRFSRNRYDSAAYKIKLKKNGVKIISAMENISDNPEGILVESLLEGIAEYYSADLSEKVNRGMRETALKCHSTGAPVPLGYKIENKKYIVNEIEAPVVKKIFTMYADGDSAKDICDYLNEHGFKTRRGGKFNKNSLRTMLTNRKYIGIYKYKDIEIPGGMPQIIDNELFEKVGKMMIKNKRNAAASKPKEKYLLSGKVICGLCGDKMNGECGKNKSGRIYRYYKCNKQKRNKNDCPKHTIDKYFLEDTVINAVRSIVSNDKIIDRIAKKAVEAQMYDDTPQIINSLEQKLSETEKQIENILKAIESGIFTISVKDRLLELEKTRDILKSEIIKEKNDNPFLDYDTIKLILSQYSNGNFKDEKFRQKLVDVLIYKVIVFDDKIYILYNFSKDDNTKERYEDIIKLIEKSTAAQNGSPNVKRMRQALCYYGVCL

SEQ ID NO: 25350 - protein, 543 aa, synthetic construct
MNDENKRFAVYSRKSRFTGKGESIENQIELCRRYINLNYPNASEKNIFIYEDEGFSGGNTDRPQFKKMMDDASEKKFNVLICYRLDRISRNIGDFAKLIDRIGELGISFESIKEKFDTDSSLGRAMMYIASVFSQLERETIAERIRDNMHELAKTGRWLGGNTPTGYRSVQVQTITVDGKKRSSCMLKIEESEMTAVKKIFEKFLESESLTAVETYMIQNHIKTRKGKDFSRFSIKGILRNPVYMIADSDAWEYLSVLGAEIFAEKSDFDGNCGVMAYNKTLQKKGKTNKIRDIKEWIITAGRHKGVVSGKEWKQVQECLERNSVKAYRKPKNNTALLSGLLYCGDCGHYMRPKIYNSFYKDGEKKFSYLCEMKEKSRRSECSVSNPAGNELDAEVIKEISKLEEDKKELYYILNKAKKTFSDGRGSNTEIEELNEGLNVNNRKIASLVENLTELEKTVADKYIIKKIEELHKENELLKKRLYELIKTSENKKSVDVNYITDTLTVWESVIKLTEVRERREAVRTIVDKIIWDGESAHIYFFG

SEQ ID NO: 25351 - protein, 454 aa, synthetic construct
MECVAYLRVSTEKQAEEGNGLDSQKRDIENYCRKNQLIISDWYEDDGFTGSNMNRPALQRLINDCSKKKLKCVVAFKLDRLSRSMVDGIYLIERVFIPNGVDFRCVHDSVSYDSPMEQAYTQMMAVFAQLDKNTMLLRMRGGMLERVKQGYWMGGGNTPYCYRYSKEDGILVPIPERKEMALRAMNLYISGYSDVRIQKLIGFKSEFVTRQVLTSPVNIGMIPYKGNLYKGRHEPIFDIKVFELAQELRKTRKQSKSFCVNHENQLLTGLCYCGVCGCKMRYQKWTHGKHKIYCYSRDNGMSYLPNYNPNCSNSLEWAEDIEKQVEDEILKISLNLSSHKPKEIESCLDILSKQLQKEKTKLKRLYTLYAEGNDTVLEMIKETESGIDELKLKIQNEMKNPDNSQKKEFVYDNIKKLADVWEHIDKQNKNRILKTIISKIIIVNGNIEIQLKKF

SEQ ID NO: 25352 - protein, 608 aa, synthetic construct
MSERIVTKIPALAEWKNKPGTVSVKKRVAAYARVSTEKEEQENSLEAQKAYFRYLIQSRPDWEDAGLYSDEGISGVSFHNREAFKRMIEDALAGKIDLILTKSLSRFARNTVDALQTIRSLKNAGVAVYFEKEDINTLDSKGELLITLMSSFAQEESRSISENIKWGIRKRFADGKYSVAYSSFLGYYSVHKDEMLVDEREARIVRFIYLLYLENRSFQNIADVLMAAGILTVTGKKKWFSSVVSSILHNEKYKGEALLQKGYTVDYLTKKTESNNGILTQYLVTGGHEAIVSAEVWQEVQDRRLRYEQRYPTVSVLSNLIYCGECNSAYGRKMFRAPQVDAGYYPAWRCNGRVLHKTGCHTPSVYEQELMNQIAFALRHLLQVFYRNIFALCKDILNNAKATEVLQEWETNGLPDLYYELDCLPIIISRIVVETDDCVRIVFRDGNELEGAIGLFTPGGNARKQKERRTLDMIAWRERAAKRYTSTPFDYSEVCNAPFGGGKEQFYKQVSTLRAEGLGCRVISYYLGISCKSRVQRLFKEKGLTVEKARSEYYCWWCGAVIQRTPGARARLFCSVPCKGKYYYEKEKGKSCWLRMITIEGFLKMGAN

SEQ ID NO: 25353 - protein, 525 aa, synthetic construct
MSKVTVIPATVNPATKMPALTSKKRKVCGYARVSTDKDEQFSSYTAQVDYYTKYIANNSDWEFVKVYTDEGISGTNTKKRDGFNQMIKDALDGKIDLILTKSVSRFARNTVDSLVTIRQLKEKGIEVFFEKENIWTLDSKGELLLTIMSSLAQEESRSISENITWGKRKSAADGKISLGYSQFLGYDKGPNGTLTVNPEQALIVKRIYREFMQGKATWAIADGLTADGIPTPSQKTKQWSLTTVRSILRNEKYKGAALLQKNFTVDFLTKKVKANEGELPQYYVENSHEAIIPPAEWERVQVEYARRHSLSTKYSGKSIFSTKIVCEQCDAFFGPKIWSSNTHLRRKVWQCNAKFDRKTYCNTPYLTEDAIKAAFVEVVTRLFCTREEIITNCETELRALTDCTAIEQEQSMLQEELEVVINLTQKYIDKNATSEEDQNTYLRQYNEYVERYQAIKERLLQLNTERSARIARSVAFEDFLNSLRGMENAPVEFDESMWRLLVEKVVVKKDGFLKFVFTNGMEVVI

SEQ ID NO: 25354 - protein, 426 aa, synthetic construct
MDRTVECIKVDAPAKANIKRVAAYCRVSSGKDAMLHSLSSQVSYYSGLIQNHADWSYCGVYSDEAITGTKSDRPGFQRMLKDCEAGKIDLILTKSISRFSRNTVTFLQTVRKLKSIGIDIFFEEQNIHSIDGSGELMTTILSSFAQEESHSVSQNMKWRIKKNFEEGIPWNNALLGYRLKGDRYELIPEEADTVRRIFREYLGGFGKTKIANGLTADGIPTRFGGPWHPNTVGKILRNETYTGNLLLQKTFIEDHITKKKRINNGERPKYLVESSHEAIIPPETFKAVQKELQKRSEMYCHASKKSASYPFTGLLICAGCGKTYTRKITPTGAVWICRTFNTRGKAYCPSKQIPEATLYEVTGQITTSIKEIRQITVCNGNSLQYDMADGRIISQVWKDRSRSESWTDEKRAAASQQLKKRRKADE

SEQ ID NO: 25355 - protein, 496 aa, synthetic construct
MSSTNLYAVYLRKSRADLEAEARGEGETLARHKKTLYDIAKRMQISIAAEYKEIVSGESIAARPQMQKLLNDVTEGMYDGVLVMEIERLARGNTIDQGIVAQAFKDSNTKIITPIKVYDPNNEYDEEYFEFSLFMSRREYKTIRRRMEAGRLAAIKEGNFIISSPPYGYKKTNPAPKIHTLEVVPEEAEVIKLIYDMYVNQHFGKRKIATALNSMGIKPPRSDWWEGISIRKILCNPVYMGYNQWHSKSNGDTLYKGLHEPIISKELYEQAQERRINRKTSSTTSENTLKNYYSGLLYCGSCGKCMQRRTIERPSGIKIEHMVCRTTKCNTVSSRTDIIDEAVLTALKVHLAQLKNKSSGINNNNTQNENTIDVISMIKSEICDLKKQKNKLHDLLEREIYDENTYLERQSIVAQKLKEAEKALSNAEKITTQKISDEQAIINIELLLENFSSADPLQKKELLSNVVRRIEYSKTSDLRGIHNKKESNMTIKCFFI

SEQ ID NO: 25356 - protein, 455 aa, synthetic construct
MKTVACYCRVSTEEQVKYGFSIQAQKDALIKYCKENDYKYDFYIDEGISASSMKKRKALQKMLEKSVAYDMILFTKLDRLSRNVLDANNINKILQDNNCTMKAIDEDDVDTSTADGMFMFNLKVSLAQREIGKTSERIKFVFKNKREKGEVTSGTTKYGYKIKDKKFVVDPEEAANIRNLYKYFISVNGDHKKTYSYFVKNFPGKGQDALFNYLRETAYIGKYKLYRRNVYLDNYIPPIMDKELFDEVQNLLPRVEKVFKKENISSIFAGMLYCYYCKSRLVRKVDYRSKNKIINYFCDKQYKYKVGINEKQCQNSRVISDKTVEEYLINNLKELCKQYISKSTIKTKPKPQKNNIKINSLKNKLSKLKDLYLDDLINKEEYKQDYIRINKEILKLEEAQKEEPQKDFTYLNELINKDIPDIYNTFNIEEKRKFWLKIIDKIYIKEGKIKEVTFL

SEQ ID NO: 25357 - protein, 538 aa, synthetic construct
MPEKIIREIPPHPIDRKPRKVRKLLRVAAYCRVSTEEEEQKGSFETQCSYYTEKIQSHDGWTLAGIFADDGISGVHTKKRDDFLAMIAQCKKGKIDLILTKSISRFARNTLDSIQYVRELKKQGISVIFEKENINTGTMTSEMILTVLSAFAQAESESISQNVARGKRMGYRQGKFSFPYGCMIGYRKGPDGNPQIIPEQAETVRLIYNDYLAGDSLVKIAENLDARGIPTPKNKGKWSSQTVMRILQNEKYAGHVLLQKTYTADLLSGTIKKNNGELPQYYIENNHTPIVSQEMFLLVQEEIARRKSKSPASQKKVRTNRGRYTSQYALSERLVCGECGCYYRRVTWNIRGKKKIVWRCINRLEFGKKYCKSSPSISEDVLHNAILRAIRELAQQQREQTQKCLHDTILQCATGGLDISLTTLKNQLEQKNRDFDRILGMAFTDGAESEFVEAKISQLSDEILRIKQMIKRQEHETKMQQAKGDKTRDLLTLIADGDFSIAEYSDMLVVRIIEQITVLSAEKIRIRFVDGYTKEQRL

SEQ ID NO: 25358 - protein, 513 aa, synthetic construct
MRVPQVKIIQPLEEQVKRLRVAAYVRVSSDSEDQLNSFSVQMEHYTGLIKDNAEWNFAGIYADEGITGTAADKRESFQRLLKDCRAGKIDRILVKSISRFARNSADTISVTRELKQLGVSIYFEKEGIDTADMGSEMLLSMLGAVAQEESVSISRNLQWGIRKRMQKGEYVTASVPFGYSYIDRTLVPNEKEAAVVQDIFQYYISGMGMQEIVNELMSNGIQPPRRAKEWCISDIQYILTNEKYIGDSLLQKKLTVGEFPSRRVKNDGDLSQYYVENSHPAIIEKEVFAQAEKLIGQKRLTGSVRVAYPLSKKLVCGVCGTVFRRKASGRDFNAITWVCRAHYLNTEKCPMKPVAETEIHRAFCFLYNKLLLHKTVILEGLLQDLQEIKRRDQCSHPDVIMINRELLESLKQVHFLTQLHSKGVISADIYLERRTALDKKTAELQKKLLSSQQTNKLDEVIGQTEKLLSILYEGTPITRFDADIFGDIVDKIEVGHEAFCFYLKNGLHLLEKR

SEQ ID NO: 25359 - protein, 515 aa, synthetic construct
MNTVIYARYSAGPRQTDQSIEGQLRVCTDFCKQRGLTVIDTYCDRHISGRTDERPEFQRLIADAKRKKFEAVVVYKTDRFARNKYDSAVYKRELKRNGIQIFYAAEAIPDGPEGIILESLMEGLAEYYSAELAQKIKRGMHESALKCQSTGSGRPLGYRVDEQKHFQIDPESAQTVQTIFEQYIKGESNAAICELLNSRGLRTAQGKPFNKNSINRIIKNRKYIGEYRYHDIVVEGGMPAIISKDTFNLAQAEMERRRTRKAPKSPKAEYLLAGRLFCGHCKGPMQGVSGTGKSGNKWYYYYCGNTRGKNKTCDKKQVSRDRLERAVVDFTVRYILQEEVLEELARKVHTAQERQNDTASEIAFYEKKLADNKKSIANVLRAIESGAATQTLPARLQELENEQAVILGEISFLKGKRLAFTEDQILFALMKHLEPYPGESEQDYRRRIISDFVSEVYLYDGRLLIYFNISSEDGKLKSADLSNIEGGEFDEGLVSSTIKTCSSLNCRFCLFLPPF

SEQ ID NO: 25360 - protein, 525 aa, synthetic construct
MARAVTVIPPTIQPITHLARNAVVRRRVAAYARVSTSSEEQLTSYEAQVDYYTRFIQSKPEWEFVRVYTDEGISAVNTKKREGFNQMVRDALDGKIDLIVTKSVSRFARNTVDSLVTVRKLKEKGVEVYFEKENIYTLDSKGELLITIMSSLAQEESRSISENVTWGQRKRFADGKVSLPYSHFLGYRKGENGLPEIVPEEAETVRWIYSLFLSGKTTCSIASLLTREGIPTPAGKKKWAASTVESILKNEKYKGDALLQKAFTVDFLTKKQKKNEGEVPQYYVENSHPAIIDPAEWKLVQRELERRKSIGRSYSGNSIFSSRLVCGDCGGYFGSKVWHSTDKYRRTIWRCNSKFTGEEKCQTPHLTEEEIKARFLDAFNTLVSDKERLLDECRTMQAALTDTGSLDSAIAALLSELDVVAELTKRCIEENSTTAQSQDTYLEKYNALVERYEAAKDRLEKLQAAKAQREVKAEGIGGFMFELAEYGQPIAEFDDRLWLTVIDTVTVHRNGRLTFKFQTGHEIFV

SEQ ID NO: 25361 - protein, 438 aa, synthetic construct
MARTIQQISFPAPMRPSLKRVAAYARVSSGKDAMLHSLSAQVSYYSALIQKHTGWLYCGVYADEAFTGTKDSRDGFQSLLAECRAGNIDMVITKSISRFARNTVTLLETVRELKALGVDVYFEEQNIHTMSADGELMMTILASYAQEESRSASENQKWRIRRGFERGELINLRFLFGYKIEKGRVAVDPEKAAVVREVFRRALEGASLTSLAIDLNRRGFTGVLGGKWNSMRIREMLSNEKYLGNALLQKQYRNNHLEKKEIPNRGELPQYYAEGTHEAIIDQATFDAAQELLAGITENSPVKRPRRRSAFTSMIACAVCGRNYKRCTGGKRHFWNCPTVVQTDLPSCGTSQIPEKLLYDLAAQVLGLAQFDEGVFLERIKGIDALPDKTLVFHFKDGSTAERHWEHISRAKSWTPEMKEIARQRALAQRRGEKWQEP

SEQ ID NO: 25362 - protein, 535 aa, synthetic construct
MKKEKAKTPENNRAAVYARYSSRKQGEQSIEGQLSEAYKYAETHGYNIIHEYIDRAKSGRTDNREAFQEMLRDTAKGTFSTIILWKLDRFGRNREEIAANKYRCKKNGVKVVYVAENVPDSPEGVILESVLEGMAEYYSLQLSQNVRRGMHANAEKCQSTGGTTPLGYAVDPATKKFVIDPNTAPTVRRIFDMYAGGTKISEIVRTLNDSGIRTARGSRFKVDSLYTVLRNVKYTGIYTYNGSVRIENGIPAIVDRATFEKVQEMLKVNKRKPSKLWDTFDYILTDKLFCGMCGSKMVGESGTSKNGTKHSYYTCVKKRRDHACKKKAVRQYYIETLVLDRIAAILDDDSLLAFIADNVYSYYVKLQNDDDMTDALKKRLREVEKAQINILRAIEAGVFNDMTKARMDELDEQKSELQAQIAEEEYAKTGLATRDTILAWLYSQREKDLSDRASQRQLIETFVNAIYVFDDRIEILFNYSRDRRSIKFEELSDLYEYGDVFVSSALSFTSPEAGQPRIMEAGLSLFPYRPMGDWF

SEQ ID NO: 25363 - protein, 516 aa, synthetic construct
MPKTEEKQAVKAVIYARYSSDRQREESIEGQLRVCEDYARRNNITILHTYADRAMTGISDQRPEFQMMIRDAATMAFDVILVYKLNRFARNRYDSAKYKHKLKKYGVKVVSAMENIADDPSGILLESVIEGMAEYYSAELSENVLRGMTQNALEGKWPGGVIPLGYKLDKCGRLIINEEKAPIVRMIYQMFLDGMSVARIERELNYKKYTTDAGKVFSRSRVYYILHNERYIGTFQWKDIKKEGIIPPIISKEAFRAVQERINAMKSSSYRTNNNYLLAGKAFCASCGAKVSGTSGKSQNGNKYCYYGCSHHHGSARYEYCETKNIRADVLEKLVCDKTHEILSSKKAIKEIARQAVKLRPRDESELEIRAIKNHISSCQKKIDNCIKAIENGVMSNALVESLNENERTMDVLKEKLAKASLMQGSGLLTEEKIQFFFETIREKAKETEKYNDILLTSLVRAVYICNEYVEIQYNYAEQLPILTNPVRIESCSYKCTNGGTIWIRTKDLFDVNEAL

SEQ ID NO: 25364 - protein, 508 aa, synthetic construct
MKKAIAYMRFSSPGQMSGDSLNRQRRLITEWLKVNSDYYLDTVTYEDLGLSAFNGKHAQSGAFSEFLDAIEHGYILPGTTLLVESLDRLSREKVGEAIERLKLILNHGIDVITLCDNTVYNIDSLNEPYSLIKAILIAQRANEESEIKSSRVKLSWKKKRQDALESGTIMTASCPRWLSLDDKRTAFVPDPDRVKTIELIFKLRMERRSLNAIAKYLNDHAVKNFSGKESAWGPSVIEKLLANKALIGICVPSYRARGKGISEIAGYYPRVISDDLFYAVQEIRLAPFGISNSSKNPMLINLLRTVMKCEACGNTMIVHAVSGSLHGYYVCPMRRLHRCDRPSIKRDLVDYNIINELLFNCSKIQPVENKKDANETLELKIIELQMKINNLIVALSVAPEVTAIAEKIRLLDKELRRASVSLKTLKSKGVSSLGDFHAIDLTSKNGRELCRTLAYKIFEKIIINTDNKTCDIYFMNGIVFKYYPLMKVISAQQAISTLKYMVDGEIYF

SEQ ID NO: 25365 - protein, 700 aa, synthetic construct
MDSNAFLNDLMSKMKLPEAKGKKKAEQSESVAQILAAMQKVRAEKKKPPVTSYAPVKEMPVNEPESMEDFSQLASDVMQECRPAMPTVPAASQEKAVRVAAYIRVSSTNPAQEDSYEMQERYFMSLLAGNAGWTSAGIYSDHGISATSREGRTGFNRLLRHCKQGKIDRVLCKSISRFARNTQDFLVALRTLKENNVTILFEREAMDTADAYSEFILTTLAAIAQEESRSISANIAWSNQKRFPAGNVCNKDIYGYEFRKGEYTVNENGYRYRAVFIIPEEAEIVRMVFRLFTKEELGFTQIAQKLDAMHIQPPNSGCRQRQKRKPTVLPAGTLKEEDKRGWTATDVRYMIANVRYCGSVLCQKTYTDHRNGRKQKVNKGEKPKYLIRNHHPAIISEELWQEAQEVWKVYTAKYRGIEKGRNERNYSKLLLCGECGRYFQGHSTTRTTIWRCATKLAQQGQKRCRMEPVYEEQIQALLRKAFAEKFKLVEKMDAEVHEVMQMISKAPIDNVRNQALRNLSEKLREIHDFDQMEQEGDFLKRQLSAVNYSIRDAHQHIRDIQAEKEALKVRSEVLGEPIEKEAVTELEDRLLNEEEQLEKLEHEAQQQAEQVRYMEDYWKKLEQTYEIREKTLQWLDSLAGGTQMFLDEAVGTYVKAFVLSVTIFSPKHFRIHWFDDTCTDVECDSVFEGYQQPGMIRRKY

SEQ ID NO: 25366 - protein, 592 aa, synthetic construct
MPNLRKIEAAVPAIREKKKVAAYARVSMQSERMLHSLSAQVSYYSGLIQKNPDWEYAGVYADDFISGTNTVKRDEFKRMLADCEAGKIDIILTKSISRFARNTVDLLETVRHLKDLGVETRFEKERIRSMDGDGELMLTILASFAQEESRSISDNVKWGIRKRMQNGIPNGHFRIYGYRWEGDELVIVPEEAEVVKRIFRNFLDGKSRLETERELADEGITTRDGCRWGDSNIKAVLTNVTYTGNLLLQKEFISDPISKQRKKNQGELPQYYVEDTHPAIIDKATFDFVQEEMARRRELGALANKSLNTSCFTGKIKCPYCGQSYMHNKRTDRGDMEFWNCGSKKKKKKGTGCPVGGTINHKNMVKVCTEVLGLDEFDEAIFLEKVDHIDVPERYTLEFHMADGNVVTKDCLNTGHRDCWTPERRAEVSMKRRKNGTNPIGASCFTGKIKCVSCGCNFRKATRNCKDDSKVSHWRCAEHNGCDSPSLREDLLEQMAAEVLGLDAFDAAAFREKIDRVEVLSSSELRFCFKDGRTVSRNWQPPERVGRPWTEEQRAKFKESIKGAYMPERRRQMSEHMKQLRKERGDKWRREK

SEQ ID NO: 25367 - protein, 550 aa, synthetic construct
MDIKKAREDLRKGKTIYDMPLRVVYYARVSTDKDDQLNSLENQQNYFEEMITENKNWVFCGGYIDEGISGTAVKNRDKFLKMIEDATLGKIDMIVTKEISRFSRNTVDSIKYTEYLLKQGVIVYFLSDNLNTIGEDSEFRLTIMSSLAQDEVRKLSERVKFGINRMIKDRKLIGGNLTGYFKKDGRYEINPAEAPIITYLFETYASGKVGLKKIGQDLAKMGYLNSKGEPYSDTTMAKFLTNPRYKGYYTARLTEVENYKTHKKKKVPKDRQIIEHDDRVPAIVSEELWNKANELHEMRKKSPARHILNSEKSLETAKYSCLLYCKDCGNVFIRAGGSNRANNPTWSCKKYKTEGVGACASPILREEYLDKIFVQIFSDFIDNKKEYLSGVINEYENIISSNNSSDNIESINNQITKIENLKNKLLDLSIKGMIDDLEFKKRNDKFNNEINSLKKKIDRLNNPNAELTKLKEKIIEVKNTLTSKVDLQKELPNLMRILVERVEVEKINGDRKHVRLIIYFNFNADTIYRELEIDNKIKKLELNFYWDFFL

SEQ ID NO: 25368 - protein, 549 aa, synthetic construct
MASQKYKKKSDNLIITGVIYARYSSHSQKEESIEQQIEECTAFAVTNGISVVGIYADKAISGRTDRRNEFQRLMRDAEKRKFDVVIAYKSNRISRNMLNALQYESRLDSFGIKTLYAKEEFGNTAAGRFALRTMMNVNQFYSENMAEDIRRGLKDNAAECKVNGSLPYGYKKGEDGKYAIDEPRAAIVREIFSKIVDDVPYADIIRSLNDRGILTKTRKPFNKNSFNRMLRNERYIGIYEHSGVRVVGGVPAIISEEVFYAVQRKLQEGLNSDGAKRKSNSDYLLTGKLYCGECGSPMVGYAGTSRNGTLHYYYTCKSRGNDGCTKHNVRRDFIEQFVVDLTRACLSRADVTDWLVSGYIELKKQAQETSDVPVMEEELSSRKKALDNIMKAIEAGIFNETTSARMQELETEIHDLERSIALGKAMFEEPVDGERMRFYLEKLRNGTPDNQAYRKELLRTMVKAIRLWDDRIEIEYNFTGTDGDGNNYRVVTEFLKGDSGSASGVHTEPPQPHQIRLIVLIREYLKLSTFFFLQKCLRHKAFRQSDTLE

SEQ ID NO: 25369 - protein, 572 aa, synthetic construct
MASRIAEKLAAKKAAIYIRVSTHWQVDKDSLKVQRRELIAYVTLVLGITDYVVFEDPGYSAKNTDRPEYQAMMDRIRTGEFTHLVVWKIDRISRNLIDFATMHDELQSLGVTFVSKNEQFDTSSAIGEAMMRIILIFAELERKTTAERVTAVMLSRASDGQWNGGRVPFGYSWSKETKTFSIVPEEAKAIRRMAELYEQYQSLLYVAKYLNDAGIVTKTGGQWTPTTVRTILTNPWYIGQYVYNVHSDGKGIEKRDSDEWITVESHHEPILNDDVFYRMKFLLTRNKRGGVPSHKTYVRKNIHVFAGLLRCGQCGSNMTANLDRRRANGFRPSQYACGSRRRKGTSCTNKYISDTTLGPFVLNYVANIIRASKNSSEATTPDVLERKLLRGEAFEDVASVSTDALGQLLDAFRSAGDAVEYRPQIAFSGDDNSIREIDTLRARRRKLDNALARLNALYLYDDEAMPEKDFVMQRGQITKQLEEVNARIEELQNQESSEELGDGFIGKASYYIMANKLIEDRYIDYEKYIRAIDPSIPHSFLQQIIDHIVVNDGRVTSITFKNGATHTFTYKT

SEQ ID NO: 25370 - protein, 527 aa, synthetic construct
MYYLMYLRKSRADLEAEARGEGETLARHRRALRELAARNGHEIRREYAEIVSGETIASRPQMQHLLMDIADPECEGVYVMEVERLARGDTMDQGRVAQAFLYSNTKIITPAKTYDPRNEFDQEYFEFGLFMSRREYKTINRRIQAGRIQSVQEGKFPSSVAAYGYRKVRVPGGKGYTLEVNPEEAAVVRQIYQWYVHGIDGKPAGVARIVRQLEKLSIPSGERSPGWRAARINRMLHNEVYIGKVRWGHISVQRTLTPDGVQAKRAVSHNYRLYEGLHPAIVEEELFQAAQRKLTGTRVPLRNGMALANPLAGLVFCKHCGHQMTGQTASGKRAAQIFCKMHGCPTVANARGPVEDAILGELRAWLDDYQAHIDPFRKLTQGDNEERSLLEKALAQQEEQKKKLLKQKSSLHDLLEEGVYDVTTFQERLAALQIRLRETDAAMEAAKAQLGTLGPQYRPAEQLMPAVQHVLDVYHTTASAQEKNDLLKSVISRIVYDKTVRGTTSPKSNPNSFQLDIFPALLTDLRP

SEQ ID NO: 25371 - protein, 521 aa, synthetic construct
MQRIECRKFIETQGWTLVGEYAEKGVSGFKVSAEKRDAIMSIRKEAERGAFDVLLVFMFDRLGRRDDETPFLVEWFISKGIEVWSTREGQQKMESRADKLINYIRYWQAGGESEKTSERVRTKHRQMVEAGLWRGGARPFGYKLIHTGRIGKKNRQLFDLAIDEKESGIIRDIFDGYIRRGMGMHRLANYLNSHYPSPDKIWAPQSIKTILTNPIYIGISRCGDVRSPVNEALRIVSDEDFQFARHVMDMRVTRKTQTRGDIDEDNPDEAKRTKTSIYGASLLSGLLYCAHCGHKLVGTYHTKQRANGECYYRPVYRCYNGATKAKGCDGQRTYSAARIEKAVLEIVHQYFSHFGASMDAVWKEQQRLQIKQGSGARLKQAELSLSRLQAQHKKLREELVKVLMGESIFDEETIKGMLDEKQDAIEKAEAYLKEVRASAEDTEQKLQQLIFQYRSIKNWSSVFDQANDDEKKMILARIIEKITVDKNYNISIYFFLTLEDFRKEMEDNVEKIEILEASQCI

SEQ ID NO: 25372 - protein, 436 aa, synthetic construct
MEQAKKKIIRKMKPAAAMPRLERVAAYCRVSSGKDAMLHSLSTQVSRYSEFIQRHPGWAYAGVYADEALTGTKDDRPEFQRLLADCRAGKIDRVLTKSVSRFARNTVTLLETVRELKELGVAVYFEEQNIDSLSGDGELMLTILASFAQEESKSVSDNCKWRIRKDFSEGKPMNLPLLYGYRREKGRIVIDEREAEIVRFIFRSCLNGMGKGRITEALREQGVPCRLGGEWQTETVGGILKNEKYTGDALLQKTYIENHLTKRKCFNRGELPQYYAESTHPAIIDHEMYEKVQVLIAERREKTNVQKDVTARYPFSGLIVCGCCGAHYHRRTNPTRITWQCVTYLRRGKKHCAAKQIPEETLRSLTREALGVPEITEENIRALAEIQIPCPNHILFVFKDGHETERVWQDRSRAESWTDEMREKARTQMKRRHGHA

SEQ ID NO: 25373 - protein, 549 aa, synthetic construct
MREMTMNQAASDLVRISPNGTKVRTIPATVQHFAPSTPLRVRLRVAAYARVSTDEEEQLSSYEAQVDYYTRYIQSNPEWTFVEVYADEGLSGTNTKKRRNFNRMIDDALAGKIDRIVTKSVSRFARNTVDTLTTIRKLKEKGVGVTFEKENIDTLDSKGELLITIMSSLAQEESRSISENVTWGWRKRISDGKVSVAYSRFLGYEKGEDGSMQVVESEAKIVRQIYGMFLDGQTPSSIASFLTKQHIPTPAGREKWQSSTVKSILINEKYKGDALLQKTFTVDFLSKKAKLNEGEVPQYYVEKSHPAIVSTEVFDLAQYEMKRRAKKGRHTSAASIFSDKLVCGECGAVYGSKVWHSTDAYRTMIWRCNEKYAVKGQPCPSPHLREEEIQNAFVQAISQVLEQKEEILSALQEALASLTDASGLERECDHLQAEQDAVAQQIGRMIRENAEVAQNQAEYNARLQPLEDRYEALKNAMLKTKEAISEQTGRRRKLEAFMRELSENDFLTAFDERMFLGTTEKITVSKGQRKSEKQLVFRFKDGTEVTVTI

SEQ ID NO: 25374 - protein, 590 aa, synthetic construct
MRVSVNLNAQKPDTTTNAVIYARYSSHGQTEQSIEGQLAKGHEYAAAQGYTVVHEYIDRAMTGRNDNREAFQKMLSDTGKHQFQVVIVWKVDRFGRNREEIAFNKHTCKKNGVRVEYVAESLPNSPEAVILESVLEGMAEYYSIQLSQNIRRGQLESAKKCQCVGGSVPLGYTLDSDKHFVIDPQTAPVVKKIFDLYAEGATISEITGQLNEQGIRTARKQLFTKNSLTKLLKNEKYIGVYTYKDIVRVEGGVPAIVDESTFDRVQELLKINRRAPSHTWTKVEYLLTDKLFCGHCGSPMVGESGFSHTGAKYSYYGCIKRRREKACDKKPVRQDWIEALVLDETVKLLHDDELMEYIIDRTWEYYQVTDKVQEEKAVLEAQLAEVDKAINNLVRAIEAGIFNAATKSRMDELDAQKAALTASLADLELTSGIRITRDHIEYFLLRLRDLDVKDRECQKRLVQTFVNAVFIYDDGRVKITYNYSGQSSTITLNQIASAEKGKGFVCCLPCSTSSPRFPRGVAALFCFLGKTAANQLPISAVLCYNGSENGGGGTENEKAACCVPDGARLLGLRGVRGRNAGRRYGHVRAI

SEQ ID NO: 25375 - protein, 578 aa, synthetic construct
MKGAIYSRVSTEQQDYSKQTNELKDYAKRNGIEVVYVFEEKESGFNNNRPEFEKLRKLTKQDIDIILVWEISRISRRAIYLQQQVQEFTDKGICIYAKKDGFSTLNDDGSVNASTKMLIGFASIIAEQEAATLKERTISSKRNKILREGKSYTYYAPYGYDYSKETKMLSINEKQAQVVKRIFQLSIDGYSTERIAILLNAEKIPTKGKKENWTAGTVCNMLTNPVYKGEANYTLKKEKKAGSTYCKPMEVVTISTPAIIEKEQFELSLQKLAERTKRSNSFGTKYNPLLRGLIHCPHCDVKYVYNFGTNQYLCVNKYKKASNKNVHCTAKCISNKLDSIVWNVVKTFFYKELAAGKAQEQIEPLQAEIESYKRQILLLDGKQSELTARANIIVDAAIEIKIQFPNMPDLYANKMKEVEEINKEASKYQKEKERLEKLIHSNESRIKNINRASKESALVESITDETEKYDLVHKAIDKIMIFGEGKTSIIIVTFSTGQTIYLGYSSKSNSKYYTIFYPSSDIYFDIQTSKGYINHLKEKPTINSDGSIYLGDLTGEVKEYSIIDFVNYLDIEENRRYY

SEQ ID NO: 25376 - protein, 514 aa, synthetic construct
MQMEYAMYLRKSRADLEAEAHGEGDTLARHEHILMELAKSRALPIGAIYREIVSGERIANRPVIQQLLSEVEDGRWKGVLVTETSRLARGDTIDQGIVAQAFKFSGTLIVTPAKTYDPTQEADEEWMEFGLFMSRQEYRMIRRRMTAGMQAAKREGRYISNVPPYGYERYKLDGRGWSLRPIEPQAKVVRMIFDLYLSGLGYCEIEKRLNALHIPAPKSDKWSARTIPGILRNAHYIGCIPAAFRPGKKVVKDGQITVTRPRNHNCELYKGLHEPIIDRAVWDQVQARLGKNAAVRTPGNRQQSNPLAGLIVCDCCGKRMQRRPQTSTSSQTQIQCTTRGCATVAHNADELEQLVLDSLRTFLAQIEVGTPVAPDLSAEKHALSEIEKSLTDLEARQRRTFELVEDGTYTREIFLSRQAELTAERERLTADRAAIQQKIEQAQHEYDARTGLAPAVRHVLDTYNTDLPAADRNKLLKQVIERIDYHKRTRTRWTKEQDLSLTLHPVVFSSSTNR

SEQ ID NO: 25377 - protein, 547 aa, synthetic construct
MARKKNIAAGQNAVIYARYSSHNQREVSIEQQVRECMKHAAELGLHVVGTYEDRAISGKTDKRPNFQRMMRDAEKGKFQAVVAWKSNRIGRNMLQAMVNEAKLEDCGVKVFYAEEDFDDTAAGRFALRNMMNVNQFYSENMAEDITRGLYDNASKCMANGRQPLGYKRGEDGRVVLDDANAAVVREIFTRVAAGDLFVDIARDLNAQGIKTSKGANWNKGSFQSICQNERYRGIYIYGDVRVVDGIPRIVSDDLWYRVQEAMRMKKNPVGTRHRVGAEDYLLTGKLRCGHCGSYMTGVSGTSRNGELHYYYTCQKRRTEHACDKKNIRRDVIEPAVAQAIKMYCLTDDVIEWMADRTVEYWEKHDNDLQIEALEQQLEENKKATSNMLKAIEMGIITEATRTRMVELETEQSRLSVQLNAAKEDVVKIDREQIISYLELLQQGDIHDRDFQMELFKNFLVAVYVYDGNRMKLVFSCMGDQNSVEIPLETGEDPPDGGLSPDAKMFVLTPDSSTKKALYFVGSTVLFFLHLRTLTMQSVWPYRRSKPR

SEQ ID NO: 25378 - protein, 529 aa, synthetic construct
MAKVRVIPSTLNPLTQSPISETKKKKVAAYARVSTDSDEQYTSYEMQVKYYKKFIQEHDGWIYVNVYADEGITGTNTKKRDSFNQMINDALDRKIDLIITKSISRFARNTLDTISITRKLKASGVEVFFEKEGLWTFDSKSELILTIMASIAQEESRSISANVTMGKRWGMQEGKVSFAYKNFLGYKKENGKIVIDEEQAIIVRRIYSMFLKEGKTCSGIAVQLKKEGILTPSGNSSNWQKNTVLSILTNEKYKGDALLQKTFTANFLEHNVKRNNGQLPQYYVENSHPAIINRYEWEQVQTELARRQEIGRNYSGAGAFASKLVCEDCGGFYGMKVWHSNSKFKKMILQCNNKFKKEKSRCQTPHLTEDEVKEMFIRAYNETMKDKTKVIEDTEAVIAMLTNTDEIDKRIASLTSEIEIVSELVKKLIRENSSAAQSQEDYQTKYNELSSRYDKTKKALEKAMQDKTHKQGQGIKLQSFLESLKQKECIIDQWDEELWMIMVEKAIVHRDKSITFKFYNGIEIIIAAA

SEQ ID NO: 25379 - protein, 548 aa, synthetic construct
MQTIPIDLSALTPEERQQFADNPSVLSSDCEAVCCLYMRYSSDRQTEQSIEGQLRELIAYCKHHSYRVAAIYVDRAISAHASMDKRPAFQQMLADSARSSWKTVLVYKLDRFARNREDSAIARMRLRKNGCNVESAKEGISKNPEGVILEALLEGMAEYYSLELSQKITRGMRESAIKGNCLGGQIPLGYKIENKKYVIDPLTAPLVKEAFSRYGDGETAASICADFNARGYRTASGAEFNKSSFKNIFRNEKYIGVYKYKEMRREGIIPRIIADDAWIAVQSRLKVNEAAPARGKAKVAYLLAGKIFCGHCGAPMTGECGRENPGKMYNYYSCATRKHHNSCEKKPVPKDWLEDVVAQDALDVLTDEIIEFVAEVAAQQSEEDIQKNTQIPVIRKKISEIENKIRNLTKALECASVAPDAIVERLAELEAQKKGLSTQLSDEERGVIPLTKESVVVYLKAVREKAVPLETQKAMLIEMLVNSVTVYDDEPGFLKLVYAYRLTQIPTRTYRVPIPAKVPCSDFRTQPAPKIAARPALIGRACCFIYCT

SEQ ID NO: 25380 - protein, 520 aa, synthetic construct
MVKCMKSVAERAVPAVIYARYSSSHQREESIEGQVRECREYAEREGYSVLQVYADRAITGRTDERPEFQRMLADASKGVFQAILIYKYDRFSRNRYSFAVWETKLKKHGVKVISARENVAEGAAGIVLKSVLQGMAEWYSVDLSEKVTRGMKENALKAKWTSGTVPFGYTRDAEQRLIIDPERGEYVRQIFEKVLAGEKYVDIASWLNMLGVRTARGAAWNKSSFTWMLKNVVYTGLFRWKDIEIKNAVPPIVSKELFEAVQRKLKTYGRRGINVQKSDKYLLTPNIICGECGGPMHGMSGKSRSGELYYYYACANKRAKRTSCSISPLNRDELEQAVYNCAREVLLHEENIKLIAEQAEAVAEAQVDNDLAEMKAERSRVKKSIANYAAAIANGATSGTIIELINAAEAKAAALDEAIAERELVTSPPKVSKEAIEYFLRNIAAAPDDKMKEKVISTMVNSVVVERVPDEGTKKDSDEKYSITVRFNFTDTPQLSALQSFDVREKSKMVTSAGLEPATF

SEQ ID NO: 25381 - protein, 684 aa, synthetic construct
MSILQTIKTIIRVVLYLRLSDEDKNKLSKEELSQSIKNQEIMLRDYAEEQGWEVVGVYNDDDWSGSDATRPDFNRMIEECKNGNVDIVLCKTQARFARDMELVEKYVHNLFHEWNVRFITVVDRIDNARKETKKTSQILGLTDQWYLEDTSLNIRETLKSKRKDGQLTSSFATYGYMKDPENKNHLIIDPISAEVIKRIYDEYLSGTGLDKIARRLNEDKILSPYEYKLLNGSKLKIPVIKDYVNYGYIEKTGTYMLDVSFTNKEEYILKDLVSFNYITTDMKSFNNKCDIVLKKYTNNRTKIYYSENDNIDINNFNIDDCILLNENDVIPKTAKVIISHTKELDRTHTINYQFEITLKENREHEDYYINICGKATDEIKKSDFIHNIRKKFKWSSSTIRTLLTDEVYIGNMVQFKSTTVSYKNHTVVWNDDETRIRKDNTHEPIIAKDIWYTVQERLENTARSCKGGTVHPLCNKVYCSNCNQIFTKTGNRRSDGTGYLCCKDKKTNWSNCDNKASIREDQLHQFILEKMNEMLKKFYEEDDLKEMQNEVIEQDLYKDKLNSLEKELQSINKELQGKSTYFQKLYEDRTNGILPEKEFLILMNKYKDDNEKLEERQKIVKKEISSTLAKKETVKTKKNIFKKYRHIEELSIEIVEDFIDKILIGNYDETTNSRDIKIIWNFTI

SEQ ID NO: 25382 - protein, 463 aa, synthetic construct
MTTKVERCAIYIRVSTTEQMMHGKSLEAQKEYLTNYAREHNMAVVGVYADEGKTARKELKKRKAIHSLLQDVEAGKIDVIIFWRIDRWFRNLSDFYKVQDILDSHNVRWISTSEPGINMETRDGRLQLNVVLSIGQNEVDTTSERIKFVNESSIRSGKLIFGDVNMGYGYKSGIVDGQKRMIKDPDREHVVDAFYKYFFKHQNKCATLRYIQETYDPDFSFGIMRTLLSSEFYKGTYRGFPYCPAYLTEDEWSTLQKIQKRNVKATPSGRIYLFAGLIRCPVCGQLLCGTGCSSIINRKTGAKRTYCYYRCNRAMIDHICSYRHRLSQNLVENYLLDNLENEYKNYKVKCEKIEKEKEKQKKKQSPDKLRKELDRLNFLFQKGRIDWDYYNEEYGRVESELNDLQSALPEPVTNYSYLEELLDTDFRTMYDQLSQENRRAFWRSIIQEIHINEDSTITSVDFL

SEQ ID NO: 25383 - protein, 554 aa, synthetic construct
MAERVCCSYQNVLSIQNRVCCLYRVSTTKQVDHDEQNQADIPVQRKACREFAERMGWTIVYEEQENGVSGFKVSANDRDKIQLIKEYAEQGKFDILLVFMFDRIGRRAEETPFVVEWLINHGIQVWSVNEGEQRIDTHVDRLTNYIRFWQADGESQKTSMRTKAALGQMVQEGRFRGGSAPYGYDLVPSGTYNKRKHEVFKLEINPDEAKVVRMMFDLCVGSGYGRFKIANFLSEMGIKTRDGKNWHEATVGHILHNIMYTGVLRSGSTQSKAFPDLQIISPENFELAQKLMAERANECNALRTMPRNTRGQSLLSGNVFCGHCGGRLTLTTNGTTRINAAGEKVGRKRIRYVCYNKTRKRSNCDGQTGYTMHILDKMVTDILHQVFDRMRSVEENEIISRTHRSAMVSLKKRLADAKAESAKTTKEYESLKLEIIKAVQGESAFPMDILSELVNNARTRMLDANAQLTELNEEVEKSNQRIEAIKADYRRIMEWSEMFDGSDMDVKKMIAGYIIKRVDVYSDYRLHIEFNMSFAQFELGLETEVEYAAQDIVS

SEQ ID NO: 25384 - protein, 453 aa, synthetic construct
MRKITKLETKKIDLPKLKRVAAYARVSVERGRTLHSYSAQVSYYNDLIQKNPEWEFAGVYADLGISGTGIEKRNDFKRMLQDCEEGKIDIILTKSVSRFARNTVDLLKVVRHLKELGIEVRFEKEGINSLTGDGELMLSILASFAQEEVISTSNNIKWSIRKKFESGRPQCRYHIYGYRWDGDNLVIEPEEAKIVKLIFEMYLNKVSAERMEIELKKMGVIATNGGYFNIGTIRDMLKNITYTGNLLLQKSYTPNPLVRRKKENTGQLPKYYVENNHEPIIPLEMFMQVQEERERRKAEGQRANFGKNITCFSCRVKCPICGRNYMRNSRSKNSDGIKAHIWTCGTRLTGGSKACPGKTINEIALKRVSAKVLGLDEFDSNAFDEQIKKVIVIGDDLLEFHFNDGKIISEKWEYNARKEYWTEEKRRERGEKLKKSWRMKNDKKSNNDTSITK

SEQ ID NO: 25385 - protein, 528 aa, synthetic construct
MGKSVITIPATISKFTAAPLTSRKKRKVAAYARVSTDHEEQQSSYDAQVDYYTQYIRERDDWEFVAVYADEGITGCNTKKRDGFNSMVEDALAGKIDLIVTKSVSRFARNTVDSLTTIRKLKEHGIEVYFEKEGIWTFDSKGELLLTIMSSLAQEESRSISENCTWGQRKRFADGKVTVPFKRFLGYDRGPDGNLVVNEEQAKIVRRIFGMFLTGMSPAMIAHTLTKEGIPTPGGKQNWYASCIRSILANEKYKGDALLQKVYTTDFLTKKKKKNNGEVPQYYVKDNHTAIIDEKTFALAQTKLAGRTPGQNRLSSVSIFSSKIVCGDCGGWYGPKVWHSTDKYRRVIWQCNHKFDGNRCTTPPLTEDEIKRLFLQAANIVISEREELLSVYESYMAPKLATEALEQELAELEAEINIVSGLIDSCIQENARVAIDQAAYQQKITALEERQSAAIAKKEKTAKEIARRKARRQEIELHFQRLREMDLLTEFRDEDWISMVDHVTVHAKGDIWVTFRDGSEIKAGTSNG

SEQ ID NO: 25386 - protein, 516 aa, synthetic construct
MKTVEKIERKSLARPRRKRVAAYARVSVESARMQHSLSAQISYYSALIQKTPEWEYAGVYADYGISGTGMRDRDEFNRMLADCEAGRIDIILTKSIQRFARNTVDLLNTVRHLKELGIEVRFEKENINSMSGDGELMLSILASFAQEESRSISENSKWGIRKRFQSGEIGAANKHILGYRYDDELQQYVIIPEEAVIVRRMFQLYLQGKSLQAICDDLNGAGYRTINGCLFQEASLSCLLKNEIYAGDLRRQKSYIADPIVKNKVKNKGELPQFYLQDAHEAILDRETYARVQAEIERRTALLNPTYPFTKKIICTCCGNRFTRKKSKVRGRTFYHWICRSKKENGVTCTSRNYSEAMLERISAGILGMDTFDAEAFETQVKTMLVMPDGSIEFHLVGNETRTWKDLHLNDFRHVATSTDAFLGKIHCACCGNTYHRSVGKQWVYWYCMGKKKKGCTCGNKNFPDYHLRLISSYVMGTESFDEDAFAQQVEEIRVLAEGRLEYRFADGRTVTWEKA

SEQ ID NO: 25387 - protein, 435 aa, synthetic construct
MEKVIHPLAHPAPRPRLLRVAAYARVSSGKDAMLHSLSRQISYYSQMIQKHPGWTYAGCYADADYTGTRGERPEFQRLLADCRAGKIDRILTKSVSRFARNTVTLLETARELKELGIAVFFEKERLDTLSGDGELMLSFLASFAQEESRSVSENCKWRVRKDFSEGRPMNLMLLYGYRSEKGRIVVNPEEAAVVRRIFHDYTHGLGSSLIAEALRKERIPCRLGGRWSSGLIRTMLTNEKYMGDALLQKTFCADHLTKKKVVNRGQLPQYYVQDSHPAIIDRETYALARQTLQANREKTNVQKPTTARYPFSGRIVCGCCGQHYRRRTNVSRITWQCRTYLQRGKAFCPAKQIPEETLYRITEEALGVKEITEEALTVLKEIRIPKDNHLVFVFQDGREAERVWKDRSRAESWTEEMREQARLHNLKRRKGGNRE

SEQ ID NO: 25388 - protein, 547 aa, synthetic construct
MTQFANAMPAEAVRVMPDGRKVTAIPARVQAHAANSLQFVKKPRVAAYARVSTDQEEQETSFEAQCDYYGSLIRNNPEWEYGGLYTDDGISATSTARREGFNRLIADALAGKIDRIITKSVSRFARNTVDSLTTIRKLKEKGIGVTFEKENIDTLDSKGELMITIMSSLAQEESRSISENVTWGWRRRIADGKVSMAYGRFLGYDRGEDGTPVVNEKEAKIVRQIYGLFLDGQTPSGIAELLTKQRIPTPGGKERWAGSTVKSILTNEKYKGDALLQKTFTVDFLTKTAKVNEGEAPQFFVENSHPGIISREVFDLVQLEMKRRKGRSRHTSAKSLFSDRLACGCCGGTFGSKVWHSNDPYRKVIWRCNRKYDGKGTACPNRHLEEKELREAFVEAVNRLISGREEILNAADEFSAALADTSGLEQQICRLAAEKEVLLRKLTAMVRENAVKEQDQDEYQRQYQEVEGELSRLDTEIEKLKTKKADRLLRRNKLQAFMGRLRAAEQLAAFDEGMFLGLTETVRVCPDKLAFVFRDGTEIPVYGEMTH

SEQ ID NO: 25389 - protein, 465 aa, synthetic construct
MPEKILRCAIYIRVSTFEQSVHGKSLQAQKEYLEHYAKEHNMSVVGVYADEGKTARKELKKRKAIHALIEDVKQEKIDVILFWRLDRWFRSLADFYKVQDVLDEYGVRWISASEPGINMETRDGRLQLNVVLSFGQNEVDTTSERIKFVNEASIKNGRLIFGEANMPFGYKSGVVDGKKCMIKDPETERMVIDFFRHYKKHQGKQDALKYMQRTYGIYFSYAMLKTMLSSEFYKGTYRGYPYCPAYLTEKEWNEIQEISVRNVKRAPSGRVYLFTSLMRCPSCGQKLVGTGCSSISNRKTGKKRTYCYYRCNKALADHLCPNRHRVSQNLIEQYLLENLSSEYEKYKIRSNKINEEKKKVRKAKNPAQLSKEMERLNLLFQKGRISFDYYDEEYQRLEEELAFAASDPSLEEPKRNYSELEKLLRTDFKEMYDSLSLENRRAFWRSIIKQIHLNDDCTIKEVDFL

SEQ ID NO: 25390 - protein, 527 aa, synthetic construct
MARSSTVTVIPATISRYTASPINEKKKRRTAAYARVSTDSEEQQTSYAAQVDYYTTYIKGRDDWEFVEVYTDEGITGTNTKHREGFKRMVADALAGKIDLIVTKSVSRFARNTVDSLTTVRKLKEKGVEIYFEKENIWTLDSKGELLITIMSSLAQEESRSISENCTWGQRKRFADGKVTVPFARFLGYDRGPDGNLVLNEKEAVTVRRIYSLFLRGMTPYGIARQLTAEGVLSPGGKEKWNAGAVRSILTNEKYKGDALLQKSYTVDFLTKKKKVNEGEIPQYYVEGNHEAIIQPDVFELVQRELEQRQQRRGQHSGVHLFSGRIKCGVCGGWYGSKTWHSNDKYRRVIWQCNHKFEGDEKCFSPHFREEEIEQFFVTAVNKLISQKDVVTAQFDLALRTALDTTALETERDELQNEMLETSELMQNSIYENAHIALDQTEYQKRYDALTARFDKAKARLEMVEAAIKDKQSRQATIEAYLETLKAQDTLVERFEPSLWCALLDFVTVYSKEDVRFTFKDGTEIKA

SEQ ID NO: 25391 - protein, 586 aa, synthetic construct
MRTVNKIEVKAPQMPSRKKVAAYARVSMESERLQHSLSAQVSYYSALIQKHPDWEYAGVYADDGISGTKTSKRDEFNRLLEDCEAGKIDIVLTKSISRFARNTVDLLNTVRRLKELGISVRFEKEHIDSLTEDGELMLTLLASFAQEESRSISENVKWGTIKRFKEGIPNGQFTIFGYKWVDGRLTIIPEEAEIIRWMYAEYMKGASRIEIGRALMERGIYTRQGKPWVDSNVKVILTNITYTGNFLFQKEYVVDPISKKSKKNRGELPQYFVENTHDAIIPMEEWQAVQAEFKRRRDLGPFGNKALNTCCFTGKIKCPHCGCSYMHSVRNARNEEYWICGSKKKKRSDHPCPVKGVINHKVLKSVCAEVLGLPEFNEDIFLEKVDHIEVPLRATLDFYMKDGTTIRREAKSTGHQDCWTKEYREKVSTQRRKTGTNPKGASCFTAKIKCPTCGCNFRKQGSTAPNGTRVIYWRCADHDCGSKGLREDWLKDMCAEVMGTETFSATDFSSRIDHIDVSPDTELTFIFTNGDKTSRLWPKKKKGHKASEHQKEVMREHMKKRWTPEYRQYMSERMKQIRREKKWPNP

SEQ ID NO: 25392 - protein, 558 aa, synthetic construct
MNREGKKCVLYPRVSTEMQVDGYSLEGQKNSLKRFADREEMEIVDIYEDAGKSGKSIEGRPAFKKMLSDIKNGLEIDYILVYKLSRFGRNAADILNSLEFVQSYGINLICIEEGIDSSQTSGKLLISVLSAVAEIERENIIEQTMNGRREKARQGGWNGGFAPYGYYLKDNQLLIEETEAEAIRIIFDKFANSDIGLGGVAKYLNLQGIKKIPRQNGILETWSSHFIRLILDNPVYCGKIAYGRRTREKVKGTKNEYKQVHAEDYILEDGQHEGIVSEELWQKAHTKRMATGIKQPSKIGKDRSHLLTGILKCPICGSSMYTNKHAWTNKDGTYKEVYYYICGRNKQERGHHCDYKASLRKTDIEPLVIEAVKELVSDKYFAKEIEKRIGVQTDTTAIDKELANYESKLKEVELNKARLEREIDNLPIDARFRERKIHDMTLRLDALYDTIVELEERIEDAKLRRSSIEMEAITMDNIYKLMLNFGKLYDIISDEEKKSLITYLIKEIQIYPNGESEMPLKSIEFNFPIYRDGQEVRRLLWEKGNTVETVCLLSRKAQ

SEQ ID NO: 25393 - protein, 464 aa, synthetic construct
MARSVTVIPARSQKVQTGHKAVQEKKIRVAAYCRVSTDQEDQLHSFEAQVEYYTKYINEHENYEMAGIYADEGISGTNTKKREQFKKMIADCEGGKIDLVITKSISRFARNTQDCLAYSRKLKNLGIGIIFEKENINTLDSTGELLFTILSSLAQDESRNISENCKWGIRTKFKNGEMHLNTFKFLGYDKDENGKLVINKEQAKTVRRIYRDFLIGINPAQIAKELTEEKVPGCLGQTKWYPSTVTGILKQEKHMGDALLQKTYTADFLTKRQVRNNGEIAQVYVNDSHKGIIDKQTWNAVQEEFDRRERFMESHGTDRYSYGADCMPFCEKVFCGECKSLFTRHSWRSRGIVQWQCKNHRKDGKVACTNAYVDNADLEKGFVKAFNRLVTDRDKHMERWQQMKSDGTPLEKIRAGQMMEAVENEPLTRFVPEIAQLVLCEVTVLGAKKYEFFFLEGSRVKVSV

SEQ ID NO: 25394 - protein, 502 aa, synthetic construct
MEIQIREGNSRQKRKLKVCAYCRVSTDADEQENSLENQIRHYEEAITSNPDYEYAGVYSDFAISGFKEKRPGLQKMLADARKGKIDLILTKSVSRFARNTSIVLEVTRKLKELNVGVFFELQNINTLSGEGELMLTILAAFAQAESESGSVGAKMVYQRKYEAGIPVQYLERSFGFKKDERGVYIADEEEAVWVRKIYEMAADGYTPASIKRHLNENGVKTVGGAEWIDSTVFRLIENEIYKGDYIMHKHFVNKERKLVRNRGEVDAWYIEDDHEAIVSPELWQKAQDALEAKRDYLAESSVIEEFTEENYPYMNKIFCARCGHPLYKRIYSNGNRLNWGCSGTKRYGKSFCEGINIPDGVLRGAWNFDENMYIGEKPTDKGKKEFTYLKEASWKRRHKKKEPEPIPENTETEYPYREKIFCGLCGSRLVRHVNTKSHKVIWVCNGRKRKGKDFCDGTRVPDTIIKGWGEIKKDIYIQRKDDKNGKKRYSYTSKKSKGADRA

SEQ ID NO: 25395 - protein, 488 aa, synthetic construct
MKTDAVYARQSVEKKDSLSIAGQIDLCRRTAGGGELRVYKDAGYSGKNTERPAFQQLMKDIRADRIGTLYVYRLDRFSRSVADFGQLWEVLQEHHVEFVSVNENFDTKTPMGRAMLHIIMVFAQLERETTAERVRDNYYRRAALGAWPGGPAPYGFDNGRARGRDGREVPSLIPNDKAAVVQRIFQEYAAEGMSLGLLARKLTAEGIPAPKRATWDNVTLSRLLHNPAYAMADEQVRLHYLGQGVEATSPPEAFDGVHGVLLVGKREANARKYTKTENHRASVLNSVGIVPSPLFLAVQAKLAHNRQVGNSGKGKHTWLSGLLKCLKCGYSLSVVVDKSYRYLVCSGRYNMNRCDAAIHIKLAELEAVVQTEIEKLLAQCPQEPVAPKLEEDSYTQRLLELDRRAERLMDAFAESEDLPASYLQKALGKIEKEREVLQQAQRREAGRVPLPEKLVFSELSFEEKKAVAAQFIRRIEVAKDSAEIIWAV

SEQ ID NO: 25396 - protein, 676 aa, synthetic construct
MSSVDKIAVVYARYSSHGQTEQSIEGQIAAAQKYAEQHGYTIIHIYADRAMTGRNDDREEFQKMLSDTATRQFGVILLWKIDRFGRNREEIAFNRYRCKKNGVRVERVAEDVPDGPEGVILDSVLEGMAEYYSLQLAQNVRRGQRESAKKSQTVGGCKIIGYNVNPDTKRYEVDPKTAPFVTEVFKRYANGETISEIVAWLNAQGVRTTRGGEFTVNSLHRLLKNEKYTGVYIFHDIRNEGGMPALIDRATFDKAQEMLKVNRRAPARVWSKTEYLLTDKLFCGHCGTMMVGESGHGRNGTKHNYYTCWNRKKKKTCDKKPIRQDVIEPLVLRAIGKLLENPATLENIADQVWAAYERSDTSGDTIKALDKQIADVDRALSNVMKAIEMGIINEMTKARMDELTDQKQALSAARAEAGLAGGFKLTRDMILFFLQDMAALDRSNRDSQKRLIKTFVNAIYLYDDHFDIAFNYTDNGNVVVRMREINDAARGEMFGRCAQCPTKKRRASVKFARLFSSFGSFSLVERLAHLAADGILPLVVNLRINCQCRAGLGMTRLSRHCSDTDVRVGEQDTDKGVAKHMRVDFADARFLGHAVNNFAIVVGADGPAEIIDNDKIFPAQLLQGFPVRFPLSVHAGLPSTAHTVLLCKPLVTVGFQIFHKFGCYIYVTDVVLFRGR

SEQ ID NO: 25397 - protein, 484 aa, synthetic construct
MRGVIYARYSPGPHQTEQSIEGQVADCQQYAEEHGIDIIEIYADRHVSGKSVVGRDEFQRMLRDAEKGRFDCVLVWKIDRFGRDRQDIAMGKMTLKRAGVKLMYARESVPEGPEGIILESVLEGLAEYYSADLRQKVIRGMKETAKKGQYCGQPLPIGYKVDSQRHIVIDEREAAVVREAFKLHIAGAQLRDIVQLFADRGIMGRRGKPVSNAVVYRMLRNEKYLGKFYIQDVKLNVEPIIDQATFLEAAQHFKTSRNNAAGRAKVNYLLSCKMFCGYCGSMISAEAGTGKLGKVYRYYKCGDKKRGKKCELKPFPKDHLEDAIILATVNDMLTDEMIEKLTVRILEVQEQENADDPVVGLRRRLDSNKKRQRNLLDAIEEGGARGLVSRLAALEEEEERLVLEIQRAEIKRPRLTREVVEAWLRSFRVGDVTDDDFRARLVDTFIARVELRNDEALIFYNIREKGPHSRVRVRPEWWTPRAVN

SEQ ID NO: 25398 - protein, 427 aa, synthetic construct
MRIALYARVSTEEQAIHGLSIEAQSEALEEWAKQEHANVVGTYIDAGISARKPASKRPSMQRLLADIERGKIDMVVFTKLDRWFRNIAEYYKVQEILERHGVNWRTIHEDYDTSTASGRFKVNIMLAVAQDEADRTSERIKAVFDSKRKRGEVVSGSVPPGVKIENKKHVVDPDVAPMVRDIFQFFISNHSLYAAQRYAANTHGLRRDITTFRRLLLNKVYRGLVVDEKTFDLAQDLLAVRSQRNSGVVRGRIYLFKGLVRCGTCGSMMSGMVCKEHYYYRCNDHVYIGGCPYEKNIREDYIERWLSEHIVSECDRYNTQAIRARAERPRIDEVGIRRKMTKLKDLYLSDLIDRDEYERDYSELRLSLEKAKEEAPPAEPVDTDYVRSALNMYERLERSEKKEFWMRTIREIIIHPDSSISFTLRNT

SEQ ID NO: 25399 - protein, 521 aa, synthetic construct
MAEFENIIIYLRKSRSDDPMQTVEDVLAKHESILQDYSIKQWGKPVPENHIFREVVSGETIQDRPVMQQIMKLLETGFISGVLIIEPQRLSRGDLQDCGRIINSFRYTNTVVITPPKTYNLSDEYDRKFFEMELTRGNDYLEYTKKILNRGRIASIKAGNYIGNIAPYGYRKVVIGTGKDKYHTLDIEPKEAEAVRIMFNLYVNKDYGFTNIAHFLDNAGYKPRNSDNWSPAAISSMLNNEIYIGRVVWNRRQTVKKMQDGLIVRTRPRHNDYISVPGKHPAIISEELFYAAKRKRGMTPKVKKFKELTNPLAGLLFCGRCGFAISMKKYADKRSKTGHETITMLCNNQSNCHTKSVMYSLVIAKVKLSLQQAINDFEVHINSNDDSERILQQNIINNLTEELEHLKEKDIRQKDAYEDGIYSKEEFLKRNAKLTEQISITQEKLNNALLEEPRICDYEEKIVRFRDCLNALDDDNVSAAVKNTLLKACIDRILYYNDSPSLPGIGRYVDNPFRLEIFLKL

SEQ ID NO: 25400 - protein, 504 aa, synthetic construct
MKWGKQRDRPHEPGSPPTRGAQNEINEEHMTRAIIYARFSTDKQREESIEAQERACREYAAAHEYTITELYADRAASGKSDNRKDFQRMMRDAKARKFDVVLVHKYNRFARRMSDHVRYEDKLNSYGIQLIAVAEDFGTGKEAVIMKALMRSLSEYYIIDLSDEVKKGHRENAMKAMHNGGVPPFGYDVVNQKYVINEFEAAYVRRMFNCASDGIGFTALVDEMEAAGIRGKRGKPIKYSQIYDILRNEKYTGVYLYCPEQESSKMLQRSKPSAIRIEDAIPPIISKEQFMEVQKIMDSRKLPGRKSNYLCSRLVFCGECGAPMHGITTGKYQYYYCKNHCGNPNAKMETIDNAARNYLHELLMPENQQIIVDALRRYQASEKYREQDFYDSLREQIAERDDKYNALLANLSSGALPPEVVADIGARMQQLKAEIEALRDSKPEKDYTAENITAWLESLRQSPDEKAIRLLIEKITVKNRMDVSIQSTLTSILGNLGCGTRIRT

SEQ ID NO: 25401 - protein, 523 aa, synthetic construct
MRFFSYGRKSIFSDKSDSIDNQFRMSREYCESKFSGQVDSWQQFSDEDFTGANADRPDLQRMLSFIKNGFCDVLVVYQLDRLSRDVRDFANIYALLEEHGVMFISIKENIDTTTPIGRAMMYVTVVFAQMERETIAARVTDNMLGLAKKGYWTGGNPPVGYVRKHIVVDGKKHCSIEVDPDGARYVTQIFDTFLAYNCSLQGMETRFKNQGIRTQGGKFFSTTQLHKMLTMPYCVEATPEVYDFYAAKGCIMDPGSPREMWDGSVGVIIYGRSTEKNKKHQVQPPEKWTVCLGKHKPFMPAEKWLAVQSRFSQNKCIKDAKWPVPLLKGVLRCKCGNLMQISRKKKVDGTCSSWYYCRKRMRQGIDACDMGQIKCDLLDEEVLELFRGIAADPGLIQKFVKTEAPADVPDLKAAQARVSVCERKIGRLAASLAMAEDSVASKYIIAEMERLDVELGALKREASLAEMESHRAAVSAKDAKATAAEIAKLIHGLEGFDDKEKNAIARAVIQECTWDGERLFITL

SEQ ID NO: 25402 - protein, 478 aa, synthetic construct
MTNQAEKTSYIENVAAYIRVSTQEQKLHGISIEAQEEKLNEYADSHGMKIVKFYKDEGVSGRKLIRKRPALQAMIQDAEKGNFRRIIFIKLDRFFRSVAEYHECMKRLAAGGVIWTATEEKYDLSTPSGEAFVNMKLTMAQFEADQVGERIRMINEYKVKSGQPLYGSQALPFCYQVKQSGDGDRRKYIAKRDEIIMEDLIDHFCKNRSVRAALHYINAKYSRAFSYSTIKNALTSELICGTYRGNPAYCEGYMTPAAFETMQKYIQHNPRTSQREHTYIFGGLIRCPCCGNMLVGSPTVLNRIGKSGQKLSYKYYGYRCYRGNLEKKCDFRTMAFEHRLEAIMLSEVEAVMRGKQMYLLRLQNAPQRVAQHDLVELQQELARLNYAWQKGRIKTAADYDRQYDDLMARIDAANAERQELAANPDYRKISRILSDGWKQLYISLDNDHKRAFWRAFIEEIQLEWTKDVKRIRDITFFT

SEQ ID NO: 25403 - protein, 523 aa, synthetic construct
MSRTVTAIPATKKIRSAAASSGVPARRKVAAYARVSTEMEEQTSSYEAQIDYYTTYIRSRNDWQFAGMYCDEGISGTSMKRREGFQTMIDDALAGKIDLILTKSVSRFARNTVDSLTTVRKLKDAGVEVYFEKENIYTFDAKGELLITIMSSLAQEESRSISENVTWGHRKRFQDGKVMVPYKSLLGYKKGADGNLVIDETQAPTVRLIYQLFLDGMAISEIKTELAARKILTPRGKEVWSTSTVRSILSNEKYKGDALLQKTFTTDFLTKKMKVNEGEVPQYYVTGNHEPIIEPRIWDQVQYELATRHGNISSAKVGLFSTRLKCAQCGSWYGRKTWASNTKYKYTVWQCNHKYAGEHPCSSATVKDEDIKNAFVQALNQLIAHQPRQSHLLQIFDSMFDTSRMEEQAAACQAKIVELTEQIEALIAENQQRALDQDAYQNKYTELDTAYRKTLACKASLDADIAANTAKHAAVTTALVDLAGEPVSEFRPSQWSALIDHAIVGEDTIRFVFRVGEVVRVQL

SEQ ID NO: 25404 - protein, 416 aa, synthetic construct
MAQVSVVTPVRPPAPNLVNVAAYARVSTNGTEQLASLSAQVSYYSRLIQSTPGWAYAGVFTDEGVTGTSMKSRQGLADLMNAARAGKIDLVLCKSISRLARNTVDLLATVRELKDLGVAVRFERERIDTLSADGELLLTLLASFAQEESRSLSHNVKWAIRNRYKNGGTNSFVVYGYHWANGEFTIIDDEAKIVRLLFANYLDGISPEKTAAILNGQGVRSRGGGRFYGSVFRRMLENERYKGCQMLQKMYRPAIQAPTRALNDGELPRYWVEQALPPIIDKSVFDAVQAEIAYRREIGPAATPSKNTGVFTGRICCGACGKNYQRKTRTYKSGTSYKFWRCWSACTGNGNPCRGHNLRETLLEHACADMLGTQSFDPVSVVEQIVMIEAFEHQLTFHLADGTMTPVGLTSEGRLA

SEQ ID NO: 25405 - protein, 548 aa, synthetic construct
MNDTAPNVIVIPAKVETPQEQEKRRHLRVAAYCRVSTDSEEQLSSYENQLAYYTEKIMKEPGWTMAGVFADEGITGTSTCKRKEFLRMIRQCRQGKIDMILAKSVSRFARNTVDTLNFTRELRGLGIPVIFEEQNINSIYPESEFLITLHGAFAQAESESTSSRVRWGKRQAMKSGHVTMQYKQLLGYEKGPDGKPRIVPEQAEVVRFIYDRYLAGDSIREIKAALEGREIPTVSGKTKWMASHIRSILANEKYCGDVLLQKTFIQDCISKKVIPNTGQLPKYLIQNHHEGIVSRETFDAVQLEMARRNAKAGATRKSTPTGRGKYSGKHVLSNLLFCGECGTAYRRCVWTQRGIKRPVWRCVSRLDYGKKFCTQSPTLDEEPLQQAILAAVNAVMLDRDTLARQLAAAMEWELAPVLGERMSLADIDRALEELSGRFNSLLAEASANPAEDYTGRFRELSESTAHLREQRARLEGVYQENQKVNQRLRTVSAAMEHMSAALTEWDEEVIHQLLEKVTVLSREKIRVTFRDGREIEQYVAQPKRRKLA

SEQ ID NO: 25406 - protein, 529 aa, synthetic construct
MDEQKKTSGSLALNSTPQVITIPPSDPVRVRKLRVAAYARVSSSSEDQLNSFAAQNAHYTELITANPEWEFVDVYADKGITGTSAEKRDDFQRLLADCRRGRVDKILVKSSSRFARNAKECLEAVRELKALGVGVCFEEQGTDTSELAGEFLTAIFAMMDQKESENISDNLRWSIQRRMKNGTYLPPSVPYGYALVDGKITVNKQQAALVRQIFRRYLIGENLQEIADSLNAQEITKRGALKWYSASVRYILSNERYTGDSLWQKTYTTNSMPRVMRRNHGEQEMYYAPNTHPAIISKEEYNAVQTLIKCRAMRKQVQERSPFDKKIFCEKCGLSFRKKVSHEKLFWICRSHANDAKSCTVTQILNTEIEQAFLHLYHKLRHQGISILTQLLTDLQSARKGKLLWSLDIVALNQKIADITRQDRLLAQLKQQGLVDPDIFISRQNELAEQLRAVKLEKERSLEAEEDQTIQQIQELIEALEAGPDFLDAFDGELFRELVDKIIVESNDRLRFRLVNGLELTEPIERTVR

SEQ ID NO: 25407 - protein, 526 aa, synthetic construct
MDEYCLYLRKSRIDLEAEANGQGDTLARHRAALLKLAQKRGFNITGCYEEVRSGESIAARPEMQRLLNDVEDGRWAGVLVMEVERLARGNTTDQGIVADTFKYSDTKIVTPNKIYDPGDEFDEEYFEFGLFMSRREYKTINRRLQRGRRASLSEGKYIAGKATYGYERYKLSGEKGYSLRIIPEQAEIVRQIYNWYVNGELLPDGTLRPLGSYTIAKRLDARGIPSPTGGKWPPCTVKDILTNPTYIGKLRWSYRPTVKRMVDGELVKTRPVDRSVHLSDGRHEPILDEVLWHRAQLMLKNRSHAPVPKSTNIRNPLAGLLICSKCGRSMERRKFKHGRDTVACPNKDCTCKSSVLEEVEAGMPDSLRIWLSDYKVKLAQSQETISHTGPTAEQEITSLQRTLGTLQAQMENLYNLVEQGVYSTDLFLQRSQALTARMAEVNQQIESTQAALTASRRIARNRFEIIPRIERVLALYPTLTDPREKNTILKEVLEKILYTKTTGSRWEASDMNLYVFPRVETDGEQL

SEQ ID NO: 25408 - protein, 508 aa, synthetic construct
MKKAIAYMRFSSPGQISGDSLNRQRRLIAEWLKVNSDYYLDTITYEDLGLSAFKGKHAQSGAFSEFLDAIDHGYILPGTTLLVESLDRLSREKVGEAIERLKLILNHGIDVITLCDNTVYNIDSLNEPYSLIKAILIAQRANEESEIKSSRVKLSWKKKRQDALESGTIMTASCPRWLSLDDKRTAFVPDPDRVKTIELIFKLRMERRSLNAIAKYLNDHAVKNFSGKESAWGPSVIEKLLANKALIGICVPSYRARGKGISEIAGYYPRVISDDLFYAVQEIRLAPFGISNSSKNPMLINLLRTVMKCEACGNTMIVHAVSGSLHGYYVCPMRRLHRCDRPSIKRDLVDYNIINELLFNCSKIQPVENKKDANETLELKIIELQMKINNLIAALSVAPEVTAIAEKIRVLDKELRRASVSLKTLKSKAVSSLGDFHAIDLTSKNGRELCRTLAYKTFEKIIINTDNKTCDIYFMNGIVFKHYPLMKTISAQQAISTLKYMVDGEVYF

SEQ ID NO: 25409 - protein, 525 aa, synthetic construct
MPTERKKKTTKEENAKNNSTKNIIKKPRNSTSNAKSKKESKSLLGLKDLMEDTSPEKVVGCYVRVSTDAQAEQGYSIPDQTAKLQAFCTVKGWENAKFYTDPGFSGSNLNRPAMQEMISDAMEGKLKAVVVFKLDRLSRSQKDTLYLIEDVFLPNEVDFVSISEALDTTTPYGRAMIGILSVFAQLERENIYMRTRIGMMGRVSAGYWRGGGKVPFGYDYDKESKSLIPNADAQKVPQAYDLYIKGYSCQKIADMLGLSCEQLVRNILTKRTYCGYINYKGKDYKGFHEPLIDEERFMLVAAEMERRGKENLAVCGNNKYYLLTGLVFCGDCGARMRYMKWGKYLRIVCYSHTCKKNMVKDPDCPNKGVRADELEKVVISKLFDIGTDISLDDFDDTHVPASAAEILTNRIDELKESLRRLYGLYADIGDPMVYERIEDVRGQLHVLQRQLASEETQKLKEEHINYVREKIQTIGDLWPHLTPMERQTLVRDCVEKVILHHNGRVEVYYTFHTEKDSKILKRKGA

SEQ ID NO: 25410 - protein, 550 aa, synthetic construct
MYYQPKINFSPNEVIAYLRKSRSDDPLLTVEEVLSKHETMLDEWAEKNLGAAVPEENKFREVVSGETIAERPEINRVLRLIESPKYKAVAVVEPQRLTRGDLEDIGRIMKLLKHTSTLVITPQRIYDLRDEYDWDTFERELKRGNDYLEYTKKILNRGRLLSVSQGNYIGNVPPYGYSKTFVTEGKRRYPILVPNKEEADVVRMMFDLYVNKDMGCQNICNRFDEMGIKPPKGEHWSPSAMAKMLENIHYIGKVKWNYRKTLTIVEEGEFKKTRPIAKAGEYLIYDGKHEAIVSEELFNAAQAKKGKHTRQKPNTKIRNPFAGLLWCKCGRAMSLRAYKSNISAPRLLCDGQTHCKTGSCLYSEMNERVCSILTNCIHDFEIRLQNNEGDSVKQHMRLIKNLEVRQKELEEKELAQWEAQADPDPAKRMPQHVFQQLNERLLKEKEEVRQALCKAYESMPEPVNYEEKIAQFTEALNALKNPKVDAATKNRLLKACIDRIEYYRDAPQRIRSQKVIYYDPEQKRTRCKSPLNVGGNWTAPKIILDVKLKV

SEQ ID NO: 25411 - protein, 456 aa, synthetic construct
MRNKEIAPALVRVALYIRVSGEEQKIKGLSLEAQQERLEAYARERGWVIVGIYIDAAKTARKNIHKRTEFQRMMDSVMRDEVDILLFARLDRWFRSVADYYKVMEILQAHNCDWKTTDEEYDTTTANGRLYINVKLSIAQNEADIDGERIDVVFDSKIAHGTVVSGSAPFGFRVNEEKRLEVVPEDAAIVQDAFNYFENTVSQRATVRYVRETYGVNWCDATFRRMLKEKLYTGVYDRGGRYNDQFCPAIIDRQQFDRVQALLTRNVRSAPSGKVYIFTSILTCAECGHKLVGYKSSDYFYYRCNQHFQRGRCSHNHSAREDVVEAWLFDHLGEELERCQLEWDVETAKKKASVARTDKAALKRKLTKLKELYVNDLIDIEDYKKDYQIYVSALNQIPEPAQEAPPDFAAVRRLLDNSFRTIYDTLTREEKRTLWRSVIKEIRIDNDQNITGVVFG

SEQ ID NO: 25412 - protein, 515 aa, synthetic construct
MKVAIYCRLSHEDDDKLHENDESESIQNQKSMLINYAMEQNWDIHNIYCDEDYSGIDSLRPEFNKLLSDAQNHKFDIVLCKTQSRFTRDMEIVEKYLHNKFVEWNIRFISLVDHVDTLDKGNKKSRQINGLVNEWYLEDLSENIRKTFDNKRKQGLHIGSFVCYGYTRNPQNKNKIIIDHNVSGIIQLIFNLYEQGTGITKIAQVLNTRNILPPTKYKQSQGLNFKNQNKNIEYWCESTIRKILKDEVYIGNLVQGYNKKISYKSKKIVAQPQSQWIIVENTHPPIISKEQFYKVQEILKSKTRKCKNGEMHLFTNKLICAGCGSKLYKCTNDRGYVYFSCKNSKKLYKTCTPHSIGYNNLKSLITDKIREKILEFYDFNSINDNMFLTDNTSQLLENKILSISNEINNITNAIKELYLNKSANKIPESIFQVLNSDFISDKIAKEQELQNLKSNLSNLSESKIDVQSLKENTINELKNFSKLNREIINSFINYIEIDEKNKKTNSQDIIIHWNF

SEQ ID NO: 25413 - protein, 529 aa, synthetic construct
MSNARIIEIPATRQIRSGKNNTIRKMRVAAYCRVSTEEEEQQGSFETQKLYYTEKINSTSEWELAGIYADDGISGIHTKKRDGFNQMIQDCKKKKIDLILTKSISRFARNTLDSIQYVRMLKAIGIAVIFEKENINTSTMNSEMILTVLSAFAQAESESISQNVARGKRMGFRQGKFPFPYGQILGYRKGLDGKPEVIPEEAEVIRMIFNSYLQGASLLTIKKKLEAGGVLTARGNKKWSSESVQRILQNEKYCGDVLLQKTFIEDVLTGVSKKNTGQLPQYYIENNHEGIVTKQMFREVQAEIARRNSKSAANQRKRHQGRYNSKYALSERLVCGDCGSPYKRVTWNIHGRKQIVWRCVNRLEYGTKFCSHSPSIPEEELHQAILKAVQNLAANFTDEVAAQLDGILRQMEAGENLKAQLQKQLEKAQQEFDRLLEMSLELDESTPFLDDKLRKLSGKIKILKANIAESTDGKGEDEEATKQLTAQDLLIKEYDDILTARIIEKVIVHSRQEIEIYFIGGYTQKIDLT

SEQ ID NO: 25414 - protein, 509 aa, synthetic construct
MPQVQVIQPIQQQPKRLRVAAYARVSSDSEDQLNSLAVQVDYYTHLIQENPNWEFAGIYTDEGITGTSTKRREQFNRLMDDCRAGLIDRVLVKSASRFARNTADALSSVRELKSLGVTVAFEKEGFDTETSNGEMLLSIICAVAQEESLSISQNMKWGIHKRMRTGNYITNATPFGYTQINHQLVPEKNNAMIVNDIFKSYLSGMSINEIAEHLNTIYPKENSKWNPRTIHAILRNEKYIGDSLYQKTYTTDSLPLKRYLNTGQRSKYYAMETHEGIISKTDYEKVQNLLAKKSITGEIDRTCVFSKKIYCSICGAICSRKGPPTQGFVWCCRTHLQSKALCLLKSIREDELQQAFLSIYNRLQCNQKTILEPLVDDLLGLRHLQEQKYKNRLALGEDIQHLAKQKHNLTRIHTLGYIEETQFIERSAAIEQQIRGKKQQLSRNDMPNTSEKILQKTRLIQKKLSSTPPLESFDESVFRELVKKVLISNTAIQFELINGMKLSESRAAT

SEQ ID NO: 25415 - protein, 542 aa, synthetic construct
MEQTAQRQVRIIPATKNVNAPLKGAQKHQRVAAYCRVSTDSEEQITSYEAQKAYYTQKIEENPDWELAGIFADKGLSGTSMKKRENFNKMIAACKKGKIDTILTKSLSRFARNTVDCLETVRMLKANGIGVIFEKENINTLTESSEFLITLFSGFAQAESESLSKNIIWGKEESKKAGKVPFQYKKLLGYRKGPDGKPEIDPQEAETVRRIYRRYLDGCSLSQIQQELEADRVPTAQAIQRWSYQVIRNILTNERYIGDAMLGKTFTTDCISKRVKKNNGERGQSYVRNNHPAIIPREMFYRVQEEMARRSSKRKVMQKTGKTELGKYSAKYALSELLVCGECGTPYKRVTWARNGKKRIVWRCISRLEFGTKYCHNSPTLDEEKLHQAIQEAINEFVQAGTEVKEDMLTFTAMAWGGNTVGGVSLIDLRQKLKDITDQQALLLDQVLEHMDDEILNARLKAMMDEKQALQERIADAEQSETHNAAQESRMAELREWMAKLEVNQQYSDEQVRMAVERITVVDAETIRIRFRYPGAELEKKL

SEQ ID NO: 25416 - protein, 519 aa, synthetic construct
MAANVTYIPPKAANPEALRVAAYCRVSSDSSDQLHSYATQIKAYTEQIGAHADWELVDVYADEGLTGTRMDKREDFQRLLADCRKGKVDRVLCKSISRFARNTRDCLAALRELSALGVTVYFEKENIDTGTLTSELMVSVSGALAQQESISISQNLKIAWRRMMAAGDFVTTNPPFGYELVDGCGLRIKESEADIVRWIFASYLAGISTREIAKSLTERGILTTEGNAAWNPRSVQLILDNEKYKGDTFTLKRYTTNQFPFAVKRNHGEVDQYYIENSHPAIINTDTFERVQKLKERRTRKRQLDKQDSPLRGKMACGVCGTALMRRTTGKGLISWVCRKHDENAADCPVGRIPETEIYAAFVRMYNKIRANADIVLKPALTQLDDLERALQRENPAMLEINRAIAQVAEQSHNISKLQTAGLLDADACAAKLSSIQIKLTQLRRERRRLLEHDDIEDAISRLHQTADTIKSGPEQLDTFDESLFEELVERIIAESQTCIRFRLWGGVELTEEVRRAKR

SEQ ID NO: 25417 - protein, 525 aa, synthetic construct
MYLEISNPMDYHVALYIRLSKEDENEGPSESVNNQKSLLDDFVKKHRLSVYDTYIDDGWSGTNFDRPDFQRMIGDIEAKKVNMVITKDLSRLGRDYIMTGHYMERYFPEKRVRYISLLDGIDTGVESSANDITPFRAIMNDMYAKDISKKIKSVKRDKQRKGQFIGGKPVYGYKMHPTEKNKIVIDEEVAPIVRRIFHMALEGMSCRQIATQLNEEGVPTPATYAGLPVANPGPYTGLWSSERISDMLQNETYIGNMVQGRTVKISYKSKKCLKQDRENWVVVEGTHEPLIDRETFQKVRMLVNSRKHTRSRTYDFLLKGMIFCHECGYPLAVLNRKNAAGEDVLYFVCRTYQRFTKAGVCSCHSIKEKTVTDAVVAKIQEVCEAYLDPSQLQPIAITAVEEVRKAESHDSEIQSLHSKIDGLTANLDKMYMDRLTGLLAESDFERIYQRIKMERNSLEEKLKDLEAQKESPVSTEDRARELVQRFITSAYASRELLVSLIERVELTEDKQIIVKFRFRELEAIS

SEQ ID NO: 25418 - protein, 570 aa, synthetic construct
MTAVIYARYSSDNQREESIEGQIRECTAYAEKNGITIVKHYIDRAISAKTDNRPQFQQMIKDSDKKLFDIVLVWKLDRFARNRYDSARYKTQLKKNGVKLMSATEIISEGPEGIILESVLEGYAEYYSADLAEKVVRGQTENILKGRCNGGRGTFGYTLDSERKFHIDPLASPFVLESFTKYRDGLTMKEIRDWLNENGIKNPVGGEFTYNSVEHMLKNRRYIGELKFRDVVVPDAIPPIVPLELFDDVQEKIAKNKKAPARRKAEDDYLLTTKLHCGCCGALMFGESGTSRTGEVHRYYKCATAKKKKGCKKKTVRKQWLEDLVVNQTMQLVRDDAAMESIIAKVMELQDRENTNLPLYEKQLRDAESGIQNMLNAIQAGILTSSTKERLEQLEETKRELEARIAEEKLAKPKIKEEFIRFWLMRFRKLDMSLKDQRQALVDTFINSIYLYDDKVLITFNYKEGTQTITFEEAAQAASKENGSDLDCFTAPKTSTHCVLVFLFVRGRGSRTRRRHLCRKQSHSAALLSLRVPTRRNVYQGCTHFVPVSFCAREGTSNNTIYYIRKRDEF

SEQ ID NO: 25419 - protein, 531 aa, synthetic construct
MARTITVIPSTINPLTRTSATSIEKRKVAAYARVSTDSEEQLTSYEAQIDYYTKYINQNREWQFVKVYTDEGITATNTKRRDGFNEMVADALAGKIDLIVTKSVSRFARNTVDSLTTVRELKAHGVEVYFEKENIYTFDGKGELLITIMSSLAQEESRSISENVTWGQRKRFADGKVTMPFKHFLGYDRGEDGVPVINEKEAEVVRLIYNLFLHGKTAVGICRYLESLDIPTPSGKSKWRQSTVMSILQNEKYKGDALLQKKFTVDFLTKKQKVNEGEVPQYYVEGSHPAIISNIDFDMVQAEITRRQALGRSYSGTSIFSSKLICGSCGGFYGKKVWHSTDAYRREIWRCNNKFSSKGKCDTPTLDTDTIKQLFLKAYNRLMGNREQLIKACEAMRSIINDCEKLETEIESLNEEIQVVSELVNQCIKENAATQQSQEEYNRKYNRLVARYEKAMVRLNEVTAERDSRNQRDRDIRIFISALKEKPLVIEEFDEELWICLLESATVYSDSKVMFRFKSGTEITEQSQESS

SEQ ID NO: 25420 - protein, 565 aa, synthetic construct
MQSKNKNQIGITDLYCRLSRDDGTESESNSIGNQKKLLSQKAKEMGLTDTKYYVDDGYTGTNFNRPGFQQLIDDIEIGLVSAVMVKDLSHLGRDYVSVGNYTDSYFPEHNVRFIAVNDAIDSDEGESEIAPFKNILNEMYARDISKKIRSSHRLRGSMGEPLSQPPYGYMKSPENKKKWIIDPEAATVVKSIFKMCLDGKGNETIARELQENKVLIPMAYWLSKGLNRGGKKTQTNPYKWCKTTIQKILSQQEYCGDIINFKTYSKSFKNKRRIENSKENWAVFKDVNEPIIDRETFEAVQKFISKTKRRAPKKENGERSIFNGLIYCGDCHSKMRYHTSTSNKEIHYFTCSDNKVDYRGKCPGRHYVRADALEEVVKLELRRLVEMLEIDESYFAQLLLRKNDEEREKDKKFLESELQKAIARSGTVSQLYEKLYEDNVIGKVSDEWFVELSHKYEKERMDLKAKIADTRHKIEELKNNNSEYEKFISAIRRFMQMDNLTSPLLRELIDHIDIFETEGTGKSRTQRIVIYYRFIGYIELPNTTKQTHIADTRKGVSVKYITKSA

SEQ ID NO: 25421 - protein, 526 aa, synthetic construct
MEKRKVTTIPATINKFTAKPMDSKKKRRVAGYARVSTDHEDQQTSYEAQVDYYTTYIQGREDWEFAGLYSDEGISATNTKHRDGFNRMIADALAGKIDLIITKSVSRFARNTVDSLSTIRKLKEHNIECYFEKENIWTFDSKGELLLTIMSSLAQEESRSISENVTWGHRKRFADGKVSFAYSRFLGLDKDKETGKIVVVPEQAETVKLIFKLFLEGMTPHSIAAELTERGIKTPSGKDVWNQQTVRRMLSNEKYKGDALLQKEFTVDFLQKKMKKNEGEVPQYYVEGNHEAIISPAVFDTVQAELVKRKRGGTRYSGVSIFSNKIKCGDCGGWYGAKVWHSTDQYRKVIYRCNHKYKNEKCQTPHVTEEEVKELFIKAYNELLSEKKEIIENAEIIRKTLCKTESMIEEKQRLEDEILVLVEMTQNLVAENARVAQVQNEYQKRYDGLVQRYETAKKSYDDLVAKIEQKEAHGERIKQFIKNLKEQQCVLAEFDDALWGSMVEYVTIGKENRSVTFKDGTEITVE

SEQ ID NO: 25422 - protein, 489 aa, synthetic construct
MEQYCIYLRKSRADAEAEARGEGETLARHEHALLGLAKSQKLAIVKIYREIVSGDSIAARPQMQQMLQDVTDKKYTGVLVMEIERLARGDTIDQGVVAQAFRESNTKIVTPIKTYDPSNEFDEEYFEFSLFMSRREYKTIKRRMQAGRIASIKEGNYIGTNPPYGYKKIQPEPKVKTLEIVPDEADAVRMMFDMYLSGMGAKAIATRLNQLQIPPRKSPAWEPVSIRKILQSPIYAGKIEWHTKKDGTILADGLHPEIISWEEFQQVQERRKRKTSPVPTGYTTQNYYHNILFCANCGHQMKRRPAPNGSSHMLCVRQQCRGKVVSAPTSRVDEAVLEAIRYRIQELKLSKEKIEKEDYHTKENEEKQRTRLKKALEKLQKQKEKLHTLLETDVYSVETFLERSKVLEQQKLDLETELAELNDAQKEVHLSPKQALLWLQHTLDHFETANPEQKNKMLQRVIKRIEYSKTERMCYRKQTSDLALHVEFL

SEQ ID NO: 25423 - protein, 502 aa, synthetic construct
MEIQIREGSREQKRKLKVCAYCRVSTDADEQENSLENQVRHYETVIKANPDYEYAGVYSDFAISGFKEKRPGLQKMLADAEKGKIDLILTKSVSRFARNTSIALEATRKLKELNVGVFFELQNINTLSGEGELMLTILAAFAQAESESGSTGAKMVYQRKYEAGIPVQYLERSFGYTKDERGVFVADEAEAVWVRKIYEMAAEGYTPASIKRYLNENGIKTVGGVQWVDSTVFRLLENEIYKGDYIMHKHFVNEERKLVRNRGEVDAWYIEDDHEAIVSPELWQKAQDALAAKRDYLAEGSVIEEFTEENYPYMNKIYCAKCGYPLYKRIYSKGNRLNWGCSGTKRYGKTFCDGINIPDGVLRSAWHFKENTYIAEKASDKGVKEFTYLKEQSWKRRHKKKQPPAIPENTEAEYPYREKIFCALCGSRLVRYVNPQSHKVTWVCSRRKRKGKDACDGTRVPDTIIKGWGEIKKDIYIQRKDDKNGKKRYSYTSKKPEGADRA

SEQ ID NO: 25424 - protein, 628 aa, synthetic construct
MKAAFLIRCSTKNQDLNRQTRDLTRLAKSMGYEYDLENLVYGEKITGKDDVTKKNRDSIDRLLRAAKEQRFDVVLVSEVSRMSRDPASGRIYVRLLINMNIPVYFKDIDLWTINPETGKKVRDAELVIGAAFDAAWKYLKSMKTQIASARRNELDNNRISIGQPYFGYKRYEGTDKSKKNQIVVNEEEAEVVQAVYNEYLKEGATLKSTALAITDKYGEKLNRKFSLGTIEHILTYESYATGIKKVNLKDPDTDEVEVFDVNTPIIIDKELYEAATNKRKKNRVKDEPYPNQQVYLLSKLIKCPDCGYTLTPRRKAGEFGQTYRLVNGKPAVSWLCMSGINNITDCTNRTSIANEKLEPIIWELVKKELIGYANMNDEKREEQIRECEEKIEYQNYSIQNFTKEIDKLKKRLSTAYQFSINAAEMAGDDEDMRTMAMEEFNRTAKGVRQEMKNFEKSIEQAKGELEKLRDLKTFYSQPTLPKDYLEQIEGNFTEKRNLVKQLITKIVPYRITTFKKKERESGVKTCNKMITVKNGAVLLEVYTIGGVYNVFYNANSKFQVKTAYYVHGEYATFQNGIRKFPAYDEGEYFVINNANMVMETDDIDEVVTVNEFVDIAIANNWVIEYQYI

SEQ ID NO: 25425 - protein, 543 aa, synthetic construct
MPVAVYCRVSSEEQAERGTIEIQKEFAAKYVDLYQLEVFDYYCDDGISGTIPVEARPEGSRLFRDAREKKFDTILFYKIDRLGRKVRVILNAVHDLEELGVSIRSMTEPLETETPTGRFMLTSLAGISELERDTILSRMWAGSQRAARLGNWLGGIVPFGYNVVDKQLQISDDIMPGCNLSEADVIQLIFDLSGNQKMSAIKISDYLNALNIPTRYDLNGINGKRKKKASSIWYPSRVLSIIKSTTYKGTHKYGKRATNKNSKIILRPVPAIVSDELWEKANEALKTNQITAMRNAVREYLLRGIIKCGNCGRTYMGTAYSGSGREKISYYVCNAKNSYLAHNTEKCISKNVRADWLEHLVLEDCIKILKSPNKILNMDPEKEQQSLADEVKKEHDQIKASLKKLSEERASIIELYRKKIISETDLSCQLEKLSTEEATLQERLKMKIDSRKSATTKQNKEKAISLLKKFTDKCQNLDPEKLSFETKRAIIELIVEKITVTTESAPEKYYPEISVDIEYRFATTPNHIAYVEDCTVTGSALCT

SEQ ID NO: 25426 - protein, 523 aa, synthetic construct
MRFFSYGRKSVFSDKSDSIDNQFRMNREYCESKFSCQVDSWQQFSDEDFTGANTSRPDLQRMLSFIKGGFCDVLVVYQLDRLSRDVRDFANIYALLEEHGVMFISIKENIDTTTPIGRAMMYVTVVFAQMERETIAARVTDNMLGLAKKGYWTGGNPPVGYVRKHIVVNGKKHCSIEVDPDGARYVTQIFDTFLAYNCSLQGMETRFKNQGIRTQSGKFFSTTQLHKMLTMPYCVEATPEVYDFYAAKGCIMDPGSPREMWDGSVGVIIYGRSTEKNKKHQAQPPEKWTVCLGKHKPFMPAEKWLAVQSRFTQNKCIKDAKWPVPLLKGVLRCKCGNLMQVSRKKKVDGTCSSWYYCRKRMRQGVDACDMGQIKCDLLDEKVLELFRGITADPALIQKFVKSEAPADVPDLKAAQARVSACERKIGRLAASLALAEDSAASKYIIAEMERLDVELGALKREASLAEMESHRAAASAKDAKATAAEIAKLIHGLDGFDDKEKNAIARAVIQECTWDGERLFIKL

SEQ ID NO: 25427 - protein, 523 aa, synthetic construct
MRFFSYGRKSVFSDKSDSIDNQFRMNREYCESKFSGQVDSWQQFSDEDFTGANTSRPDLQRMLSFIKGGFCDVLVVYQLDRLSRDVRDFANIYALLEEHGVMFISIKENIDTTTPIGRAMMYVTVVFAQMERETIAARVTDNMLGLAKKGYWTGGNPPVGYVRKHIVVNGKKHCSIEVDPDGARYVTQIFDTFLAYNCSLQGMETRFKNQGIRTQSGKFFSTTQLHKMLTMPYCVEATPEVYDFYAAKGCIMDPGSPREMWDGSVGVIIYGRSTEKNKKHQAQPPEKWTVCLGKHKPFMPAEKWLAVQSRFTQNKCIKDAKWPVPLLKGVLRCKCGNLMQVSRKKKVDGTCSSWYYCRKRMRQGVDACDMGQIKCDLLDEEVLELFRGITADPALIQKFVKAEAPADVTDLKAAQARVSACERKIGRLAASLALAEDSAASKYIIAEMERLDVELGALKREASLAEMESHQAAASAKDAKATAAEIAKLIHGLDGFDDKEKNAIARAVIQECTWDGERLFIKL

SEQ ID NO: 25428 - protein, 587 aa, synthetic construct
MAKIIKVEQTVPTIKTKKKVAAYARVSMESERMNHSLSAQISYYSTLIQKNPDWQYAGVFADDGISGTSIEKRDEFKRMIAAAEKGDIDIILTKSIQRFARNTVDLLETVRRLKDIGVEVRFEKEHINSMDGDGELMLTILASFAQEESRSISENVKWGTRKRFEQGIPNGKFQIYGYRWDGDQLVVEPEEAKIVKLIYDNFLNGLSAETTEKQLAAMGVKSYKGQHFGNTSIRQILGNITYTGNLLFQKEYVADPISKKSKINRGELPQYWVENTHEAIIPMEVYQNVQAEKARRRELGALANWSINTSCFTSKIKCGCCGKSYQRSNRKGRKDPNANYTIWICGTRRKSGNAHCRNKDIPETTLKQACATVLCLDEFDESVFSEQIERIEVPAPNEMLFYFKDGHTVPHHWESTLRKDCWTDERRVAKGRYVQAHQLGPNSSCFTSRIRCDCCGENYRRQRSKHKDGSFDAVWRCASSGKCDSPSIKEETLAELCAKAMGMAAFDENAFREQIACIHITAPFHLSVHFFDGHTFDAQWENKRKMPKHSEERKQHMREVMIEKWRERHGESKDHSGNNQSIHGSTD

SEQ ID NO: 25429 - protein, 524 aa, synthetic construct
MAKVKTIPATISQFTAAPINSTKKRRVAGYARVSTDHEDQATSYEAQVDYYTNYIKSRDDWEFVAIYTDEGISATNTKKREGFKTMIADALAGKIDLIITKSVSRFARNTVDSLTTVRELKDKGIEIYFEKENIWTLDSKGELLITIMSSLAQEESRSISENVTWGQRKRMADGKVSFAYSRFLGLDKDKETGKIVVNPEQAETVKLIFRLFLEGKTPHAIALHLTAQGIKTPGGKDMWNQQTIRRMLSNEKYKGDALLQKEFTVDFLQKKLKKNEGEVPQYYVEGNHEAIISPAVFDLVQEELAKRSKGKTRYSGTTIFSNKIRCADCGSWYGSKVWHSTDSYRKTIYRCNNKYEGTKCETPYVTEEDVKAAFVSAYNRLVTEKKEIIANAELVRKTLCATDALQIEKQRLEDELSMIVSMTQSIVTENARIAQDQDEYKKRYDSLVDRYDETKAQYDSVAESITAKEAKSVRLAEFISLMEAQKGVISEFDIGLWSSTVEYVTVDRSKGITVTFRDGTEIKA

SEQ ID NO: 25430 - protein, 548 aa, synthetic construct
MIAAIYSRKSKFTGIGESIDNQIEMCKEYAKTHLSDKNITDFLVYEDEGFSGGNTNRPEFQRLISDAKANKFNILICYRLDRISRNVADFSGTLETLQKHDIDFVSIKEQFDTTSPMGRAMIYISSVFAQLERETIAERIRDNMTELAKTGRWLGGVAPVGFRAEQIKCLDENMKERKLMKLVPVPEELEIVKTIYNKYLELKSLSAVETWTLQNNMTTKRGCNFNKSNLRTILTNTAYVKANEKVIHYLESLGITVCGKVNNISGLLTYNKQKTVYGDSGEIKRLFRDKTEWIAAVSKHDGIIEPDDWLKVQKIRKENKDKFPNADKSHTALFSGKLKCAKCGSKMQVTYGHVSKETGKRLYYYRCTLRYWSKNVRCDCKNASANEIDGVVKEALKDFSKNKENLLKTLSQNIKKASKDTNFEDKKTSLNNKLKENESKIDKLLDKFALDDSIQDLLLKKIKALKEENEKIKQEIDSLTADELKENEDELNLDLIRMLLNKCSMIDSLTNDEIKEISNALIEDILWNGDTGDLTINFIGSGESKKKQ

SEQ ID NO: 25431 - protein, 512 aa, synthetic construct
MNAVIYARYSSHNQTEQSIEGQLRDCYEYAKRNDLAIIGEYIDRAISGKTDERPDFQRMIKDASKRQFERILVWKLDRFARNRYDSATYKHKLKQYGVKVISAMENVGEGDESVLLEALLEASAEYYSLDLKKKIARGMRESALRGKFVGGTLPWWCRVDDEQKLTVIDERAAIVREAFMRYDSGEGSKSIVSDFAKRGLRSNRGVPVTLSWLLSILKNRKTIGEYTYNGIEIPGGLPAVVDKPLFDRVQERIARKRRTGGGEATSKTEYLLQGKLFCGLCGSPITAECGQNRKGVVYNYYACSLKKKKHQCKKANERKDFLEWYVVEQTLDYVLTPDRTDYIAEAIVAEYERQFDKSGIKALEQKIALTEGEIQKTMDLCIQATTDAMRKRFMKRCEELDAKKADMEIDLSKLRVAASITYTKEEVRAWLRQFCAGDSFNPAFRRRIIDVFINTVYLYDDKLIIYYNLRDSRQVSYIEAIGASSEIENLRPVPDNKKTAVECSTADKNGGA

SEQ ID NO: 25432 - protein, 573 aa, synthetic construct
MAYNAQNKTGARVAIYVRVSTLHQIDRDSLPMQKQDLLAYAKLMLNTDDCVIFEDAGYSGKNTDRPKFQEMMSQMRAGAFTHLLVWKIDRISRNLLDFATMYNELKALGVTFVSKNEQFDTSTAMGEAMLKIILVFAELERNMTSERVTATMISRANNGLWNGGRIPFGYNYDYETHEFSVNEEESKVVILMHDMYEQERSLVRVVRELNERGYRSRAGNLWSPVSLLIILRNVFYCGDYRYNMLKEGDRQKVKDESEWVTVENHHVAIIPKDQKERIMATLDSNSKLCKQRNIYKSSKHTHVFGGLIYCGSCGKPLGSTPGNLTRDGWHYSKYTCPTRRKSVTLCTGKSTSDPIIGEFVFNYILNMLNAQNDFEKISSPEELEKLLLIGDTFAYIDHIEPNGLNDLFNVLSSGAVKGAVFGKGASLPTKKATVEPEVARLRNEKQKTERALDRLRSLYLYADEAMSEAEYMIQKNKLEETLEDINDQIGMMNTDSWQQSVSDEEFIQRASEFIIAQKLSGRKYVNYKRLAMSVDSEVLKNFVVSIIDSITIQDGLVSNIVFKNGLCHTFIFR

SEQ ID NO: 25433 - protein, 440 aa, synthetic construct
MSVVLRAALYPRVSTEEQAKFGLSIHDQQNDLEEYAKANNMKVVGVFPDAGFSARKKIEKRPAMLQLLEAVKRDEVDIILVTKLDRWFRNIGEYYKVQEILEAHNVSWKTIYEDYDTSTAAGRLKINIMLAVAQDEADRASERIKKVLDAKKDRNEVCTGHLPKGYKIEGKFAVIDKEAEPVIRRYFSTFLETGSITKAMDAVPELKLKYQTASQMLDNTGYMGDWHGIKLPPYLTPQEFQRVQGLRTRVTRKSPYNRTYIFSGLIVCGECGRRMTGHPSPRPSGACSYSYYCQGSAQRKGCNNGNFTVEWKIEDYLLSTIDEQIQIKLQAKPRQEPKANQDVQLKALQKKLSKLSELYIDDMISKADYSKKYAELTSQMDELTQVKSQSRAPEEIATLFSAGWQEIYKQLNKENKQAFWKLKIKEIRLYKDRRIEFDFL

SEQ ID NO: 25434 - protein, 545 aa, synthetic construct
MAVTKIPKKTVTLIEPKRSFIVDKAQHRQKRVAAYCRVSTDSEEQLTSYTNQMKVYTEMIASNKEWEFAGLYADEGISGTRADKRPQFQKMIEDCHKGKIDMIITKSVSRFARNTVDCLDYVRSLKEIGVGIYFEEQNIDTLKSDSELYLVIYAGFAQSESESISKNITWTHRKNFEDGKPIFMYSRMLGYRKGEDGNPEIVPEEAAIVQRVFDMYLSGKSTDEISEILQAEKIVIPGKKLTFSKSMIIRMLKNEKYCGDAILQKTVTIDPISKKRKANEGEAPMWLVENSHPAIVTREIFNKAQEESARRKAKAPVSQKSAMTASGKYSKYALTEVMICGECGSRYKRVTWNIRGKRRIVWRCISRLDYGKKYCTESITVDEQALQRAIVRALNRFNVEDEATYLLLMKSTIGEAVGINGSSDEIDLLERRIDALNKRMLDLVSLSVQEGDDAENHEDDFKNISTQIEQLTKRITAIRESESENGDFQARLKEIQDIIDKRRENKDIYDDSIVRQMVECIKVYHDGRLQIILGGGYELEEYLEK

SEQ ID NO: 25435 - protein, 638 aa, synthetic construct
MYCIYLRKSRADMEAEARGEGETLARHKRILTELAQRRDLEIGEIYQEVVSGESLAARAEAQRMLSDVQAGMWEGVLVMEIERLARGDTIDQGIVMNTIKYSGTKIITPTKTYDPNNEFDEEYVEFSLFMSRREYKTIARRMNAGRIASVKEGNYIGSRPPYGYDKVKDDKSFTLAPNPAESDIVRSIFSWYVHGCINENGELERIGISKIARKLNDMHAPTRKGGAWVTATIRDMIKNPVYIGKIRWNWRKGVTQFKDGKKTVARPHSPEDSWLLVDGRHVPLVDEDTWNAAQSIIADNRPATVPGNREMQNPLAGLMVCGKCGRKMVRRPYSNREQPPSLICSCNACDNVSAALHLVEERIIEALAFWLKNNAIKYESAKPAATDEEQAAISILNAEITELEKQRKNLFGFLERGIYSEAEFRERRADIDAQITALREDVKTLGDKIILKETYNEAIRNEVPKIRTVVETYSSLSSARAKNDMLKEVLSKVVYTRDKGGRWSGLCDNFVLDLYHKIPTPSPELLQRWDNHIQVVGTDEIAHWEMIGTMIHQCLRDATLKDIEAAGLMGYYTMHSKGVYPADPNGVPFTAAYLQCTGDPIADITEDMAADAAMSKRQHFAQKKEALPRMAVLLSPLY

SEQ ID NO: 25436 - protein, 466 aa, synthetic construct
MAREIVHIPAKPRVVGTKATAQKKIRVAAYCRVSSEQDEQLNSFENQVNYYEEYISNHPDYELAGIYADEGISGTSTKRREEFNRMIADCEAGLIDMVITKSISRFARNTQDCLMYSRRLKDLGIGIRFEKENINTMDSTGELLFTILSSLAQDESRSISENCQWGIRSLFKRGIHHLNTNRFYGYDSDENGKLIINPEQAKVVKWLYESFMNGVNPDVLVKTLNDKKVPTCMGGDYKWTCNQVKSILRNEKHMGDVILQKTYTPDFLTHKSVKNEGQLPQYYIKEDHEPIVSRKLWKAVQLELERRQEYMKRYHLKTMGQYTDENPLSHRVICGICGHTFTRKTKTRIEGRFKVWQCGQYYAKKGEHLCDGRIIREDKIYAAFDIAWNHIVEDRPRKERIWQKQINHGNELEAFRAEQFMKLTEGDGRIKTGKELVSIVLSHCVYEENGYLTFYFLDGSHVKIKP

SEQ ID NO: 25437 - protein, 537 aa, synthetic construct
MQIKVIHPSVERELERKKVCAYVRVSTDSDEQEDSYENQIRYYKDKIESNPDWKFVGIYSDLGISGYKEKRPGFMNMIKDARNGRIDLILVKSVSRFARNTETVLKYSRELKRLGVGIYFELQKINTLSGEGELLLTILAAFAQAESESNSGNVSMSIRRKFEKGELNFPISKIYGYTEDADGNPIIDEEKAKIVRLIFDLAEKGIWVAKIAEYLNKKQIPGIAAEKWNFGQIGKMLRQEAYMGDRILQKTYRDSRRRTRKNKGQADQWYVKDTHPAIVTREQWYQVQDILLERNKELYDATPISEEKNLSTHSTYPLSGKLYCPYCGRVLMHRWEGKKRYENWVCGLHRKVSKDACPGICIPNRIASSWGELKEPMTVLKYTDEYGMERFTAIPKVEYEASEDCPYEVVKPEPKPERPKKPSYKKTPKPDKPRYTRTVYPLSGKLFCPNCGKVLTHKWNKGVEYWVCSTNRNKHRTENFEKCKGMYFPAEAAKDWGEINEPLTVIAYKNEYGHRLYTAMPKEEYERSSDCPYRKED

SEQ ID NO: 25438 - protein, 521 aa, synthetic construct
MGNVMIIPAKRQVGNTSRQQEDKPKLRVAAYCRVSTDSDEQASSYETQVEHYTEYIKKNPEWEFAGIYADDGISGTNTKKREEFNRMIEACKAGEIDMIITKSISRFARNTLDCLKYIRMLKDKNIPVFFEKESINTMDAKGEVLLTIMASLAQQESQSLSQNVKMGLQFRYQNGQVQVNHNHFLGYTKDWEGNLVIDPEQAEVVKRIYREYLEGSSMDKIAKGLEKDGILTGAGKKKWWTSTINKILRNEKYIGDALLQKTYTTDFLNKTRVKNNGIVPQYYVENNHEAIIPKNIFLRVQEELVRRRVVKTSANGKKRSYSCNHCFAQLVICGECGEMFRRIHWNNRGVKSIVWRCISRLEPTGLECHARTINELDLQEIVLTALNELLGDKSKYQKQLQQNIASVIRASAAITTDGIDEQLMKLQKELLKKANNKEAYDEIADQIFDLREKRQQASMDTVQRDEQLKRITNLQDFIKDQTSDLTTFDEALVKRWLKQIIIWPTHCTVELKSGLKVDVER

SEQ ID NO: 25439 - protein, 519 aa, synthetic construct
MKKVTKIDKIQPAKNAEDKLRVAAYCRVSTATDAQLESLEAQKSHYENYINSRDDWCFAGLYYDEGITGTKASKRPELMWLLADCKAKKIDFVITKSISRFSRNTMDCLEIVRTLLNLNIPVYFEKENINTGSMESELFLSVLSTMAEGESASISSNNKWSIKKRFENGTYRLSSAPYGYKLESGGLQVVSEQADIVKRIFRELLSGKGMYSIAKELNAEQVPTQKGGRWTSTSVHNILTNEKYTGDCIFQKTYADSNFNRHTNNGELNRYLIQNHHEAIISHEDFNATAALIEQRAAEKGIESGSDKYQQRYAFSEKLICGECGNTFRRRIHKGKYNSYVAWVCNTHLSDTNRCSMLFVRDDALKLAFATMLNKLIFSYRLLLKPYLAAMQSNTADEALLRIQYLENQLDQNAEQRSTLHKLMAQGYIDQIIYTQESNELLLQARDFRSEIEALNNTVAGDTTKVYETERLINYCKRGEMLTDFNESLFELFVDHILIYSRQKIGFVLRCGLTFEEMI

SEQ ID NO: 25440 - protein, 525 aa, synthetic construct
MPTVKVIPATRDFHTGIEKTTTRKKRVGAYARVSTDSDDQLSSYEAQCDYYTRYIKSRPDWEFVGLYADEGISGTNTKHRDRFNAMIADALNGKIDLIITKSVSRFARNTVDSLTTVRKLKEKGVEVYFEKENIYTLDSKGELLITIMSSLAQEESRSISENVTWGKRKLFADGKVTLPYSSFVGYRKGANGLPEIEPEGAKIVRRIYTEFLNGRTARQIADGLSADGIPTPRRAKKWRCTTIISILTNEKYKGAALLQKSFTVNFLTKKMKPNEGEVPQYYIENSHPAIIDPVEFDLVQAEMQRRRKLGKIYSGNSIFASKIICGDCGEFYGEKVWHSNDRYRKTIFRCNHKYNNEKGKCQTPVISEQQIKETFVVAYNALMADKAGVIADCRALQHMLTDATAMEQEIADLSKQLGDSTAELRQHVEGNMRSAMNQEQFWKRYNTLEEQCNCLSDRLAKLQSSVKERKQRADVIGGFMFEIKERDGIIDEFDEELWTALLESVTITRDGKWQFKFKNERVIEV

SEQ ID NO: 25441 - protein, 447 aa, synthetic construct
MREIQLVTPNNRPILVRKRVCAYARVSTAKDAMLHSLSSQVSYYQKYIQAHKDWEFCGVYADEGLTGTKESRAQFQEMLKECRYGNIDIILTKSISRFARNTVDLLNTVRELKSLGIAVYFEEQNINTLSSDGELMLTILASYAQEESLSASENMKWSIRKGFENGELCCFRFMYGYRIERGSVTVCEEEAAIVQEVFDRFAKGESMLAIAKDLNARGISTHSKRQMRWSGKRIGKMLTNEKYAGNALLQKTYINNHLEKKRMVNRGELPKYYAEQTHPAIIDAQTYRLVQERIERNRGRHTVKIGYLKSAFTGKMFCGYCGEPVWRGKNNGRTIWGCRNARGKGVLTCHAASIRNDILEETCCSLFGLSTFDPTFIDQNVREIILYDNRLVFSMTDGREEKISWKNKSRSQSWTPEMKERARQRTMERLQNRRINDADSKGNTSDS

SEQ ID NO: 25442 - protein, 597 aa, synthetic construct
MANKVVKVIPARPQGIIIDQAGVIKRKRVAAYARVSTEKDEQNNSYEAQVNYYTNYIQANPEWVFVGIYSDAGITGTSTKKREGFKRMIDDAMNGKIDLILTKSVSRFARNTVDSLVNVRKLREKGVEVYFEKENIYTLDTKGELLLTILSSLAESESVSISQNTTWGQRKRFADGKVSFAYSNFLGYDMGQDGKLHINEEQAKVVKRIYEEYLLGYTPSYIAKRLTADNIPTPQRKKVWYQGVIDSILTNEKYIGDSILQKTFSTDVLTKKRKKNEGELPQYYIENNHPAIITDEIFEMVKEEMARRKSAGLMTNVSCFSGRILCGDCGGYFGRKVWHSNQPNRTIVWQCNKKFNNPDACGTTSIKEKAIEEAFVRAFNEMFSRKDEIIENYKLCIDVICDDSKFQERKNELDKDLEEKTIVIKDFLLKCSKTEENIEESNARYDVLIKEFEALNAERQKCLDMISSLAAKRVKINSFLNILNSAEGVINSFNEVLFQKSVNHMVINHDLTIDVIWRDESKTTTYIERGVKEVKKSAPRIKREKVLSDHTCLCCGKQLYITPGKVQRIFCSKKCGETYRRAKAKEARLENNTISHV

SEQ ID NO: 25443 - protein, 668 aa, synthetic construct
MAYAKAKKHLKIWTKKKAALYVRVSTRYQVDKDSLPFQRKKLKEYCKFLGLEDYVIFEDDGYSAKNTARPHFQEMMSRVRSGEFSHLIVWKVDRVSRNLLDFAAMYQELKDHKVTFISMNEQFDTSTAIGEAMLKIILIFAELERNMTSERVTGIMLDRAEQGLWNGARMPVGYRWNNETKFPEPDPEEVKIVQLIFDKYEEWKSSIKIARYLNNNNFKSKRGGQWTSKLIHDIIRNPFYIGTYRYNLRESGRGPLKPESEWIVRENNHPAIIDKAQFDRCNKIMDQNGSSRDTSDLRARKYVHTFSGHLVCGKCGANMIASKDRARANGWRPSMYRCAQRSRMLDCDNSRTINESYIGPFIFNYIANLARVQKNFKNITTVEKLERELLKGETFDGVAGILPEGLNLTFQALSFRQVGNGTYIPDVDFLGDSDGASDRDQIELLKSEIEKSKNAVTRLTDVYLFDPDSMTKEEFATKKKELAKKIEGMERQLADLLDDSGNDDLADMSFIKKASAFLVAQRIVSKSFVDYVGMAQELDNEILKDFIDQIVDQIVVLDGRVQSITFINGLKHEFRYATPAELPVCQKCGGRIGSTCGCRTRTFDFSGKRYQRIKVGDPRDTLHGKKNPVCPECFAHEGRWHHWNCKIETCPICGGRLAECEHGPNGKK

SEQ ID NO: 25444 - protein, 516 aa, synthetic construct
MNEKRVVAIYARQSVDKKDSVSIESQVDECKRKNVKDDEIVKTYIDKGKSGKSIVGRDELMKMMKAVEADLVSRVVVYKLDRFARNISDFYNLQKTLENHNCSFVSVTQGFDTSDTVGRAMMGILAVFAQMERENISARIKDNYDYRVKDRRWASGKAPFGFKNGKIDGKTTLIPVDEEVRAVQKIFKLYASEANISIGKLQDKLNEMGIAGHQSKKISEDGETKEKTGFSRTTLSRILKNPVYAPADEMMHKYFEKFHIQFVNNIEEWNGETSASIVGKNNRTINAENKEEMKIYLTNVEPIIDTETFLLVQNRMAENSALASDNSPKTNLKELAGLLKCAECHMAVKMQGKPCMTCTGRSQKKICDVSFKGLALETVQENVAEQVQSRIDNLDRFALEQSQKKLKLMHEIDELQKQMKQMIEIAKFSTKSVAMLAKEIDDMQTQIDERQLKLKLNINNLDVVEIRLKLKSVYDVHGDTLNYRELSTELRQTVLRTLIDKIYLHKDGKVDIVWKE

SEQ ID NO: 25445 - protein, 506 aa, synthetic construct
MTSDFPCETLKQNISRKTAHDDIMSFYILSYQAFFRYQKEGFYMSFFTPNPQLFGLRVVKYIRCSHDDQVLHGDTLEAQDLILEDFIKVNRMILVDTFIDEALTARKRFNKRKEFVRLLNGVKAHDFDLIIFTKLDRWFRNIGDYHKIQEILEANGVQWKAVTENYDTTTTNGRLHINIRLSVAQDECDRDSDRIKDVFAYKLKNKTYVSGSLPRGLKLDAEKHVIIDPEWNCFALDMFDRFEATCSKRDTQLFLQEKYNIRVCYDTVARYLKNPLFKGQYRDDPDFCPATISPERFERIQKLAIRNVRIRHTQQFYIFSGLLICSSCNHYMCGTVTYRRMADGSEKMYKNYRCNFKAQSKLCDRGKTYREADLEEYMLAHIRPALSDYIAKYEVTAASTVQKNPVTEIAKIERKMKKLYDLFMDDLIDKEAYRSEYDKFKAQIEELQKCSTAAPMRSLDSVKKLLSEDWEAVYHTFSDREKNTFWKSFVESVLVYEDGSMDIRFL

SEQ ID NO: 25446 - protein, 543 aa, synthetic construct
MKRVICLYRVSTKGQVDKDDIPMQRIECRKFIETQGWKLVGEYAEKGVSGFKVSAEKRDAIMSIRKEAERGAFDVLLVFMFDRLGRRDDETPFLVEWFISKGIEVWSTREGQQKMESRADKLINYIRYWQAGGESEKTSERVRTKHRQMVEAGLWRGGARPFGYKLIHTGRIGKKNRQLFDLAIDEKESVIIRDIFDGYIRRGMGMHRLANYLNSHYPSPDKIWAPQSIKTILTNPIYIGISRCGDVRSPVNEALRIVSDEDFQFARHVMDMRVTRKTQTCGDIDEDNLDEAKRTKTSIYGASLLSGLLYCAHCGHKLVGTYHTKQRANGAYYYRPVYRCYNGATKAKGCDGQRTYSAARIEKAVLEIVHQYFSHFGESMDAVWKEQQRLQIKQGSGARLKQAELSLSRLQAQHKKLREELVKVLMGESVFDEETIKSMLDEKQDAIEKAEAYLKEIRASAEDTEQKLQQLIFQYRSIKNWSSVFDQANDDEKKMILARIIEKITVDKNYNISIYFFLTLEDFRKEVEDNAEKIEILEASQCI

SEQ ID NO: 25447 - protein, 578 aa, synthetic construct
MGYVTKKAAQRFEEKKAAIYVRVSTQYQVDRASLPVQREELINYAKYALGISDYVIFEDAGYSAKNTDRPDYQQMMARMRTGEFSHLLVWKIDRISRNLLDFSVMYAELKELGVVFVSKNEQFDTSSAMGEAMLKIILIFAELERKTTSERVSAVFVSRANDGIWNGGKVPYGYSYDKESKTFSIAEDEAKIVRLIYSLYESEKSIVRVARIMNERGLKSRAGSDWSPTTVHTILSSPFYSGTYRYNYRDESNAKRFREKGKDEWVLVENHHPAIVSPERQAAVGVILESKRYNKNATYQRKNVHVFAGLLTCGCCSSTMAATTDKVRADGWRPSMYICSRRRKSEDCTNKYVSDVTLGPFVLNFFANLIKASNSFGRTTSIETLEKKLLRGEALSHVDHIERPGLEELYNHLRSGFDEKCFESPTIAATESSADLSERDLLLSEKRRLERALNRLKTIYLYGDDEMASKDFNIERERITKALSEVDSRINELDIANAFDLSLSDEAFMQKASQFILTQQLLDKRYVNYERFIRKIDPKIVKDFLNETVSNFCIKDGLTTSILLKNGIELRFSYKTAE

SEQ ID NO: 25448 - protein, 534 aa, synthetic construct
MIRAAAYARYSSDNQCDESIDAQLRAIHKFADENGYKIVSEYIDRAKTGTNDRREEFQRMIRDSDDGDFEVVIVHKLDRFARKRYDSAIYRKTLEENGVKLVSVLEQFTDSPEGIIFVGMSEAMSEYYSANLSREVKKGQYENAIACKHTGGFAPLGFRVNAELKYEINEEEAVHVRFIFQSILSGMNYSQIIEELNRRGVRTRRGREFGRNSLHEILRNEKYTGVYIYRRSALPDKFGKRNNHADRSRNDIIRIEGGVPQIISREVFDAVQAIMDKRKMEPYNRSDAKEVYLLSGKVFCGLCGNSYCGNRMHGGRNKSLYITYRCNSHSGKGTGNCRNKDVNRDYLENYIRKLLAEVLFDERRLEGVISEYNKMVNSNGSEYDSELRSVRSMIKKTKGEIDNLIGILAATGSASLAEAVSEREERLAMLKEKRREIESRRVTIETNREDIAEAFERGREMLLSGTIPHLRQLIQLYVSRIDVYPDHISATLNYLPALRAVGSDEAVGNYGAAAQNALEVREDIGREELNLECK

SEQ ID NO: 25449 - protein, 535 aa, synthetic construct
NTTIYNTALYMRLSRDDELQGESGSIQTQRMMLRQYAAEHGLNVIDEYIDDGWSGTNFDRPDFQRMIDDIEDGKINCVVTKDLSRLGRNYILTGQYTEIYFPSKGVRYIAVNDNVDTINGENELAPFLNILNEMHARQTSKKVKAAMRTRFANGAHYGAYAPLGYVKDPDKKGHLLVDSETRWIIEKIFDLAVHGRGAASITRILVEEKVPTPGWLNFQRYGTFANIYAGAPEEKAYAWTIAQVKSILKEETYIGHSVHNKQTNISFKNKKKVRKPKEEWYRVENTHEAIISEDVFRQVQEQICNRRRRQKNGTTQIFSGLVKCADCGWSLAYGMNSQNKNPYAHYHCSKYGQGLHQCSMHYIRYDVLYAYVLSRLQYWSVLAQQDGDKLLKRLLNASDKERNTARKRQTAELKKAEKRKAEVDTLFAKMYEDWSAGRITEYNFNMLSEKYQGEQRELNAKIERLHEAMEAAAQTAVDAEKWIGLMKQYVNPTELTAELLNTLIEKILIHEAVKSEDGSREQEVEIFYRFIGKIE

SEQ ID NO: 25450 - protein, 567 aa, synthetic construct
MQSKNKNQIGITALYCRLSRDDGTESESNSIGNQKKLLSQKAKEMGLTDTKYYVDDGYTGTNFNRPGFQQLIDDIEIGLVSAVMVKDLSRLGRDYVSVGNYTDSYFPEHNVRFIAVNDAIDSDEGESEIAPFKNILNEMYARDISKKIRSSHRLRGSMGEPLSQPPYGYTKSLENKKKWIIDPEAATVVKSIFKMCLDGKGNETIARELQENKVLIPMAYWRSKGLNRGGKKTQTNPYKWCKTTVQKILSQQEYCGDIINFKTYSKSFKNKTRYENSKENWAVFKDVNEPIIDRETFETVQKFISKTKRRAPKKENGERSIFNGLIYCGDCHSKMRYHTSTSNKEIHYFTCSDNKVDYRGNCPGRHYVRADALEEVVKLELRRLVEILEIDEPYFAQLLLRKNDEEREKDKKFLETELQKAIARSNTVSQLYEKLYEDNVIGKVSDEWFVELSHKYEKERMDLKAKIADTRHQIEELKNTNSEYGKFISAIRRFMQMDNLTSPLLRELIDYIDIFETEGTGKSRTQRIVIYYRFIGYIELPNTAKQTHIADTRKGVAVEYITEQFTA

SEQ ID NO: 25451 - protein, 573 aa, synthetic construct
MAYNAQNKTGARVAIYVRVSTLHQIDRDSLPMQKQDLLAYAKLMLNTDDCVIFEDAGYSGKNTDRPKFQEMMSQMRAGAFTHLLVWKIDRISRNLLDFATMYNELKALGVTFVSKNEQFDTSTAMGEAMLKIILVFAELERNMTSERVTATMISRANNGLWNGGRIPFGYDYDYETHEFSVNEEESKVVILMHDMYEQERSLVRVVRELNERGYRSRAGNLWSPVSLLIILRNVFYCGDYRYNMLKEGDRQKVKDESEWVTVENHHVAIIPKGQKERIVATLDSNSKLCKQRNIYKSSKHTHVFGGLIYCGSCGKPLGSTPGNLTRDGWHYSKYTCPTRRKSVTLCTGKSTSDPIIGEFVFNYILNMLNAQNDFEKISSPEELEKLLLIGDTFAYIDHIEPNGLNDLFNVLSSGAVKGAVFGKGASLPTKKATVEPEVARLRNEKQKTERALDRLRSLYLYADEAMSEAEYMIQKNKLEETLEDINDQIGMMNTDSWQQSVSDEEFIQRASEFIIAQKLSGRKYVNYKRLAMSVDSEVLKNFVVSIIDSITIQDGLVSNIVFKNGLCHTFIFR

SEQ ID NO: 25452 - protein, 492 aa, synthetic construct
MKAVIYARYSSDSQREESIEGQLRECTEYAERNGITILRSYIDRALSARTADRPEFQNMIKDSEQKLFDVVLIWKLDRFSRDRYDSAHYKRILKKNGVKVISVKENISDGPEGIILESMLEGYAEYYSAELSEKIQRGQKENALKCKNNGGNTPLGYVVGADGVLAVDPLTAPLVTEIFTLYDSGESISEITASLNGRGLKTKKGKAFKIGGVSLILKNRKYIGEYQYGSVIIPKGIPAIIDDDLFDRVQRRMAFNKKAPAKAKATEEYLLTTKLFCGTCERLMAGESGTSSTKGVKHYYYKCGGAKRKLGCKRKSVRKHWIERAAVLVTVQHVLRDEEISRIAEAIVALQEKEDTSLPAMRQQLTECEKAIDNMLNAIQMGVLTASTKERLEKLEMQREELKLSILQAQMARPRYTKEQVVSWISRFKYGNVDDPQYQKQIIDTFINSIYVFDDKLAFTYNFKDGTETITLTEIQAAFGSDLTQVAPPENR

SEQ ID NO: 25453 - protein, 525 aa, synthetic construct
MWMLPPMSVDDIIMYLRKSRTDDPALTVQEVLSKHEQMLDDWVARNIPDDGRRIPEANRYREVVSGETIESRPCVQEVLRRVESPRVKAVLVVEPQRLSRGDLEDIGRLVKLLRYSNTIVITLQYTYDLRDERDRDMFERELKRGNEFLEYQKRIMGNGRLLSVQNGNFIGQKPPYGYNKVVIKEGKRKCHTLEPDPERAPIVKMVFEMYAGGTSASQIAKTLRTMGVTTADGGKWVTSSVKQMLTNDHYIGMVHWNKRKTVKVVEDGEVVATRPRNSDFLVYPGKHQPIIEKELWDAVQAIKGNIPPIKNRAKYANPFAGLVVCRCGGKMVRQQYIRDGVERCAPRLVCPNQAECHTASCSLPEFTEAVIEALEKGIKNFELMMADAPEDDATQQERLIAQLEKRLAELDRLELAQWDKYTQEAMPKHVFDALNKKVVQEKEETLQALKTAMETVPIRVDYEKKRETFAAAVRTLQDPDASVKEKNLLLKQCIERINYNRKPKESDNRRFGNPEPLELEFQFKV

SEQ ID NO: 25454 - protein, 432 aa, synthetic construct
MERTIRKINAKKPKIPKRERVAAYARVSMDKETMFHSLSAQVSYYSEYIQRNPLWIYAGVYADNACTGTRADRPEFQRLLMDCRAGKIDKIITKSVSRFARNTITLLEATRELKGLGIDVFFEKENMHSTSGDGELMLSLLASYAQEESRSVSENCKWRIREKFKAGIPSTTKIMGYHMDHGRITIIPDEAETVKLIFALRRLGYGRLAICKELNARGIPAKFGGEWVEGSITKILRNEKYVGDLLLQKHFRVDHLEKKDKKNEGELPQYFIQDNHEAIIPREIFDAVQADIKRRAAALPAGHGRHITYPFSKKLVCAHCGKNYRRRCNSGIIAWSCATFMTYGRDKCAARQVRESILEECAARALGLPAFDPATFEDQVDHITVCDERKLIFTFCDGTTEEITWQEPSRANSWTPEMRARAADRKRRGSHE

SEQ ID NO: 25455 - protein, 524 aa, synthetic construct
MSEAVVHKVIKTIPATRDRYTATPIKAETKRRVAAYARVSTDDEEQQTSYEHQVTHYTQYIQEHEGWLFAGMFTDEGITGTSTKHRDGFNAMINAAMAGKIDLILTKSVSRFARNTVDTLTTVRKLKAAGVEVYFEKENIFTLDSKGELLITIMSSLAQEESRSISENVTWGMRKRFAEGKPIIPYGAFLGYRKGPDGMPEIDPEQAETVRYIYRAFLEGKAPSYIARDLTARGILTPGGKTTWRANTVMSILTNEKYKGDALLQKTFCTDFLTKAYKVNEGEVPQYYVEHSHPAIIDRAMFDAVQIEMKKRAEPGQRTYTPYTLSGKIYCAECGARYGSKMRRGKQSWRCNNRHLGRTNCTAPVLHTETIEDAFVTAFNQVIERKDEIIRICMDTMTTRCDVSGIDARLATLNAELDVVAELIAQNIATNARVALDQDENRQKFEELMARHDSIQNEIHELERQRAELIAKLNGIRHYIGVIQDEGRITGFDETLWLNTVDRLWIKPDGTMRFEFKGGPAIEG

SEQ ID NO: 25456 - protein, 455 aa, synthetic construct
MKTVACYCRVSTEEQVKYGFSIQAQKDALTKYCTENDYKYDFYIDEGISASSMKKRKALQKMLEKSVAYDMILFTKLDRLSRNVLDANNINKILQDNNCTMKAIDEDDVDTSTADGMFMFNLKVSLAQREIGKTSERIKFVFKNKREKGEVTSGTTKYGYKIKDKKFVVDPEEAENIRNLYKYFISVNGDHKKTYSYFVKNFPGKGQDALFNYLRETAYIGKYKLYRRNVYLDNYIPPIMDKELFDEVQNLLPRVEKVFKKENISSIFAGMLYCYYCKSRLVRKVDYRSKNKIINYFCDKQYKYKVGINEKQCQNSRVISDKTVEEYLINNLKELCKQYISKSTIKTKPKPQKNNIKINSLKNKLSKLKDLYLDDLINKEEYKQDYIRINKEILKLEEAQKEEPQKDFTYLNELINKDIPDIYNTFNIEEKRKFWLKIIDKIYIKEGKIKEVTFL

SEQ ID NO: 25457 - protein, 535 aa, synthetic construct
MKIAAYCRVSTEKEAQIDSLEKQIEFFNEFTQKNGYELYKLYADEGISGKQIKNRKQFQQMMKDAKAKKFERVVVKDVSRFARNTVDLLQSIRELKSYGIQVDFLNNGEVMEGGSEFILTILGAMAQQESANMSKRVKFGKDITAKKGRVPNLVFGYDKIPGEKYTLKINEEEAKIVKEIFESYVYKGMGTTKIAWELNDRGIRTKKTKSKWVQTSIVRMLKNPIYTGRVTNKKSEITDFITGSRKDLPEEDWIVADKPEMRIISDELFNRTQEILEQRSNEFKLKNKREKTEYVFSTLIYCKHCGYSFRRIKRKYTDDGPEYIRWVCSGRNSMGVNHCPNTTVIDEEELLNAIKEYLKSIISNKKNFMKAVEKEFEKITALRENNERSEESLLKEIEKVTVKKQKYMEMFQNEVINMQELKQYTNPLNEDISRLERELKLITSEIKEKDVLEKELTKTIKTVDDILNNETITNAMLKTIIDVIEVDSEGNVEVRLKLLNEIGTKPTVITNFEDINTSKNSSTVTKSNIGTQRFK

SEQ ID NO: 25458 - protein, 513 aa, synthetic construct
MAQAKLISPVSRKAYERTKVAAYCRVSSNSADQLNSYAAQIKAYTKLIKSNDSWELIDIFADEGLSGMKAENRVEFQRMLEMCEHKQIDLIITKSVSRFARNVKEALEYVRKLKLLGIGVQFEKEGIFTLALGDEMLLNTFTAIAQEESKSISQNQRLSIVKRMERGEYVDSNAPYGFRLHEKKLAVYDQEADIVRYVFHQYLSGWSTSEIARDLTEKGIQTKLGKEQWRSKKISYILSNERYVGDCRYQKTYRDTTVPFKQSKNRGQEDMFYASDTHEPIIDREAFDKVQALLQERQERFSKTAQLNIYPLTSRIRCSECGSFYRRKVRNGAIKWVCAKHNEDTHACPAGYYSEERIYDGFITMVNKLRFGEERILDQVIAKLETAATLYKRNNSSAEKMSQSIAGLNAKLVMLEQLRSKGYLAVEVYQAQARDIQKQISNLKADRKNAFESIIQGMLDEVLKLRTLLTEIEEPLEEFDEKLFYEIVKDVVIAPNDEMTITVLGGLKFTELI

SEQ ID NO: 25459 - protein, 543 aa, synthetic construct
MEVKKIPKKTVTLIEPKRSILVDKEKYRQKRVAAYCRVSTDSEEQLTSYVNQKKFYSDMIAKNTEWQFAGLFADEGISGTRADKRPEFNNMIKACLAGKIDYIITKSVSRFARNTVDCLDYVRMLRARGIGIFFEEQNIDTLKSDSELYLVIYAGFAQSESESISKNITWSYRKNFEDGKPIFMYKKLLGYRKGEDGEPEIVPQEAEIVERIYTMYLSGMTVDVISKQLQSEHIEIPGKKFTFGKNMVMNVLKNEKYCGDCILQKTVTIDCISKTRKKNEGEAPMYIVENSHPAIISREMFNRTQEELSKRKARSPQSQKTAITATGKYSKYALTDVLICAECGSRYKRVTWTSLGQKRIVWRCVNRLDNGKKYCHHSPTLSETALQEAIVRALNKFNDEDTTTYLTLMKATIGEAIGANGGSDEIDLLERRIEALNNRMLKMVSESVEKGANMEDSEDEFKSISDQIEQLNRRIQAIRKSEGSDEERQERLRQIQATIDERSAHRDAYDDSIVRQMIECIKVYEGGKLKIIFGGAYEVEEQV

SEQ ID NO: 25460 - protein, 463 aa, synthetic construct
MTTKVERCAIYIRVSTTEQMMHGKSLEAQKEYLENYANEHNMAVVGIYADEGKTARKELKKRKAIHSLLQDVEAGKIDVIIFWRIDRWFRNLSDFYKVQDILDSHNVRWISTSEPGINMETRDGRLQLNVVLSIGQNEVDTTSERIKFVNESSIRSGKLIFGDANMGYGYKSGIVDGQKRMVKDPDREHVVDAFYKYFFKHQNKCATLRYIQETYDPDFSFGIMRTLLSSEFYKGTYRGFPYCPAYLTEDEWNKLQKIQKRNVKATPSGRIYLFAGMIRCPVCGQLLCGTGCSSIINRKTGAKRTYCYYRCNRAMIDHICSYRHRLSQNLVENYLLDNLEDEYKNYKVKCEKIEKEKEKQKKKQSPEKLRKELDRLNFLFQKGRIEWDYYNEEYSRVESELNNLQSALPEPVTNYGYLEELLDTDFRTMYDQLSQENRRAFWRSIIQEIHINEDSTITSVDFL

SEQ ID NO: 25461 - protein, 439 aa, synthetic construct
MERKIERVQFPAKMPTLKNVAAYARVSSGKDAMLHSLSAQVSYYKELISKQKGWKFCGVYADEALTGTKDNREQFCLLLEACRRGEIDMVLTKSISRFARNTVTLLETVRELKLLNVDVYFEEQNIHSISPDGELLLTILASYAQEESLSASENRKWQIRKDFEKGKIGSITIFGYRRNADGVLEIEPDEAEIVRMIFSDYLSGMGGRMISNKINEMGVRTRQGNLWTSPRIKEILQNEKYTGKMLLQKYYRNNHIEKRKVTNHGELQRYLIEDAHEAIIDMETFERAQQEIQRRQMYNYGNARKRYPLSGRIICAGCGKHYQHKNYQQGDVWLCSTYARRGKKYCPTAKQLSEKALYAAMEGIGQVSTITVKGNLLIFQLENGESITREWQNPSRSESWTEEMRQQARERSQHGKKGHNHSGVDQSADADAGDSEGQA

SEQ ID NO: 25462 - protein, 504 aa, synthetic construct
MPETAKVKRKVAGYARVSTEFEEQQTSYEAQIEYYTNYIKSRDDWEFVKVYTDEGISATSTAHRDGFNAMIENALNGKIDLIITKSVSRFARNTVDSLTTIRKLKEHGIECYFEKENIWTFDGKGELLLTIMSSLAQEESRSISENVTWGQRKRFADGKVNLPYSRFLGYRKGEDGLPEIVPEEAEIVRLIYRTFMEGKTPYKIAKMLTERGIPTAGGKSHWHQTTIESILTNEKYKGAALLQKRYTVDFLTKKRVINEGQVPQYYIEHSHKPIIPPDEFEEVQAELTRRRKLGRRYSGNTIFSAKLICGDCGSYFGAKVWHSTSKYRRIIWQCNHKFKGKSFCTTPHLYEEEIKQRFVKAFGAFFEKRDEVLAVCKRLVQELSDTSAIEEQIEVAATEMNGIADQIREHIHKTAMTEENGDAQYKALTEQFKKAEDKRKRLQKLLDDQISRVDTMNSFLRKIESTEEITTFDDDLWRVSVESVTVYGDGNMLFRFMDGREITA

SEQ ID NO: 25463 - protein, 572 aa, synthetic construct
MASRIAEKLAAKKAAIYIRVSTHWQVDKDSLKVQRRELIAYVTLVLGITDYVVFEDPGYSAKNTDRPEYQTMMDRIRTGEFTHLVVWKIDRISRNLIDFAAMHDELQSLGVTFVSKNEQFDTSSAIGEAMMRIILIFAELERKTTAERVTAVMLSRASDGQWNGGRVPFGYSWSKEAKTFSIVPEEAKAIRRMAELYEQYQSLLYVAKYLNDAGIVTKTGGQWTPTTVRTILTNPWYIGQYVYNVHSDGKGIEKRDSDEWITVENHHEPILNEDVFCRMKFLLTRNKRGGVPSHKTYVRKNIHIFAGLLRCGQCGSNMTANLDRRRANGFRPSQYACGSRRRKGTSCTNKYISDTTLGPFVLNYVANIIRASKNSSEATTPEVLERKLLRGEAFEDVASVSTDALGQLLDAFRSAGDAVEYRPQIAFSGDDNSIREIDTLRARRRKLDNALARLNALYLYDDEAMPEKDFVMQRGQITKQLEEVNARIEELQNQESSEELGDDFIGKASYYIMANKLIEDRYIDYEKYIRAIDHSIPRSFLQQIIDHIVVNDGRVISITFKNGSTHTFAYKT

SEQ ID NO: 25464 - protein, 434 aa, synthetic construct
MERVVERVDALIPAQPKALRVCAYARVSTGKDAMLHSLSAQVSYYSKMIQSHNGWMYCGVYSDEAVTGTKRERAGFQHMIEECRQGNIDLVITKSISRFARNTVTLLQTVRELKSLGVDVFFEEQHIHTMSADGELMMTILASYAQEESLSASENQKWRVRKAFENGEIINLRFLFGYDITPDGIRVNEVDAAIVREIFARFNGGESMSSICRDLDARGHKGVLGGTWCAERMRNTLSNEKYLGNALLQKRYRNNHIEKKLLPNRGELPMYYAEGTHEPIIDQATFDKAQERLRILAQQAANRKKPTRSVFSGLIHCGLCGNTYKRVTYRQKHYWNCTTFQTKGKSECAAKRIPEETLEALTCEVLGAVSFDPDMVRSKITAIRAEKSNMVVFCMDDGSEIVKRWTDRSRAESWTPEMKEKARQRALQARRKKK

SEQ ID NO: 25465 - protein, 529 aa, synthetic construct
MSRTAARSVTVIPPTINPLTHLSKVAVQKRRVAGYARVSTDSDEQFTSYEAQVDYYTQYIKRNPEWEFVKVYTDEGISGTNTKHRIGFNEMIADAMSGKIDLIVTKSVSRFARNTVDSLVTIRKLKEKGVEVYFEKENIYTFDGKGELLLTIMSSLAQEESRSISENVTWGQRKRFADGKVNLPYKQFLGYRKGADGFPEVVPEEAIVVHRIYTRFMEGLTPGAIAKELTADGIPTPSRKQRWQTSTVESILQNEKYKGAALLQKCFTVDFLTKKRKVNEGEVPQYYVEHSHEPIITPEEFDKVQTELARRKRISRQYSGKSIFSSRIICGDCGSYFGSKVWNSTSKYRRVIWQCNSKFKGEHKCETPHLDEETIKARFVAALNVIIESKDNILEDCRLMQATLTDCTGIDTEIETLLEEIEVVTELTKHCIAENSQTAQNQEEYSARYNGFVERYEKAKAQLEQLRTTKAAREAQAEAIGAFMFEVQELDTITEFDEKLWLTTIDTVTVHADGRMTFKFQGGKTLTSY

SEQ ID NO: 25466 - protein, 479 aa, synthetic construct
MRGVIYARYSPGPHQTEQSIEGQVADCQQYAEEHGIDIIEIYADRHVSGKSVVGRDEFQRMLRDAEKGRFDCVLVWKIDRFGRDRQDIAMGKMALKRAGVKLMYARESVPEGPEGIILESVLEGLAEYYSADLRQKVIRGMKETAKKGQYCGQSLPIGYKVDAERHIVVDEREAAVVREAFKLHIAGGQIRDIVQLFADRGIMGRRGKPVSNAVVYRMLRNEKYLGEFYIQDVKLNVEPIIDQATFLEAARHFKTSRNNAAGRAKVNYLLSCKMFCGYCGSMISAEAGTGKLGKVYRYYKCGDKKRGKKCELKPFPKDHLEDAIILATVNDMLTDEMIEKLTVRILEVQEQENADDPVVGLRRRLDSNKKRQRNLLDAIEEGGARGLVSRLAALEEEEEQLVLEIQRAEIKRPRLTHEVVEAWLRSFRVGDVTDDDFRARLVDTFIARVELRNDEALIFYNIREKGPHSRVRVRPEWWT

SEQ ID NO: 25467 - protein, 581 aa, synthetic construct
MSRTTNKRPGKAKSGLSRKQKVAIYIRVSTLYQVDRDSLPMQRKDLIAYASLILGIEEYEIFEDAGYSGKNTDRPAFQEMMQRIRKGEFTHVLVWKIDRISRNLLDFAEMYEELQELRVTFVSKNEQFDTSTAIGEAMLKIILVFAELERNMTSERVTATMISRANSGLWNGGRIPFGYDYDPDKTAFSIREDEEKVCQMIKNDYMEHKSLVHTSRMLNASGYKTRAGAEWSPTAVWIIISSPFYAGIYRYNRYKGTERRVENPEDEWIMIQNHHPAIFSLEEHEKMLAILDENSRNHRSVGQKHQTERVHIFGGIAYCGKCGSKMVSTPGRLHANGYRPTNYSCPKHRKTKECDNPTVSDTQVGEFVINYILNMLRAKKKFSTIENPEDLERCLLYGNTFSEVEHIDSNGLNEYFNLLSRYSSDDSYTFSVKKSRKKKAEVDPEVEALRKEKEKQERAMKRLQDLYLYSDTSMSEKDFIIRKTEISKRLEEINAMLGMVAKNSEPSLSDDEFVRQASHLLISRELQNRQYIYFKNLAQSVSPEILKVYMETVLDSVLLVNGRVSSIVFRNGLTHKFKYKS

SEQ ID NO: 25468 - protein, 535 aa, synthetic construct
MRVSVNLNAQKPDTTTNAVIYARYSSHGQTEQSIEGQLAKGHEYAAAQGYTVVHEYIDRAMTGRNDNREAFQKMLSDTGKHQFQVVIVWKVDRFGRNREEIAFNKHTCKKNGVRVEYVAESLPNSPEAVILESVLEGMAEYYSIQLSQNIRRGQLESAKKCQCVGGSVPLGYTLDSDKHFVIDPQTAPVVKKIFDLYAEGATISEITGQLNEQGIRTARKQLFTKNSLTKLLKNEKYIGVYTYKDIVRVEGGVPAIVDESTFDRVQELLKINRRAPSHTWTKVEYLLTDKLFCGHCGSPMVGESGFSHTGAKYSYYGCIKRRREKACDKKPVRQDWIEALVLDETVKLLHDDELMEYIIDRTWEYYQVTDKVQEEKAVLEAQLAEVDKAINNLVRAIEAGIFNAATKSRMDELDAQKAALTASLADLELTSGIRITRDHIEYFLLRLRDLDVKDRECQKRLVQTFVNAVFIYDDGRVKITYNYSGQSSTITLNQIASAEKGKGFVCCLPCSTSQEKSEPDSGWKRVRISLFRQEG

SEQ ID NO: 25469 - protein, 567 aa, synthetic construct
MEVARVARKKVTESEGNAVAYARYATRKQVELPQEDAAIYARYSSHMQNDASIEQQVEECREYARTHNLRIVEVYADRALSGRNDKRPEFQKMLRHAEAGKFRVVLSYKSNRIARNMLHALSYEDKLAQMGVRVVYAKEEFGDNAAGRFALRTMMNVNQFYSENMAEDIKRGLMDAAMQCKVVSMIPLGYRKGADGKYEIDENEAAIVREIFQRVAAGESYAAIADDLNARKISTKHGKTWGKNSFRVLLSNERYIGVYLYGDLRIENGMPVIIEKELFNTVQHIVAKKPTKVNGRRRDNGDYLLTGKLFCGYCESPMVGVSGTSKTGILHHYYACQKQRLEKACHKKIVRRDWAERMVTEALMAYVLNDESIEWIADMVMSFKKKFIEEDSQIDYLEERLSESMKASENIMKAIEAGIFNNKTQERMLELEAEQRDLNSQLTAERALIPNVNREQIVYWLQSLRNGNAESRTFQAKLFDIFLLRVYLYDDHVKFIFNWDKENSGVEIPMEATSDDDPGACDDASCVRIESPRLHFFTAIPKRGRGTFFVLGQIGCESTTNFNCFVL

SEQ ID NO: 25470 - protein, 438 aa, synthetic construct
MSTDQEEQLLSYENQVNYYTNYISENPLYEYAGTYADEGISGTNTKKRDEFNRMIADCRAGKIDMIITKSISRFARNTLDCLNYVRELKDLGIGIIFEKENINTLDAKGEVLLTILSSLAQDESRSISENCTWGIRRRFETGKHKMSTKRFLGYDTDETGKLVINRTQEPIVIRLYQEFLDGKTTDYIKRIFEREGVKNWDGGTKWQSTTLMSMLENEKYKGDALLQKSYTVDFLTKKRTQNKGEIQMFYVEDDHDAIISKRIWECVQLEIKRRKKYLEEHGTNAYSHRPESNPFASKIICGDCNKVFARKGWRSSTGVDRKVWQCSERYKVKGVMGCVNRHVEEETLIKAYLMAWNALVENREDFMEQWTEQLQSENLLEGYRAEKFIEYTDGAEPLTEMDTDFMLKTLDHIKVFEDGTLLVVFLDGTEIECKNEEE

SEQ ID NO: 25471 - protein, 460 aa, synthetic construct
MKRKLNNDKTILRVAIYVRVSTEQQAEDGDSIRDQLNSCETYIKAHENMILAGEYIDGGISGQKTKREDFQKLLSDVRANLIDLIIFTRLDRWFRSLRHYLNTQEVLDKHNVSWTAIRQPFFDTSTAQGRTFVNTSMAFAELEAQNASERIKGVFKDKVSHSEAISGRTPIGYSIVDKHLVPNEDAPIVVSIFKHYQAHGSMGETLRYMQDAFGIVRSRSSLKRMLQNKKYIGIFRDNENYCEPIITKELFYDVQRLLKLNIKTCKNRHDYIFSGLIRCVDCGYVMSAASNHNHYVRKSGEEVDHFYPVYRCHANRLHRCVNNKVFFESSIEKELLKRVRPELEQYICDYKLETAPVVQNKARIHKLQTKLSKLKELYLNELITLEEFRTDKADFEHQIEELQKEEQKPVKDLSSLEEFLKLDFENIYSSFTAPERRRVWRSIIKEIQVDHHKNINIVFL

SEQ ID NO: 25472 - protein, 528 aa, synthetic construct
MQETNISINEIIMYLRKSRSDDPYMTVEEVLARHERQLQEYALSSFGSIIPEERIFREVVSGETIADRPVMQSVMKYLESGQIKGVLVIEPQRLSRGDLEDCGRIINAFRYTNTLVLTPPKTYDLSDEYDRKFFEMELTRGNDYLEYTKKILNRGRLASVKQGNYIGSIAPYGYRKIKTGSGKDTAHTLEIVPEQADAVRMMAQLYLAGNGFTRIAAHLDSLGIKPLKSDHWSPAAISDILSNPVYIGMIRWNHFKTIKTMQNGQIVKSRPTNHDTDYILVPGKHPAILDQGTFDAIAQRRGKSPKIKRGHELRNPFAGLVYCGTAGCRRSMTFKQFTNYRSKVPRRSESMICPNQRICHTKSVQYSAFVERVKEILSKTVDDFEIKLQNDDGNIVRIHENIIRNLEQDLLKLKDKDLRQKDAYEDGIYTKEEYASRNAKLQEQICEVQLSIQRAKDTMPPEVDYQERVSRFSDCLSKFEDTDISASEMNLLLKSCIEKIIYHNSSESKPGIGRFVANPFELDIYLRL

SEQ ID NO: 25473 - protein, 544 aa, synthetic construct
MRVSVNLNAQKPDTTTNAVIYARYSSHGQTEQSIEGQLAKGHEYAAAQGYTVVHEYIDRAMTGRNDNREAFQKMLSDTGKHQFQVVIVWKVDRFGRNREEIAFNKHTCKKNGVRVEYVAESLPNSPEAVILESVLEGMAEYYSIQLSQNIRRGQLESAKKCQCVGGSVPLGYTLDSDKHFVIDPQTAPVVKKIFDLYAEGATISEITGQLNEQGIRTARKQLFTKNSLTKLLKNEKYIGVYTYKDIVRVEGGVPAIVDESTFDRVQELLKINRRAPSHTWTKVEYLLTDKLFCGHCGSPMVGESGFSHTGAKYSYYGCIKRRREKACDKKPVRQDWIEALVLDETVKLLHDDELMEYIIDRTWEYYQVTDKVQEEKAVLEAQLAEVDKAINNLVRAIEAGIFNAATKSRMDELDAQKAALTASLADLELTSGIRITRDHIEYFLLRLRDLDVKDRECQKRLVQTFVNAVFIYDDGRVKITYNYSGQSSTITLNQIASAEKGKGFVCCLPCSTSSPRFPRGVAALFLFLGKNGCESTTNFSCIVQ

SEQ ID NO: 25474 - protein, 446 aa, synthetic construct
MQREIIKIKPDFYALPVIKKVAAYVRVSSGKDAMLHSLSAQISYYSEFIQKNPQWEYVGVYVDEAKTGTKDNRQEFQRLISDCKQGKIDMIITKSISRFARNTLTVLETVRELKNLGIDVYFENENIHSLSEDGELMLTLLSSFTQEESLSVSENCKWRIRDKFKCGVPFNSKTLGYIYENGNFEVESSEAKIVKMIFEDYLNGMGMLMIARKLEKMKIKPRHSTKWNKNSVRTILQNEKYMGDLILQKTFIKDHISKKHCINKGELPKYYVEKSHTPIIDKDTFLRVQDEIAKRAKKYSKGNNLNTYAFTSKIKCNLCGKSYNRKISASGTKYEKPVWICSTFNTYGKKYCPSSQIPEEILETISAEVLGISHFDKNVFEEKIKQIIVPNKGELRFIFKDGSQVTKTWNYPSRSASWTPEMKQLARENKINSIERSKNFESSCKL

SEQ ID NO: 25475 - protein, 531 aa, synthetic construct
MNQAVNYNTNVSRKITVIPATLDLFTNTPKVIWRRRRVAAYARVSTDSEEQILSYEAQVDYYTRYIKSKDDWEFIEVYTDEGISATNTKKRDGFNRMVKDALAGKIDLIVTKSVSRFARNTVDTLTTVRKLKEKGVEVYFEKENIYTLDSKGELLITIMSSLAQEESRSISENVTWGQRKRFADGKVSLPYKQFLGYEKGEDGFPKIVEKEARIVRLIYRLFLEGKTVSAISTYLTNEKIPTPAGKEKWTTSTVKSILTNEKYKGDALLQKCYTIDFLTKKKKKNNGEIPQYYVKNSHEAIISPEIYDLVQDEMKKRKLSKRGHSSISPFSSKIVCGECGGFYGSKVWHSNSKYKKVIWQCNKKFKNKEKCKTPHLSEEQIKENFIKAFNNLIENKESIIKDCEEVILSIIDTKAIDNEIIKLEEECKVIVELMKSLIYDNSRKPMNQDEYNKKYNSYTEKYEKIKSELSKLEDKKQDLKVRMDKIRIFIDNLKNHSKVISEFDERLWYVLVDKIVVYEDGKVEFKFRNSN

SEQ ID NO: 25476 - protein, 593 aa, synthetic construct
MKQKLVAAIYARKSVILKKGDTLNIQEDKCRENLKLRYKYDYDLTIKCFTDEKTGKDMDREEMQSMIEQIKEGKVQVVCAYKLDRFGRNAIELVNFIELLKKYNVKLHCVDDQINYDPTDDNDVMTKLMIVLLSVLAEMERNNIRQRVIVTVYSLARKGFWLGGTAPYGFVSVRVPNEGIIDDVGAKSICILNPYAEEIQVVKYMYATYKDEDVSYSELANRCNDLGYEPRFASMFDQHTIQGMLMNLVYVKAAPQIYDWLISKGYSVENIPARDKFDGKHALLTYGKTLRGEEADNNIEAENKNRKDVKDWIVAIAPHEGVIEANDWLVVQNKIERNKGSKSKKNTKHNNVLITSDMFRCGCCGGVISSFNRKSRTDDNVLYPHYRCENKRKRRGKLCDVDNLPATDVDEKIIDLIFEKRDEIASSVEYIKRNLMPARKEYVKKNIIPKLEKEIKVQLKKIDGFLENMSSGKLNDNVLEMVNNKIEECNVKIKELEERIVEEDNKMLSMDKNHQNLDLLIDKFFSLDKTDFMKLPMKDKRNLVRLLIKEVVWDGENVHVYFKTPDSVCGGDTTDSLSINTALTNVDMVKQHF

SEQ ID NO: 25477 - protein, 468 aa, synthetic construct
MARQVVHIPAQRNIANRAVAHNTKLRVAAYCRVSTEQDEQLNSFENQVTYYTEFITRNPNYELAGIYADEGISGTSTKRREQFNRMIADCEAGKIDLIITKSISRFARNTQDCLNYSRKLKDLGIGITFEKENISTMDSTGELLFTILSSLAQDESRSISENCQWGIRSLFKQGVVHINTNRFYGYDKDEDGRLVINPEQAKVVRWIYESYMDGINPDIIARRLMEQSVPGCMGEPKWTVDTIMGILQNEKHMGDAILQKTFTADYLTKKQVKNEGQLAQYHVKDDHEAIVSKELWEVVQLEIQRRKDYMKRYGLRTMGRNTDEQPFTNRVFCGVCGQLFWRRTLYRLNGSIKAWMCASKCKGKEVKGCINDTFLEADLHKAFVMAWNAMLENREDFLEHWKAQLNDQNPLVVFRAKQFMKLTEKAKPMKELDVTIVSKTLDHCDIKPMGVIDFYFLDGSHIGLVTGE

SEQ ID NO: 25478 - protein, 412 aa, synthetic construct
MRIKVIKPTVAAENKRLKVCAYVRVSTDSLEQEDSLDNQTAYFKDYIQSNPAWEFVGIYADQGISGFKENRPQFQKMIADARAGKIDLIVVKSVSRFARNTETVLKFSRELKSIGVGIFFELQNINTLSGPGELMLTIIAAFAQAESQGASDNANLTYKRKFEAGMPVHDLKYTFGFDTDEGGNTYIVEEQAKTVRLIFDLAHKGVWPSKIKQYLNKNGITSCAGGKWDDTGVHRVLRNPAYKGALVLQKTYLDSNRIRHKNEGQKDQWYIADNHPAIVPPEQWDEVQEILLARSESLAPRPPQKPSQPRSSRTQYPLTNKLFCPLCGQKLHHKWSNQGKSEYWACSTNVKVGASACKGIWLPAEIANSWGDITEPTTVVGYKDEYGMQHFTAYPKAEYELSDDCPYTRKEE

SEQ ID NO: 25479 - protein, 464 aa, synthetic construct
MARSVTVIPARNQKVRTGHKAVQEKKIRVAAYCRVSTDQEDQLHSFEAQVEYYTKYINEHENYEMAGIYADEGISGTNTKKREQFKKIIADCEGGKIDLVITKSISRFARNTQDCLAYSRKLKNLGIGIIFEKENINTLDSTGELLFTILSSLAQDESRNISENCKWGIRTKFKNGEMHLNTFKFLGYDKDENGKLVINKEQAKTVRRIYRDFLIGINPAQIAKELTEEKVPGCLGQTKWYPSTVTGILKQEKHMGDALLQKTYTADFLTKRQVRNNGEIAQVYVKDSHKGIIDKQTWNAVQEEFDRREKFMELHGTDRYSYGADCMPFCEKVFCGECKSLFTRHSWRSRGIVQWQCKNHRKDGKVACTNAYVDNADLEKGFVKAFNRLVTDRDKHMERWQQMKSDGTPLEKIRAGQMMEAVENEPLTRFVPEIAQLVLCEVTVLGAKKYEFFFLEGSRVKVSV

SEQ ID NO: 25480 - protein, 526 aa, synthetic construct
MGKKQKTNGGDAVIYARYSSHNQRDVSIEQQVEACRKHAAELGLTVTATYEDRAISGKTDKRPSFQRMMRDAEQHKFAYVLAWKSNRIGRNMMQALVNESRLVDCGVKVFYAEEDFDDNAAGRFALRSMMNVNQFYIENMAEDVKRGLYDNAKKGLVNGSLPLGYKRGADGKPEIDEPKAAIVREIYTRVAAGELFASIADDLNARGIKTARGREWNKGSFHVLCHNDRYRGIYMYGDIRIPGGMPRIISDELFYDAQEAYGMKKDNRYGRARHGAENYLLTGKLYCGHCGGYMVGISGTSKTGEMHYYYACQKHRLEHTCEKKAIRRDVIENAVARAIMMYCLDDETIDFIVDSTIAYFKQKDHELHIEAMENELAAVQQAISNLMKAIEAGIITPTTRTRLLDLEEQQSKLSAKINTAKAERVEINRDDLIAGLQLFRTGDIKNKKFLAKLFNTFLIAVYLYDDNRLKIVFSFTGNHNSVEIPLELDNDCPDSEIVSDETEVRMSHLECRRRGSNPYSVSRKGF

SEQ ID NO: 25481 - protein, 514 aa, synthetic construct
MRNEYNPIIIKYVAEYLRKSRGETTEDLIKHKTILEELCKSRGWVYVVYEEVETGESLFARPVMQQLLRDVEDNIYDAVVCVDLDRLGRGDLVDWGQIKRVFQKTNTYMVTPSSLYNLNDDNEEFAVDLQTLFARREYKKITHRLSMGKKVGAKLGAWTNGTPPMPYEYQEWIDPATNKRYYNEKGLVVNLQKLSIYRFMVDSFIKDKKSTNEIAWELNRRNIPSPRGGRWCNMTVRRLLVDETHLGKIISNKTKGDGHKNKSPNKQPFQKIPKEQWTVVENRHEAIKTQDEHEKILIGIQKNLKSPYRRSDHYYPLKGLIKCGLCGYGLPLEYKRGKDLIVKKCWHKDYLGNKCPNSSGKAQYIIDAIDEQLKEYEEQIRKEIESCEDQSTDLIQLQIKTIMDKLNKKDIALKRARIAYDEGVDTLDEYRSAKERILKEVDELESQLSIENLKLQKAQSVTNHEKLHYIEEFRRSRWEDELDDKELNDLYKTIISSIIWTKQGDNIDIKVNFL

SEQ ID NO: 25482 - protein, 483 aa, synthetic construct
MRKKRVFLYVRVSTVEQAEEGYSLGEQEERLIKYCEAMGWEVIKVYIDPGYSGGNMERPALKEMISEIENGNADIVLVDKLDRLSRSQFDTLYMIQKIFIPNECAFVSRAEAFDTSTPFGRAMIGILAVFAELERERIRERMKEGKAGRAKEGKYRGGAYYPTGYDYNEETGFLEINEYDAMQVKEVFRLFNQRTPIYTIMNIMNDQGYTTSIGKGKGKGKWNETRIRKMLENQTYIGKLKYLDEWVDGGQPPIIDMKTWERTQEILAEREKANEHKKVGRRYKAPLGGLPWCACCGSRYHYRQGGKNKDGTARAYYICYSREKSNKEMIKDPNCRNKTYRDRDLEKIVFGEVFKLKTEPEYIDQIHKSVDESEKARLIDKQLGDIKKQISNLMDLYSLGTISINDIKEKIEPLNEKRTALEETLEKLKTNTYRKDKQEVFNMVDELKTAIDEKDSYTVNIMLNELIEKIIIDNEDIVIHWNF

SEQ ID NO: 25483 - protein, 485 aa, synthetic construct
MPTSDLKIAAAYIRVSTDDQEEYSPDSQVRLIREYARKNGYLLPEEYVFQDDGISAATARKRPAFNRMIALAKEKERPFDAILVLMFSRFARNREESVLYKGLLRKQGISVISVKEPAVDGPFGTLIESIIEWFDEYYLINLSAEVKRGMSEKFLRGEAMGTAPFGYRIDSANKTFTVDPERAEIVCDVFRSYADGAGLRDIAVQLGDAGITTRRGNRPDSRFVEYMLRNPVYIGKIRWTPGHKTRYSRVHIADGAEVVDGKHPPIVSMDLWEAVQRRMDQRKAAYGRYQRQAPAAWMMRGLVRCSACGATLIMAGRSSSCPFLQCHSYAKGACHTSHSLSLRRANAAVLAGLRRSVGTLTFHMIPHLTSAPSRTADYGRLLEQERRRLARCKDAYQAGVDTLEEYRDNKARLEERIRRIEEQAASAAAAPESLDKAAYGKKAADILRFLETSADEGAKNEVLRSVVDHITYEKASRHLAIYFYT

SEQ ID NO: 25484 - protein, 573 aa, synthetic construct
MAYNAQNKTGARVAIYVRVSTLHQIDRDSLPMQKQDLLAYAKLMLNTDDCVIFEDAGYSGKNTDRPKFQEMMSQMRAGAFTHLLVWKIDRISRNLLDFATMYNELKALGVTFVSKNEQFDTSTAMGEAMLKIILVFAELERNMTSERVTATMISRANNGLWNGGRIPFGYDYDYETHEFSVNEEESKVVILMHDMYEQERSLVRVVRELNERGYRSRAGNLWSPVSLLIILRNVFYCGDYRYNMLKEGDRQKVKDESEWVTVENHHVAIIPKDQKERIMATLDSNSKLCKQRNIYKSSKHTHVFGGLIYCGSCGKPLGSTPGNLTRDGWHYSKYTCPTRRKSVTLCTGKSTSDPIIGEFVFNYILNMLNAQNDFEKISSPEELEKLLLIGDTFAYIDHIEPNGLNDLFNVLSSGAAKGAVFGKGASLPTKKATVEPEVARLRNEKQKTERALDRLRSLYLYADEAMSEAEYMIQKNKLEETLEDINDQIGMMNTDSWQQSVSDEEFIQRASEFIIAQKLSGRKYVNYKRLAMSVDSEVLKNFVVSIIDSITIQDGLVSNIVFKNGLCHTFIFR

SEQ ID NO: 25485 - protein, 541 aa, synthetic construct
MTDEKPHVIIIPPKPELQQTTTVTKQLRVAAYCRVSTKEEEQASSYEAQCEYYTDKIMSNKEWTMAGIFADEGITGTSTKKRTEFLRMIRQCKQKKIDLILTKSIQRFARNTLDCINYTRILRQLGIGVLFEKENINSLPPDSEFMITMYGAMAQSESESISGNIRRGRQMHAKVGTLKVPCYRLYGYEKDTEGKFRVIPEQAEIVRELYKRYESGASLRNLQDWLEENQIKTVLGESKWTATSIKSILTNEKYCGDVLLQKTFRTDVISKKIIKNVGQMTQYYMPDHHEAIVSREQYNAVKAEMARRSALRSPSKTAVTGRSCYTSKYALSDRLVCGECGTLYRRCTWTSRGRKYPVWRCTSRLNYGTKYCHDSPTIKEEPLQNAILSAINAAMSDKPVLLDRIKNAVSLELLPVQGQTMSLADIERRLAQLDEQFQQLLTEAIDAEDKEACNAQFAEILAEQTSLKKQKETILQSSMDTDRVCARMKQAEQAIENTTQTITEWNENAVRQIVERVTVLSTDEILVQIKGGAEIKQTINK

SEQ ID NO: 25486 - protein, 533 aa, synthetic construct
MAKKQTSGNLALEQQRVIVIPAHDEIVARKLRVAAYARVSSSSEDQLNSYRVQNQYYSELISGNPDWEMVDIYADEGITGTSVEKREDFQRMMQDCRKGKIDRILVKSISRFARNTKDCLAAVRELKELGVSVQFEEQGIDTSEVSSEMVTAIMASLAQKQSESISGNVKWGVQKRIQDKTFVTCKEPYGYRLVDRRLCIVESEAIIVRMIYEKYLAGISMEFIRDQLNVANIPFRENEKQHRWTRKAISYILANEKYIGDSLWQKTYSGDTFPYKQRKNKGEKEQYYVENTHQAIVEKSVWHAVAELRMQRAGEKHPEDYYAPSAFRKKVLCGCCSSMFRLRQNRGCTYWSCRQHDIDRNSCPNSQIPETVMQEAFCRLYYKLKHHGSPIFTQMLSNLQKIRYSRMLWSEDVISINKKISDTLSQVQFLTQLQQAGGVDPDTFISSNNKLSEQLRRLKQEKARLLDTDSDDLADRTRDLMDALEDGPDFLDSFDAELFDALVEKIIVDSNERLRFRLKNGLELTEQIERTRR

SEQ ID NO: 25487 - protein, 504 aa, synthetic construct
MQKTDKLPVKAVIYARYSSDRQREESIEGQLRVCEDYARRNNITIVHTYADRAMTGRSDQRPEFQMMIRDAATMSFDIVLVYKLNRFARNRYDSARYKHKLKQYGVRVVSAMENIADDPSGILLESLIEGMAEYYSAELAENVTRGMTENALEGKWAGGIVPLGYKLDEKHHLVIDEPKAAIVRQIYQLALEGHNQKYIIDELNKHHYTNSAGRPFSYNTLRVILKNERYTGTFIWRDIRKENAIPVIIDKMTFEAVQKHMQFRKKNHIRSCSKDFPLTGKLFCGRCSSKMVGVSGTSKQGVLYYYYACTSHLKKKCPSKNIRQDALENLICKITTQILSKPEAIKAIAKQAMKMQKDKKESLEIQSLQNQIADINKKLKNCIQAVENGLISETMTNHIKNYENRLQGLKDEVSRQKLLEGSIHLTEQHIEFFFYSISQKLKTADKYKSILLSSLVRCVIVHENYIEIQFNYKNELPILQNPVTVESSYLNQMVTQGGFEPTTY

SEQ ID NO: 25488 - protein, 582 aa, synthetic construct
MDIHTIRMELRTKSIYDLPLRVTYYARVSSESDEQLNSLGNQVSYYEDLIRRNLPWTFVPGYIDEGLSGISTKKRENFNRMIEDAAEGQFDLIITKEISRFARNTLDSIQYTRQLLSYGVGVFFQNDNINTFDEDAELRLSIMSSIAQDELRKLSSRVKFGHQQAIKSSVVLGNSRIFGYTKADGKLVIDETEAPMVRELFELYATGEYSMKQLETLFWDKGYRNHNGKKIAHTTMSNIISNPKYKGYYVGNKVKVVDMFTKKQKFLPPEEWVMFKDETGEIVPAIVSEEIWDAANAVLKKRSEDVKARQGVCNHANLLTGKLWCTECGQPYYRRESEDKRGRKNSKWLCSGKIKNGADSCKSFAIYESEIKPLLFEVFRDTSADADAMVEEYIRMYNELTQHGSLRKKIEQQKNIIDLANRKKNKLLLLAADDSITNADFKKMTADCNREIEEAEKEIAELEQTAAEGDAFKQKIDEIRRVLTNAQRDAAQGIITKEFIDKYISKIFVTPKDDTTMLLQVKIFTGETTEKYLRKLESRTGHITRDLTEQAEKPDAARVSSPDDSMGHTSKKMIESYERNMK

SEQ ID NO: 25489 - protein, 552 aa, synthetic construct
MPRKPAKHPAKPKRGKKLEIEEPGVLYGRYSSHNQKDISVEQQFEKGYELAAEYGIRIIDTYADRAVSGRTDKRRDFQRMMTDAAKGKFRYVIAWKSNRMGRNMLEALINEARLQDLGVRVLYVEEDFDDTAAGRFAARSMMNVNQFYSENMAEDIKRGLYDNAANCMVANGHLPYGYKADETLHYAIDEPKAAVIREIFTRVSCGEAFVDIMASLNVRGIKTSYGRPWGRSSFQKILSNERYRGIYIYGDVRKEGGIPRIISDELYFKVQEVITTKKNPQGRHRVNGDYLLTGKLFCGHCKSPMTGVSGTGRSGNLHYYYVCQKRRTEKTCDKKNVRRDEIELQVAQAIKDYALKDDVIEWIADSTVAYNERKEAESKVGILEDQLAGTEHGIKNIMSAIEQGIITETTKSRLVELESERATIKANIAAARADIVTVSRDDIISGLEMFRDGDVHDKKYQARLFDTFLVAVYAYDDDLRLVFSFSGNKNTIQIPIESAVNAVENNEAECSFKLCSAPPEKSTCVSKCFFQRNPPFRVGEIPLRGVIYACGV

SEQ ID NO: 25490 - protein, 503 aa, synthetic construct
MLRAALYARFSSENQREESILAQFRDSTEYCKKHNYAIVAKYADEAKSGTTTIGREQYKLMLKDAQKGKFDVVVFHKIDRNARNELDYYITKHKLEEAGVKYAYSRQDIDSTSPEGQMMESMLVGMAAYYSRNLSNEIKKGLRENAIQGKCTGGRPPYGFSIDANKKLIINENEAPAVRMIFDWYSAGVHYGVIRKRLFNAGYRNRAGKEFTIASIYEILRNRKYVGDLYLGKTLSRKGKRNTHQTSANVQYFENVIPAIVSRDIFEEVQVKLDQNKRRSGAGNAKAIYALSGLIHCGQCGSAMVAHSTKNSRGIKNYYYRCPKGRLIGEEKCPQKFINRDDIESAVYRLIRKLFTAPDAHDQIKRIIAKNNMGVKVPDYTDQVKRLKKQESDASKRLDKLYDLYMTDNEDEFTLQKMTQLKEEILKLRAQIKEAEDRQAIAQSTTFDIDKIIDTFQKQLKQKQSPEFIKTLFELAVKNITVYPDKIKVALLVTQERFELPTP

SEQ ID NO: 25491 - protein, 500 aa, synthetic construct
MRMCGYARVSTDEERQLDSLEHQMEFFSDFAKQNGHHLVNVYTDEGITGRQLKKRDAFNKMLSDSKLGLFDLLVVKDVSRFARNTVDLLTSIRQLKSRGIDVIFVNNSQKVLGESEFVITLLGAVAQEESSNLSKRVKFGKNITSKKGRVPPRIFGYDRIDNFTMEINEREAEVVREIYHLYIDEGLGCRLIAITLGEKQMKTKYGNDWNQRNIRRILENPIYSGHYINHRYTVVDFLEGTTKALPKEQHYHHDRPEWAIITPERFQQAQEILEQRRKQYATEYTHFTGRYSNRHLFSTLIRCKECGRAFSRRVTHYPNSDYIYWRCPTNNQYTAKRCSNNTIVREDDLIETLSTYLREVVSNKESIAQEIARKFKEANAVEGSKPDAQALEAKKVKLKAKLEKYMEMYANDIITMEALKSKTAEINESINVIDDQLILLEGQRTQERTIESITNEAMTEIERFLSLQSATNMDLRRIIDSIIVDDKKKVKINLKITGNL

SEQ ID NO: 25492 - protein, 489 aa, synthetic construct
MRVVLYMRYSSDRQTEQSIEGQNRVCTAFCEQQGYEIVDRYIDRATSAFKDTDKRTEFQRMIRDSEKQLWEGIVVYKLDRFARNRYDSATYKARLKKNGVRVISATENISDNPEGVILEAVLEGMAEFYSKELSQKITRGMFESANKCHNIGGHVPLGYKIENKKLVIDEAGAAIVREAFDLYANGATVAEICETFNTKGYRTAKNAEFNKNSFRSMFKNERYIGIYKYKDLRIEGGVPAIVDKDTFAIVQKKLSKNAEAPSRGKAKIDYLLSQKLFCGHCGSLMTGESGTGKGGTTYFYYTCGKRKREHTCDKKPLKKDFIERAVVEDALTLLTPETIDELADIAVKESIREMEENSIIPALKDQLHDTERSINNLVKMVEKGVESDTIADRLRELEKEKRAIEKRLVVAQDDYVILEKDHIVWWLSEFCNGDIEDEEFRRHIIDLLVNSVMVWDEPDGWYKITSVYNLTSNKTKTFRCSDLSGQAPP

SEQ ID NO: 25493 - protein, 438 aa, synthetic construct
MARTIQQISFPAPMRPSLKRVAAYARVSSGKDAMLHSLSAQVSYYSALIQKHAGWLYCGVYADEAFTGTKDSRDGFQDLLAECRAGNIDMVITKSISRFARNTVTLLETVRELKALGVDVYFEEQNIHTMSADGELMMTILASYAQEESRSASENQKWRIRRGFERGELVNLRFLFGYKIEKGRVAVDPEKAAVVREVFRRALEGASLTSLAIDLNRRGFTGVLGGKWNAMRIREMLSNEKYLGNALMQKQYRNNHLEKKEIPNRGELPQYYAEGTHKAIIDQSTFDAAQRLLVKLRESTPVRSPWKKSAFTSMITCTVCGRKYKRCTCGKRHFWNCPTAVRTDLPSCGTSQIPEKLLYDLAAQVLGLTQFDEPVFREKIQSIDALPDKTLVFHFYDGSTVARHWEYTSRAKSWTPEMKEKARQRALAQRRGEKWQEP

SEQ ID NO: 25494 - protein, 684 aa, synthetic construct
MSILQTIKTIIRVVLYLRLSDEDKNKLSKEELSQSIKNQEIMLRDYAEEQGWEVVGVYNDDDWSGSDATRPDFNRMIEECKNGNVDIVLCKTQARFARDMELVEKYVHNLFHEWNVRFITVVDRIDNARKETKKTSQILGLTDQWYLEDTSLNIRETLKSKRKDGQLTSSFATYGYMKDPENKNHLIIDPISAEVIKRIYDEYLSGTGLDKIARRLNEDKILSPYEYKLLNGSKLKIPVIKDYVNYGYIEKTGTYMLDVSFTNKEEYILKDLVSFNYITTDMKNFNNKCDIVLKKYTNNRTKIYYSENDNIDINNFNVDDCILLNENDVIPKTAKVIISYTKELDRTHTINYQFEITLKENREHEDYYINICGKATDEIKKSDFIHNIRKKFKWSSSTIRTLLTDEVYIGNMVQFKSTTVSYKNHTVVWNDDETRIRKDNTHEPIIAKDIWYTVQERLENIARSCKGGTVHPLCNKVYCSNCNQIFTKTGNRRSDGTGYLCCKDKKTNWSNCDNKASIREDQLHQFILEKMNEMLKKFYEEDDLKEMQNEVIEQDLYKDKLNSLEKELQSINKELQGKSTYFQKLYEDRTNGILPEKEFLILMNKYKDDNEKLEERQKIVKKEISSTLAKKETVKTKKNIFKKYRHIEELSIEIVEDFIDKILIGNYDETTNSRDIKIIWNFTI

SEQ ID NO: 25495 - protein, 548 aa, synthetic construct
MKFKYPAMGTTKNAVIYARYSSHSQREESIEGQLRICHEYAKAEGLAIVGEYIDRAISGTTDARPDFQRMIDDAKKKQFSYVIVYRLDRFARNRYDSVLYKHELKQCGVKVVSATEGIGTGDESILLEALIEASAEYYSMELSRKIKRGRQDSAMKGNFLGGAVPLGYKVVDSKFIIDDETAPIVRYIFERYAAGIGKKQIIDELTAKGYMRRTGKPFTYRAFDSVLRNRKYTGEFTQTGITVEGGCPAIVDTEMFEKVQARLEINRRAPAKAKAKTEYLLSGKMFCGYCGEPMIGISGTGRHEKTFYYYSCVGRRGKSGCKKQHEKKDFIEWYVCEQTVQYMQDPERLSHVAKRIIEINDAEFDGGKVKELERAVENCDNDIRKLVDALTTIPDAGRAALYDKIERIGAAKADMEIDLAKVRVLSEVRYKQEDVEAWIRSMCRGDLMDFEFRRQLIDVFINSVYLFDDRVVIVYNIKNGKQVSAIDVLNAVEELDGVELSSDSTEDGNAGGSGSVLVADAPPYMKNPNLFPIGNGFGFLIFIKDIID

SEQ ID NO: 25496 - protein, 516 aa, synthetic construct
MSYCIYLRKSRKDLEAEQHGEGETLARHERALLSLAKKNNLIISNIYREVVSGETIAARPVMQQLLREVEQNLWDGVLVMEVERLARGDTIDQGVVQRAFQYSNTLIITPSKTYDPANEFDEEYFEFGLFMSRREYKTIKRRMQNGRYAAISEGKWPYNSAPYGFRRVKLEKEKGWTLAFDENEAPVVRLIFSMFTGPERVGIRSITRTLNSYGTKPRNSKLWSESTVRGILSNVVYDQCVKIGERKVVRTVENGVLTTTRPRTSDYTIVSGRHPRLIDHDVFAEAQSYLGCGSPKPSGSSIIKNPLAGIIVCSECKKKMIRRPPSGTASRVPYDLMLCSTYDCPTIGSPLDLVEREVYNALSDWVEGYRLSGQMPSKSLIPEKEVLLESAQQTLDQLLRQKGTMYDLLEQGVYSTEVFLERSDSLQNRISEAESNVAQLKLELDKERQREANIEQFLPACEDLLSCYWDLSIPERNRLLKLLIESIEYKKLTKNKRGHLNEPNFELTIKPRIPRK

SEQ ID NO: 25497 - protein, 500 aa, synthetic construct
MNTVIYARYSAGPRQTDQSIEGQLRVCTDFCKQRGLTVIDTYCDRHISGRTDERPEFQRLIADAKRKKFEAVVVYKTDRFARNKYDSAVYKRELKRNGIQIFYAAEAIPDGPEGIILESLMEGLAEYYSAELAQKIKRGMHESALKCQSTGSGRPLGYRVDEQKHFQTDPESAQTVQTIFEQYIKGESNAAICELLNSRGLRTAQGKPFNKNSINRIIKNRKYIGEYRYHDIVVEGGMPAIISKDTFNLAQAEMERRRTRKAPKSPKAEYLLAGRLFCGHCKGPMQGVSGTGKSGNKWYYYYCGNTRGKNKTCDKKQVSRDRLERAVVDFTVRYILQEEVLEELARKVHAAQERQNDTASEIAFYEKKLADNKKSIANVLRAIESGAATQTLPARLQELENEQAVILGEISFLKGKRLAFTEDQILFALMKHLEPYPGESEQDYRRRIISDFVSEVYLYDDRLLIYFNISSENGKLKSADLSNIEGGEFDEGLVRSTKTI

SEQ ID NO: 25498 - protein, 547 aa, synthetic construct
MARKKNIAAGLDAVIYARYSSHNQREVSIEQQIAECTKHAAALGLRIVGTYEDRAISGKTDNRPRFQQMMRDAEKGKFQAVVAWKSNRIGRNMLQAMVNEAKLDDYGVKVFYAEEDFDDTAAGRFALRNMMNVNQFYSENMAEDITRGLYDNASKCMANGRQPLGYKRGEDGRVVLDEANAAVVREIFTRVAAGDLFVDIARDLNAQGIKTSKGANWNKGSFQSICQNERYRGIYIYGDVRVADGIPRIVSDDLWYRVQEAMRMKKNPVGTRHRVGAEDYLLTGKLRCGHCGSYMTGVSGTSRNGELHYYYTCQKRRTEHACDKKNIRRDVIEPAVAQAIKMYCLTDDVIAWIADRTVEYWEKHDNDLQIEALEQQLEENKKATSNMLKAIEMGIITEATRTRMVELETEQSRLSVQLNAAKEDVVKIDREQIISYLELLQQGDIHDRDFQMELFKNFLVAVYVYDDNRMKLVFSCMGDQNCVEIPLETGEDPPDGGLSPDAKMFVLTPDSSTQKALYFVGSAVLFFLHLRTLTMQSVWPYRRSNPR

SEQ ID NO: 25499 - protein, 410 aa, synthetic construct
MTDRNVTVIPATKAPIHRLAGSSAKKRRVAGYARVSTEKDEQYTSYEAQVDYYTQFIQSHAGWEFVKVYTDEEISGLGTRKRDGFNEMIDDAMSGVIDLIITKSVSRFARNTVDSLVTIRKLKEKGVEVYFEKENIYSLDGKGELLLTIMSSLAQEESRSISENVIWGQRKRFSDGKVSLPYKQFLGYERGENKNDPPVVNPKQAVIVRRIYRTFMEGKTAGAIAKELTAEGIPTPAGKTKWRASTINSILQNEKYRGSALLQKCFTTDFLTKKQKVNEGEVPQYYIEHSHEAIIDPLEWDAVQDEIRRRKEIGRAYSGTSVFSAKLICGDCGGWYGHKTWHSTDKYRSTIWRCNQKYSDGKCKCGTPAVTDEEIKDSFISVFNRINFFKKALYQSLQNSKTGTHGYDLY

SEQ ID NO: 25500 - protein, 521 aa, synthetic construct
MKKITKIDGVQKNTAINSKLRVAAYCRVSTGSDAQLESLEAQKSHYEQYINSREDWQFAGLYFDEGITGTKAEKRPELLRLVTDCEARRIDFVITKSISRFSRNTTDCLALVRKLQSLEIPIYFEKENINTGSMESELFLAILSSMAEGESASISENAKWSVKRRFQNGTYKLGYTPYGYDWDGKNMIINPDQTAVVKRIFADILSGKSTNAIADELNAEKVPSKKNANWTSSTIRGIIANEKYTGDVIFQKTYTDENFNRHTNYGEVDQYMAPDHHEAIISHSDFDAANALVNQRAAEKGIEKGSDKYQQRYAFSGKIVCGECGDTFKRRIHSCTTYKYVAWACNTHLKNKESCHMKYVRDDEIKVAFITLLNKLIYGYRLILTPYLKVLENSSGDEAIHRIQHLEQLIAQNSEQREALTKLMAQGYIDQILYNQETNALLLQAETYRSDIEAITIGMTGDAAKVTETNLLLHFVSHTDMLTAYSEEFFENYADHIEVMSRNEIRFVMKCGLTFTERIDD

SEQ ID NO: 25501 - protein, 524 aa, synthetic construct
MPKKEALFMPKTEEKQAAKAVIYARYSSDRQREESIEGQLRVCEDYARRNNITILHTYADRAMTGRSDQRLEFQMMIRDAATMAFNVILVYKLNRFARNRYDSAKYKHKLKKYGVKVVSAMENIADDPSGILLESVIEGMAEYYSAELSENVLRGMTQNALEGKWPGGVIPLGYKLDKGGRLIINEEKAPIVRMIYQMFLDGMSVARIERKLNDKKYTTDAGKVFSRSRVYYILHNERYIGTFQWKDIKKEGIIPPIISKEAFHAVQERINAMKSSSYRTNNNYLLAGKAFCASCGAKVSGTSGKSQNGNKYCYYGCSHHHRSARYEYCETKNIRADVLEKLVCDKTHEILSSKKAIKEIARQAVKLRPRDESELEIRAIKNHISSCQKKIDNCIKAIENGVMSNALVESLNENERTLDVLKEKLAKASLMQGSGLLTEEKIQFFFETIREKAKETEKYNDILLTSLVRAVYICNEYVEIQYNYAEQLPILTNPVRIESCSYKCTNGGTIWIRTKDLFDVNEAL

SEQ ID NO: 25502 - protein, 572 aa, synthetic construct
MASRIAEKLAAKKAAIYIRVSTHWQVDKDSLKVQRRELIAYVTLVLGITDYVVFEDPGYSAKNTDRPEYQAMMDRIRTGEFTHLVVWKIDRISRNLIDFAAMHDELQSLGVTFVSKNEQFDTSSAIGEAMMRIILIFAELERKTTAERVTAVMLSRASDGQWNGGRVPFGYSWSKETKTFSIVPEEAKAIRRMAELYEQYQSLLYVAKYLNDAGIVTKTGGQWTPTTVRTILTNPWYIGQYVYNVHSDGKGIEKRDSDEWITVENHHEPILNDDVFYRMKFLLTRNKRGGVPSHKTYVRKNIHVFAGLLRCGQCGSNMTANLDRRRANGFRPSQYACGSRRRKGTSCTNKYISDTTLGPFVLNYVANIIRASKNSSETTTPEVLERKLLRGEAFEDVASVSTDALGQLLDAFRSAGDAVEYRPQIAFSGDDNSIREIDTLRARRRKLDNALARLNALYLYDDEAMPEKDFVMQRGQITKQLEEVNSRIEELQNQESSEELGDDFIGKASYYIMANKLIEDRYIDYEKYIRAIDPSIPRSFLQQIIDHIVVNDGRVVSITFKNGATHTFTYKK

SEQ ID NO: 25503 - protein, 455 aa, synthetic construct
MKYVACYCRVSTDEQARFGFSIQAQKDALEKYCKENGYKYEFYIDEGISASSMKKRKALNEMLSKSSTFDMVLFTKLDRLSRNVLDANNINKLLIDNNCTMKAIDEDDIDTSTADGTFIFNLKVSLAQREIGKTSERINFVFKNKREKGEITSGTKKYGYDIVDKHFVVNEKEAENIKNLYKEFINNNGNLKETYKYFIQHFEGKGYDAMSNYLKETAYIGKYKLYRKNIYIDNYIPAILDIEIWEKVQNLRKKKTVGRKITYPDLFSGLIYCRNCGNRLAKKTDYRVKNIVVRYVCDNSYRYKVGIDEKHCTNNKVIKEKDIENYLLNNLDKELSNFIAKVSVIPNTKKINNTPKIKSLEKKINKLKDLYLDDLINKETYAKDYKKYTSELLSLKNTTTQEPLKKDYSHLKQILNSDYKKIYNELNKTNKKKFWFSFINKIYVENGEIKEITFL

SEQ ID NO: 25504 - protein, 543 aa, synthetic construct
MEVTKVPKKIVTVIEPKRSMTVDKEKYRQKRVAAYCRVSTDSEEQLVSYANQKKVYTEMIASRKDWCFAGLFADEGKSGTRADKRPEFNKMINDCLAGKIDYIITKSVSRFARNTVDCLDYVRMLKSKGIGVYFEEQQIDTLKTDSELYLVIYAGFAQSESESISKNITWSVRKKFEDGTPVFMYKRFLGYRKGADGEPEIVPSEAVIVERIFNLYLAGETVDKISKMMQAENYDIPGKTISFSKGMIMNMLSNERYCGDAILQKSVTIDCIEKKRKKNTGEAPMYYVQNNHPAIIDRVTFNKVQEELARRKTKTPGSAKSSITSTGKYSRYALTDVLICGNCGTRYRRVTWSRNGVKRIVWRCISRLDYGKKYCSDSPTIMEDKLQEAIVRAVNKFNEQDNATYKALMRATISEALGLNGDPEEVDMLERKVEALNNKMLALVNESVSSGDGIEAHESEFMTLSQETELLKQRIAAIQESTAKDNGEQSRLEQIQAIISERENKCMEYDDSIVRQMVECIKAYPGGKLEIIFGGGYLVEESV

SEQ ID NO: 25505 - protein, 513 aa, synthetic construct
MPEVRLITPITRQSTKKMQVAAYCRVSSNSADQLNSYAAQIRAYKKCIGARDDWELVDIFADEGLTGMKSETRDEFQRMIRMCELKQIDLIITKSISRFARNTKDALAYVRKLKLLGVGVQFEKEGISTLSMGDEMLLNTFSALAQEESQSISMNQRLSIVKRMELGEYVDSNAPYGYRLVDKMLTVYEPEAGIVRNIFALYLQGFSTSEIARELNKLNIPTKARKEIWRPSRVAYILKNERYIGDSFYQKTYRETTVPFNQHPNRGQEDRFYAKGTHPGIVEKDVFDAAQILIEKRKDVFAKATTQNIYPLTSRIQCSECGSFYRRRIVSGTVKWVCSLHKDDSTACDSNYYSEERIYDGFISMVNKLRFSEDNILGQVISRLEMTLAAMKRNNLAARDLSKSIAELNAKLLMLEQLRSKGYLAPEVYQAQANEISAELAKLKDVRQEKFNSKAAIMLEEVKKLKMLIFELEEPLDAFDEKLFLEIVKSIQINKEDEMSVELLGGLRFRERI

SEQ ID NO: 25506 - protein, 542 aa, synthetic construct
MKVRAIEDAVTALYCRLSVDDGEEGDSNSIVNQKKMLGDYAQSHGYLNPKFYTDDGFSGTNFNRPGFQELIRDVDAGRVGTIIVKDMSRLGRDYLKVGYYSEVYFGEAGVHFIAVNDGVDNTVENDSDFTPFRNIMNEWYAKDTSKKVRAVLRAKGKSGKSLTNCPPYGYTKDAEGNWHIEEEAAGIIRRIYSLCVEGYGPSQIAKKLNEMKAISPVVWKHKVGWNYKLEKVDHPEIWTVTAVRRILSNPVYLGHTINFRTKKKSYKSHSVVFLPKEDWVVFENTHEPIIDKDTFDTVQKLREGIKRRLSIDGEMSVFSGLLYCADCGSKMYLNRHRGKEKDCFNCASYRKEKHSQCTSHYITLHAIEEIVLGDLQRVLGMAKNREDEFIALLQEKNKKVAQRDLSEKRKELEEKERRIAELDLIIQNLYEDKVRGTLSEERFVKMSQNYENEQVALRDSTTMLKEELDAVQREKDDISRFMRLVRKYTEITELTPETVRCFIDKILVHKGEKAQGGHRQTIEIFYNCVGAIPDLRENEDNA

SEQ ID NO: 25507 - protein, 511 aa, synthetic construct
MPKKETAVSQGLVAAIYARYSSHAQNDASIEQQMDECQEYARQHGYKIVGVYADRAMSGRSDRRPEFQKMMRAAEKREFQIVLAYKSNRISRNMLHALSYEDKLAQHGVNVVYCKEEFGNNAAGRFALRTMMNVNQFYSENMAEDIMRGLMDNANQCKVNGSLPLGYKRGTDGRYEIDEQTAPIVQEIFRRIANGELKASIADDLNKRQIRTSTGGTWNKGSFHSLLANERYTGIYIYRDVRVPGGIPVIVDKDLFEAAREREETMKTTIKSRRRRDDMEYLLTGKLFCGYCLEPMVGSSGTGKMGKMYYYYRCKNNAEKHTCQKKPVRKDAIEQLVVSSLKACITKPENIDWMTDLVMKYRSKIIAESDIGYLEDKLKENKTAIKNVMKAIEMGVVTETTKARLQELEAEQREALSSLLAEKRSIPDVTRDHVQFFFESFRNGDVNSMKYQKTLIKHFLRAVYLYDDHIKITFDYDDSDTGVEIPLEDSSAESSEDTSVLIDSLGVYGRV

SEQ ID NO: 25508 - protein, 521 aa, synthetic construct
MRVAIYCRLSREDDDKLHENDESESIQNQKSMLINYAIERRWDIYNIYCDEDYSGIDSERPEFNKLLEDAKNHKFDIVLCKTQSRFTRDMEIVERYLHNKFVEWNIRFVSLVDHVDTLDKGNKKSRQINGLVNEWYLEDLSENIRRTFDSKRKQGLHIGSFVCYGYKRNPENKNKLIIDTEVSDVIRLIFNLYEQGKGVNKIAQILNDKGILTPTKYKQSQGINFKNQGKNMDYWCESTVSKILKNEVYIGNLVQGYNKKVSYKSKQMKNQPKSEWIIVENTHEPIITKEQFYKVQEIFKRKTRRCKNGEVHLFANKLVCLDCGTKLYKCRNDRDYVYFSCKGSKKLYGTCTPHSIGYENLKNLVAEKIREKILAFYNFDNISDDLFVSNDNLNKAKLLQNKVELLSKEMKDINNAIKELYLNKVSGKVPEEVFEDLNSSFLSDKSAKQKELTKLENDLSNLKEKELNSKFIKEQKEKIINHFKNFKELNYDIVNSFIDYIEIGEKNKKTKSQDVIIHWNF

SEQ ID NO: 25509 - protein, 514 aa, synthetic construct
MSMNAVIYARYSSHNQTEQSIEGQLRDCYDYAKRNDLTVIGEYIDRAISGKTDERPDFQRMIKDASKHQFERVIVWKLDRFARNRYDSATYKHKLKQFGVKVISAMENVGEGDESVLLEALLEASAEYYSLDLKKKIERGMRESALNGKFVGGAVPWWCSVGTDRKLVVNEERAAIVKEAFARYDSGEGSKSIVDDFAKRGLRSNRGMPVTLSWLLSILKNRKTIGEYTYNGIEIPGGLPAVVDKPLFDRVQERIARKRRTGGGEATSKTEYLLQGKLFCGLCGSPITAECGQNRKGVVYNYYACSLKKKKHQCKKANERKDFLEWYVVEQTLDYVLTPDRTDYIAEAIVAEYERQFDKSGIKALEQKIALTEGEIQKTMDLCIQATTDAMRKRFMKRCEELDAKKADMEIDLSKLRVAASITYTKEEVRAWLRQFCAGDSFNPAFRRRIIDVFINTVYLYDDKLIIYYNLRDSRQVSYIEAIGASSEIENLRPVPDNKKTAVECSTADKNGGA

SEQ ID NO: 25510 - protein, 429 aa, synthetic construct
MLHSLAAQVSYYSERIQRNPEWEYAGVFADFGLTGTKEKRPEFQRMLKECREGKIDLILVKSISRFARNTLALLNTVRELKGLGIGVYFEEQKLDTLSGDGEFMLTILASFAQEESRSVSENCKWRIRKKFEQGIPTGFGMYGYKVRNGSFAIKPEEAAVVRRIFQMYLDGMGSVKIMKLLTEEGVPAPLGGLWNASVVMEMLKNEKYAGDLLLQKFYTNNHVEKKRFHNRGELPQYFVGEDHEPIIGRETFDAVQREIAWRTAQRKAAKAKRTATNAELSASAVELSVPSSGNNSRETIPLTDRIYCGVCGKKYRYKVTRLGTPYAAPVWICSTFNYRGKAYCASKQIPEDILKELITSVLTTFHTEDSVHHIEMHPGNRVLFVFQDGHTEEHFWEDHSRKDSWDAEKRQKAAEKTRIQHQKRKEQEQ

SEQ ID NO: 25511 - protein, 525 aa, synthetic construct
MAKTVTVIPATVNPFTGMPVTGLHKRRVAGYARVSTDKDEQFTSYEAQVDYYTKYIKANPEWEFVTVYTDEGISGTSTKRRDGFNTMIDAALNGRIDLIVTKSVSRFARNTVDSLSTIRKLKEKGVEVYFEKENIWTLDSKGELLLTIMSSLAQEESRSISENITWGKRKSASDGKVSLAYRNFLGYEKGPNGTPVINQEQAKTVRRIYRNFMAGQTAWAIAKELTADGIPTPAGKSQWHTTTVESILTNEKYKGAALLQKTFTVDYLSKKIKTNEGEVPQYFVEDSHPAIIPPEEWDQVQKEFVRRHSLGRKYSGNSIFSTHIVCGDCGAFFGAKVWNSTDKYRHTVWQCNDKFKGGKKCATPHLSEDKIKSGFVQAFNRLFDGKEEIIANCKEVARLFSDTAELDRKKDALQQELCVLSELIRKLIEENATTVQDQNSYLEKYNGYADRYKTVTEAIGALEKEILLKHARADAFRNFIRTFEAVESKLLAFDAKLWALTVDKVKVMADGSLHYIFKNGADITA

SEQ ID NO: 25512 - protein, 433 aa, synthetic construct
MDRIVERVIFDAPQKPTLVRVAAYGRVSSGKDAMLHSLSAQVSYYSKCIQSHQGWLYVGAYMDEALTGTKANRPEFQRMLADCRAGKIDLILTKSISRFSRNTVAFLETVRELKALGVDIFFEEQNIHSSDRSGELMTTILSSFAQEESRSASENQKWRIRKNFKEGMPWNGRMLGYRYNCGTYTVIPEEAATVKRIFHEYLSGKGGVAIANRLNKDGIPSPSGGKWGKSEIMLILRQYVYTGNLLLQRFYKNNYLEKKTLVNRGELPMYHAENCHEAIVSAEEFTEVQKQIAIQAKRYYRSGSSASRYPLSGRIVCGGCGKHYRRKTTPTGPVWICSTFNFEGKAACPSKQIPEATLLQVCKEVLNSVELTAELLDSRLTDIQAEKNNTLIFSFKDGTKTVRQWHDRSRAEAWTAEKRKAASDRRKERDRNG

SEQ ID NO: 25513 - protein, 538 aa, synthetic construct
MQPVRTVTKIDANPLLSANKNDYKQINVAAYCRVSTDSDDQLQSYEAQVEYYTDHICKNPKWHFVGIYADEGITGTVVSKRERFKDMIRDCEKGKIDLILTKSVSRFARNTVDSLNYVRKLKAMNIGVYFEEQNIDTLTTDSEMFIGLYSVMAQSESENISANVKWGVRQRMKNGTFGFHYNTYGYRKDENGEPEVVPEEAYFVKKIFDLYLDGYSTKKIADYLNEYGAITRRGNEWNDRGVQRTLANEKYIGDLLMQKTYSVDCISKKKKKNNGELPMYLVSNNHTPIISREIFKLAQAETAKRNSKRKKSSLGSTELGKYNSKYALTDVLICGECGSSYRRAVKYDNGRKKVYWRCLNRTENGTKFCKKSSGVREEKLHSAICRALSKIAPSKDEVFNAMKASLEYGVTNDDSNLNKYNLKLSIQKLQDEAEDYMMKAATTEGNKEKYFEEVEKIFAKVKVLREQLDVLEATSSQEEESNSELDRVTETLKNMDFSLCEYDDLIVRRTIECIKVMSNKTIVIIFKGGFEVTESLEV

SEQ ID NO: 25514 - protein, 511 aa, synthetic construct
MKEVQVINPNLKQKTDDLLRVAAYCRVSTDSEDQINSFIAQVRYYNEFISRNKNMVLVDVYADEGITGTCAEKRDEFLRMVSDAKKGKIDRILVKSVSRFARNALECIENIRILKSYGTTVLFENDNIDTETMNSEMILYVKSAFAQSEAMAGSKRVSTAFRMKMERGEFKTTNAPYGYDLVDGNLIPNSEQAPIVQRIFKEYLSGNGMTKVAEIINEEEQTNRIWDKTAIKYVLKNEKYIGDSLWQKTYTPQILPFKKKRNKGQVEKFYVTNTHQGIIAKEVFDLVQEKISTSCVSKRNTGKIAETPFDRKIFCGDCGWSYGKIISSGELYWGCINDDLSAGKCSGPNIKHEILEKAFIRAYNKLRLYETEIVDKTLSQLISIRTSLASMNEEVSSLNREIAILSEQNSMYNELKTKNIIDDVSYYEKTMVIMNRLNALRDKRLKLVAADEDEMIIEKIRKLKSNLDKTPKAIFVFDEAIFNLLVEKVFVFPDNKVVFELLVGIKLGVDF

SEQ ID NO: 25515 - protein, 513 aa, synthetic construct
MSEMRLITPITRQGTKKMQVAAYCRVSSNSADQLNSYAAQIRAYKKYIGARGDWELVDIFADEGLTGMKSENRSEFQRMIRMCELKQIDLIITKSISRFARNTKDALSYVRKLKLLGVGVQFEKEGISTLSMGDEMLLNTFSALAQEESQSISMNQRLSIVKRMELGEYVDSNAPYGYRLVDKMLAVYEPEAVIVRNIFTLYLQGFSTSEIARELNKLNIPTKSGKETWRPSRVTYILRNERYIGDSFYQKTYRETTVPFNQHTNRGQEDRFYAKGTHPSIVDKNVFDAVQTLIEKRKGVFSKATTQNIYPLTSRIQCSECGSFYRRRIVSGTVKWVCSLHKDDSTACSSNYYSEERIYDGFISMVNKLRFSEDNILGQVISRLEMTLAAMKRNNMAARDLSKSIAELNAKLLMLEQLRSKGYLAPEVYQAQANEINAELAKLKDVRQEKFNSKAATMLEEVKKLKMLIFELEEPLEAFDEKLFLEIVKSIQINKEDEMSVELLGGLRFRERI

SEQ ID NO: 25516 - protein, 543 aa, synthetic construct
MEVTKVPKKIITVIEPKRSMTVDKEKYRQKRVAAYCRVSTDSEEQLVSYTNQKKVYTEMIASRKDWCFAGLFADEGKSGTRADKRPEFNKMINNCLAGKIDYIITKSVSRFARNTVDCLDYVRMLKSKGIGVYFEEQQIDTLKTDSELYLVIYAGFAQSESESISKNITWSVRKKFEEGTPVFMYKRFLGYKKGADGEPEIVPSEVAIVERIFNLYLAGETVDKISKMMQAENYDIPGKSISFSKGMIMNMLSNERYCGDAILQKSVTIDCIEKKRKKNTGEAPMYYVQNNHPAIIDRVTFNKVQEELARRKTKTPGSAKSSITSTGKYSRYALTDVLICGNCGTRYRRVTWSRNGVKRIVWRCISRLDYGKKYCSDSPTIMEDKLQEAIVRAVNKFNEQDNATYKALMRATISEALGLNGDPEEVDMLERKVEALNNKMLALVNESVSSGDGIEAHESEFMTLSQETELLKQRIAAIQESTAKDNGEQSRIEQIQAIISERESKCMEYDDAIVRQMVECIKVYPDGKLGIIFGGGYLVEESV

SEQ ID NO: 25517 - protein, 528 aa, synthetic construct
MPKTTKKITTIPATLTRFTATPITEQKKRQVAGYARVSTDHDDQFTSYEAQIDYYTNYIKSRDDWEFVDVYTDAGITGTSTKHREGFKRMVADALAGKIDLIVTKSVSRFARNTVDSLTTIRQLKENGIECYFEKENIWTFDGKGELLLTIMSSLAQEESRSISENCTWGQRKRFADGKVSVPFQRFLGYDRGPDGNLVVNREQAVIVKRIYSLFLQGMTYHGIADTLTKDGIPTPGGKKKWSISTVKSILSNEKYKGDALLQKSYTVDFLTKKTKVNEGEIPQYYVEDNHEAIIDPEVFEMVQREMAKRGKGKKYHSGVHAFSTKIKCGECGSWYGSKVWHSNSKYRKTIWQCNHKFDGDCRCQTPHLTDEEIQLHFLSAANKLLATKAAVIANGREMQALLFDTTELEAEQAQLLEETQVVSDMVQQAIQENARTALNQTEYQKRYDSLVQRFDRAKTRLEEVTAEIQEKQTARANTGTFLNAFEQMPDALAEFSLESWHSMVDYATVYSADDIRFTFKNGQEIQA

SEQ ID NO: 25518 - protein, 592 aa, synthetic construct
MQVKVIKKVDGRIDRKTGNVYNERLRVCAYCRVSTDSEEQKNSYDSQLKYYKEKITTNSNWSFAGIYADEAISGTLDYKRDDFMRMITDALEGKFDLIMTKSISRFARNTVDTLKYVRKLKEKNIAIIFEEENINTLEMAGELLLTILSSIAQQESENISTHVKLGLKMKMERGELVGFNNCLGYRYDYKTNTMSINEEEAEIVKYVFRRYCEGAGSTVIARELAELGHKSPKGEDAWAESTVRGIIKNEKYIGNVLMGKTYTIDPISHKRVTNMGEEDKYYIEEHHEPIIPLEVYEKAQYILNSRRVSRETGRKGSNYSRMYHFSSMLYCGFCGEHYVRKNLYPHTNYSHRAWQCMKYVKKGKKFCPDSKILKEEIIENCFVEAYRILTNDNKEIIKNFIDKIDDILEQNNAKSIIEKLELEKQNLEDKQNKLLNLVLDGTIDKEMYASRKDELNKKIKKIDKQQEELSREVEDDAIMNSGRNKIKAFFEKEDLRLEEFDEEIFETLVHKAIIGEVKDNGEKNPYVINFVFKSGFEYDKIKTKTDSLISSEEVLILQFDSFQNFVSFEKQPDGSLQKKLKTKIKVKVTLNN

SEQ ID NO: 25519 - protein, 586 aa, synthetic construct
MKVQVIEKKKGRINRMTGEEIKGNLRVCAYARVSTEKEEQINSYKSQLKYYEEKIKSNSNWNYVCIYADEGITGTLDYKRDGFMKMIQDATENKFDMIITKSVSRFGRNTIDTLKYVRLLKEKGIAIYFEEENINTLEISGEIMLTVLSAMAQQESENISSHVKLGLQMKQKRGELIGYNGCLGYVYDKDTKEISINYEEAEIVRYIFERYCQGVGCTTIAKELTNMKYKTPTGKKKWHESTIRGILKNEKYKGDVLQGKTYTTDPISHRRVVNMGEENQYYIQEHHEQIISERMFNQAQEILQKRGGVRGSGRRKGNFSRKYPFSSRLYCGFCGSLLTRRNWHSGTKNSITVWHCMEFVKHGKENCPYCKAMKESIIEEAFTESYKILCNNNKQIIQTFLNEMEDIIQEESNESSIKRLEEEKQILKEKIDKLIDLNLNGTISLETLQEKKAKLQNKINKIDKEQEHLQLELEDSISLNHGLNKFKTLFKDNEIMPEFDKDVFELMIEKVIIGEKEENGNTNPRVITFILKSGNEIKCQNNNSTIEENLAVQIEENKYKNQQSSYEVSKNYLQPVYDTCGVCICS

SEQ ID NO: 25520 - protein, 537 aa, synthetic construct
MENCVIYARFSSHGQNEQSIEAQVRICKEYAENKGFDVVNLYTDKARTGTNDARPAFQKMIADAKTGAFQYILVYMFDRFARNRRDSIIYKEMLKDKYGVKVISALEPIAEDEGGEFYEMFLEWNAEKYSKRLSKRVRDGLDTSIANGTFCGGFIIYGYKLELEPVPRKQGKFIKRVVVNEEEAKVIRYVFEQYDKGVSKKQIAADLNAQGIRVKGKPISHKTFDNYMKNTKYIGEFYFGERLCTNMYPAIIDKEMFERVQQRLASNRYFLGGKETAKEPYLLTGKLFCGHCGAEMVAGGGKSKTGKKYYYYECKQKKKKLCTKRIEHKDKLEKFVVRKVIDFLSDEVNLNIVTQDVLKYFNSRTDEREIKSIRKRIADIQEEADAAANAFIEAKSPLLKQRIEKRMQECEVLLADLEKVKARLLLERGQKLTEQDIVAFVKIILQGDVEDLEFRRRLIDNLVYKVYVSDDDTYIYFNIKGGNHIEEITLEDTKAALKEANRVQTQRDPARQKEIIRTPRHFRGSYYSFLTIISVSE

SEQ ID NO: 25521 - protein, 590 aa, synthetic construct
MRVSVNLNAQKPDTTTNAVIYARYSSHGQTEQSIEGQLAKGHEYAAAQGYTVVHEYIDRAMTGRNDNREAFQKMLSDTGKHQFQVVIVWKVDRFGRNREEIAFNKHTCKKNGVRVEYVAESLPNSPEAVILESVLEGMAEYYSIQLSQNIRRGQLESAKKCQCVGGSVPLGYTLDSDKHFVIDPQTAPVVKKIFDLYAEGATISEITGQLNEQGIRTARKQLFTKNSLTKLLKNEKYIGVYTYKDIVRVEGGVPAIVDESTFDRVQELLKINRRAPSHTWTKVEYLLTDKLFCGHCGSPMVGESGFSHTGAKYSYYGCIKRRREKACDKKPVRQDWIEALVLDETVKLLHDDELMEYIIDRTWEYYQVTDKVQEEKAVLEAQLAEVDKAINNLVRAIEAGIFNAATKSRMDELDAQKAALTASLADLELTSGIRITRDHIEYFLLRLRDLDVKDRECQKRLVQTFVNAVFIYDDGRVKITYNYSGQSSTITLNQIASAEKGKGFVCCLPCSTSSPRFPRGVAAFFCFWGKTAANQLPISAVLCYNGSENGRGGTENEKAACCVPDGPRLLGLRGVRGRNAGRRYGHVRAI

SEQ ID NO: 25522 - protein, 565 aa, synthetic construct
MRKKSNLNAATRAVIYARYSSANQRDCSIEQQVAKCRELAARLGLTVIDVYEDRAISGKTDRRPNFQRMMKDADLRQFDVVLAWKSNRMGRNMLQAMTNEERLRDNGIRTVYAEEDFDDTAAGRFALRNMMNVNQFYSENMAEDITRGLMDNAAKCLSNGSLPLGYKPGDDRHVVLDEAEAAIVQEIFTRVSCYEPFIDIARDLNRRGIKTKKGSEWGRSSFHTICRNERYRGIYIYRDVRIEGGMPRIVSDELFYKVQEVLKVKKNPQGRRKRSGYEEYLLTGKLFCGHCGSPMTGIAGTSKTGAMHYYYTCQKRRTDHSCDKKAVRRDQIERAVGVAIQQQLLTDENIQMMADKLMEYNARTETKYRLQGLQDQLNANKTATANILKAIEMGIITDATKARLLELEKEQGQLLVKIDEAKAEMVPISRNDFVKLLYIYKEGEPTDKKYLAALFDNFLVRVDLYDDHLKITFDPTGGRQPIDMPIGAEESPESPGDSSESSDFEASSQDAEKFVLALHNCTMTNVLTAFSCQRAFVIFYLLNSDITRGVVHNYAFSCIHRHIGC

SEQ ID NO: 25523 - protein, 504 aa, synthetic construct
MNYNDSKGIYLMYLRKSRADEYNQDVENILKRHEEELQSLAKREFGDLIPEKYIFREVVSGGTIKDRPLMKEILKMMESGIIAGVLVVDPQRLSRGDLLDQGHIINAFKYTNTLIITPYKTYDLNDTTGTDMKLLKMELNHGADYLDYYKMVQARGKLASVRAGNFIQPIPPFGYRKVRYGKVTTLEPIEDEARIVRIIFQKYAEGKTICGVTNELNAEGYIPPSKQIWTKGSVKRILSNPVYDGKIRWGFTPNKTVMEDGKLKKYRPERHDYLLFDGKHDAIVNHGLFMSVQERLSKNKSFTNDRSLKNPLYGIMYCKRCGRKISRLNVAESRGGHRYACPNKLCDVQSSRYDLVIEAVIDTIQCAIDDFDITFHDCNSSGSDEKIRELRQELTRLNNKEDTLFELLETKVYSTSVFTQRHAELEKKRQEIIGKINTLSLIPPPESCNDKKMRFKDALLALKDESMPPKEKNHLLKKCIERIDYDIEGVRYHSKVKLDVYFKF

SEQ ID NO: 25524 - protein, 583 aa, synthetic construct
MTQTQIHATISPCTPILSADPTVKEDAMLDQQKITILYCRLSNEDALDGESNSIQNQKEFLTRYAAEHGYTNLKILVDDGYTGTNFDRPGVQEGFALVKQGLVGCWLVKDLSRFGRDYLTVGQYTDIIFPSYDVRFIAVNDGVDSERGDSDGFAAIRNLFNEWYPRDTSKKVRVVFRQKGTSGKHLGKPPYGYRTDPADKDHWIIDEDAAPVVKRIFDLAIDGKGPEQIARILEQDKVLTTKALYAKQSENHPDPKKRKKMPERPYHWIGQSVVGILERMEYTGCTCNFKTYSKSYKLKKRIPNAIEDMCIFPDTQEAIVSQAQWDRVQELRKNKRRPTKAQRQGLFSGLLFCPDCGNKLHFATCKSFDGKQDHYVCSSYKSGRGTCSAHYIREDVLRELVLERIRAVNAYIRQDVEGFQEEWLQCRRSDQERNIREDRKQVEQAKKRLADLDVLLSRLYEDFVLGDLSKERYKKMTADYEAEQERLKLEIEVTEEWLETQETMSADVDAFVALTQKYVDVPELTPTIVNEYIKKIEVFAPDKSSGKRVQKVKIYFNFVDDVEIPVISEPVIAKSTPGRRKTA

SEQ ID NO: 25525 - protein, 522 aa, synthetic construct
MSSVDKTAVIYARYSSHGQTEQSIDGQIAAAQKYAEGKGYTIIHIYADRAMTGRNDDREQFQKMLSDTATHQFGVILLWKIDRFGRNREEIAFNRYRCKKNGVRVERVAEDVPDGPEGVILDSVLEGMAEYYSLQLAQNVRRGQRESAKKSQSNGGTRMIGYKVNPDTKRYEIDPDTAPFITEVFRRYAGGQTMAEIAAWLNAQGLRATRGGMFTVNSLHRLLKNEKYTGVYIFRDIRNEGGMPALIDRATFDKVQEMLKVNRRAPSRVWSRAEYLLTDKLFCGHCGAPMAGVSGHGHTGVKHNYYTCLNRKRKKSCTKKSVRQDVLEPLVLKSIRNLLQDDATLKYIADRVWAEYERSDTSGDTIRALDRQIADVDRALSNVMKAIEMGIINEMTKARMDELTEQKQALSAARADAGLARGFKLTRNMILYFLRKMAAMDISDRDSQKRLIKTFVNAIYLYDDHFDIAFNYTENGKVIVKMQEIDDASTGGAFGCCAQCPTKIKAPAVPRRVFLFCCSVSC

SEQ ID NO: 25526 - protein, 590 aa, synthetic construct
MKTVEKIERKLPVLKARKRVAAYARVSMESERMQHSLSAQVSYYSALIQKNPEWEYAGVFADYGISGTGTKKRDEFNHMLAECEAGNIDIILTKSIQRFARNTVDLLNTVRHLKELGIEVRFEKEKINSLSGDGELMLSILASFAQEESRSISENVKWGTIKRFKQGIPNGKFSIFGYEWQDDKLVIIPEEAEIIRWMYAEYMKGASRIEIGRALMDRGIYTRQGKPWVDSNVKVILTNITYTGNMLFQKEYCEDPITKHRRKNYGEMPQYFVEDTHEAIIPMDEWQAVQAEFKRRRDLGPFGNKSLKLSAFSTKITCGCCGKHYRHSGKRNTAGEVYYIWICQTKSQKGVSACPSKNIPEKMLQNTAAEVLGLDEFDEDVFSQQIEEVIVIGDDTLTFRFYDGHEVTTKWQSTAKTDWWTDERRKLWGERHKRKDTNPNRNTFYEFTGFIKCGCCGANYRCQSGKRKDGTPTRSWYCTGPRSECRNPAIRDETMKRLVTEILGLDEFDEAAMDAQIESATILDHMVTFHFRDGHIEFRDFLDKRHGTPWTEERREKAKKSMKAAWTDERREAMSERIKKIRSEKKWPNP

SEQ ID NO: 25527 - protein, 523 aa, synthetic construct
MAKSVTTIPATLSRFTAAPINSTKKRRVAAYARVSTDNEEQLTSYEAQIDYYTNYINGRDDWEFVGVYPDEGITGTNTKKREQFRQMVADALDGKIDLIITKSVSRFARNTVDSLTTIRKLKEHNVEVYFEKENIWTFDSKGELLLTIMSSLAQEESRSISENCTWGQRKRFADGKVTVPFKRFLGYDMGPDHNLVVNPEQAKLVKRIYGMFLQGQSPFQIARTLTEEGIPSPGGKGHWNPSNIKSILTNEKYKGDALLQKSFTVDFLTKKKKTNEGEIPQYYVKDNHEAIIDPETFEMVQTLMTTRTKGRNRKSSVSIFSSKVKCGDCGSWYGPKVWHSNDAYRKVIWQCNHKFDGQKCTTPTLTEDEIKELFLRAANQVINQKEQFIAIYEQVLSRSLDTTALESELSDLEAEINIAAELIEECIKENAHVALDQDEYQKRYDALVARFDKAKARHTEVTDLIAERMARKHQIEAYLKNLRSREPLTEFRETDWLAMVDYITVHSKMDIRVTFKDGTEIKA

SEQ ID NO: 25528 - protein, 513 aa, synthetic construct
MQQAVIYARYSPGPNQTEQSIEGQVRECTKYAELHDLRIVGTYIDRKISGKTDNRREFQRMIDDSEKHIFDVIILYHTDRFARNRYDSAIYKHKLKENGVELRYATTDIPKGPEGIILESIMEGWAEYYSAELSRKIKRGMRESALKCHSTGAGRCLGYRTAEDKSLVIEPEGAKAVQTVFDMYIKGKSHADICRYLNDCGFRTAQGKLFNKNSVTHIIRNKRYIGVYTYDDITIEDGIPAIISKDTFHLAQLEAARRKTAKRPKEPKAEYLLSGKAFCGHCQKPLVGVSGTGKSGNKWYYYYCQESRAKRGCTKKPVKRDWLEREVVKRTVAEVLQPEVIQHIAKKCYDLQMEYRQDNSDVLFYELKLKDVRKAIKNTMHAIESGVKTKTLPARLQELENEEEALEAELAIAKASDFVITADQIEFLLTQFAEPWECESEEEYHRRIIKCFVHKVFLFDDKLLIYYNVSRDGKTREQSEAELLEEALGEGFDKRSSGSTMRKATPCGWLFAC

SEQ ID NO: 25529 - protein, 537 aa, synthetic construct
MTETATGGTRVRMIPATVRRYAAARPLTERLRVAAYARVSTDDEVQQTSYEAQVDYYTKKIRENPEWIFVEVYADEGITGTSTKRRKNFNRMIDDAMAGMIDRIITKSVSRFARNTVDTLTTVRKLKEKGVGVTFEKENIDTLDSKGELFITIMSSLAQEESRSISENVTWGWRKRIADGKVSVAYAHFLGYEKGPDGKMQIVEEEAKVVREIYAMFLDGKTPSGIAAALTKRSVPTPAGKATWQASTVKSILSNEKYRGDALLQKTFTVDFLTKKAKVNEGEAPQYYVENSHPAIVSAEVFELVQAELAKRRQRGGRTSAVTPFSGRLVCGECGAYFGSKVWHSTDAYRSVIYRCNRKYEKKGAPCPSPHVREEELRTAFEKALGMLLERRSEIFSAYETIIANLTDTAQLDRELERAQARLDEAHQEMERMARRNAEIAQDQEEYNRAFDALSAKCSALKEKIGALKAQLAAKAGRRRKLEAFMAQLREKEALAPFDERTFAAMVDHIVVYPGEAKGAKKLIFRFRDGTEIPVDL

SEQ ID NO: 25530 - protein, 445 aa, synthetic construct
MKKEQKQQPMQIRQVKPDAPTPRRKRVAAYCRVSTGKDAMLHSLSRQISHYSAYIQRQPGWEYAGVYADEAYTGTKGDRPRFRQMLSDCRAGKIDLILTKSISRFARNTVTMLETVRELKALGIDVYFEEQNIHSMSGDGELMLTILASFAQEESKSVSDNCKWRIRKDFSEGKPMNLMLLYGYRSVDGQIVIDEDEAAVVRDVFKAYLDGAGSSRIAARLRETNTPRRFGGTWTGNHVVEMLTNEKYTGDALLQKTFVEDHLTKKQRRNTGQLDQYYAENTHPAIIDRETFERAQAILAQRREMINIRKPTTVRYPLSGKVVCGNCGAHYNRRTRSTGRNSIPRYTWQCVTYSSKGKRYCPASQIPEETLIALTCEVLDVEKLTEEAVDALDEIRVTGKGCLRFALRDGRVEERQWAWESRAKAWTPEMRRKASEQMKRRWRHD

SEQ ID NO: 25531 - protein, 446 aa, synthetic construct
MQRTITKIAPVMIQQAPRLLRVAAYARVSSGKEAMLHSLSAQVSHYSDRIQKTPGWIYAGVYADEATTGTKDSREEFQRLLDDCRAGKIDMVITKSISRFARNTVTTLKAIRELRLLGVDVYFEEQNIHTLGEDGEFLLTLLAAYAEEEARSVSENQKWRIRTNFEQGLPWSVTMYGYRQVDGRLVLVPEEAEILRLAADLHLEGYGSERLERALAKAGVRGRQGNTMTGHEIINLLCNEKSVGDLLLQKKFVDDPITKVERINRGELPQYFVENSHEAIFDRDTYRRILAERTRRAARFQPRPQTPPTYPFTSLITCGKCGAHFRRKIAGAPGYKKPVWICDTFNSKGKSLCASKQIPEDILEVVTAQALGLPVFNAEAFAAAVKEIRVPENGTLVYEFQGGRTVTKTWENPSRRHSWNDENRGKARALALRLAAERRAALCQQP

SEQ ID NO: 25532 - protein, 540 aa, synthetic construct
MPAAITAPKVTFIPAKKDQIPINVLSSEAIKRLRVAAYARVSTNNKEQLTSYEAQVDYYTRYIQSKPDEWIFVEVYTDEGISATNTKKRDGFNRMIADALAGKIDLIITKSISRFARNTVDTLTTVRKLKEKGIDIFFEKENIHTLDAKGELLITIMSSLAQEESRSISENVTWGQRKRFADGKVSLPYKRFLGYTKGPDGLPEIVPEEAVVVRLIYRLFLYGKSPSAIATYLTDEGIRTPSGKPVWRASVVESILTNEKYKGDALLQKKFTVDFLSKKQKVNEGEVPQYYVTNSHPAIIESEIHDLVQYELKRRKADGRWTSCAHPFSGKIFCGECGGVYGSKVWHSNTPYRCVVWQCNEKHRGQHCTTPHFTEREMQAAFLAAFNQAMEERDEIIAAYQDVMDALTDTADLDAERGQLQNEMEVTLELIRKTIDDNARHALDQQEYQQRYNDLCQRYEKAQARLGEVENQRLERTAKRVKIKLFMEQLNARDTLVETFDEELWYSTVDFVTVLENKELIFTFRDGRKVQISNTKWRAA

SEQ ID NO: 25533 - protein, 548 aa, synthetic construct
MNAVIYARYSSHSQTEQSIEGQLRDCYEYARRYDINVVGEYIDRATSGMTDERPDFQRMIADAAKKQFECVIVWKLDRFARNRYDSALYKHRLKQYGIRVISAMENVGEGDESILLEALLEASAEYYSLDLKKKIKRGQRENIAKGKYCGGPIPYGYKLIDGKLRVDDKTAPTVRFLFEQYASGVPMKEIIDELTRRGVRGSRGGALTYNTFSRVLTNTTYIGQYKYKGDVVPDLAEPMIDADLFERTQAVVKANAHAPAANKAEVDYLLQGKAFCGKCGSHMVGESGRGKNGDTYYYYACANRKKRHTCKKKNEKKDFIEWYVVEQTVQYVLTPQHIENVAKAIVAQYDNEFSGSKIDECEKQIRQLDRELNKLVDALIDAPKAAHKRIYEKMESLEAQKAAAESDLIKLRIASDIRLTESEVRAWLKKFCTGDLFDPEFRRNIIDAFINCIYLYDDRVIIFYNIKGGKQVSYIDLENTLNEDSPGADFSDMIANAPPKPLAICKRFFAAVHSHDRLKDKIPAGRYLPRRKKVSSRSETDEGERSSR

SEQ ID NO: 25534 - protein, 467 aa, synthetic construct
MAREIVHIPARRGMSNRATVTDRKIRVAAYCRVSTDHEEQINSFENQVTYYTEYINRNPNYELADIYADEGISGTNTRRRDDFNRMIADCEAGKIDLIITKSISRFARNTQDCLNYSRKLKDLGIGIQFEKEGINTMDSSGELLFTILSSLAQDESRSISENCQWGIRSLFKQGVLHLNTNRFLGYDKDEKGNLVINEEQAAIVRRIYTEFMNGINPDVISRRLRDEGVPGCMGEAKWQASTIFGILRNEKYMGDAILQKTFTSDYLTKKTVKNEGQLEQYHVKGDHEAIIDPEYWDAVQLELERRQNYMTAHSLRTMGRYTDKQPFSNRVLCGECGKVFWRRTWYRLNNTYKVWQCGNRYREKGVVTCHSENLKESDLHGAFVMAWNGILENRAEFTETWKAQAENGNALERFRAKQMLELTKMKPLKEIDLLLVGKVLDYVIVQHGGELEFHFLDGTQLAVEVTE

SEQ ID NO: 25535 - protein, 406 aa, synthetic construct
MRIKVIKPTKAVQQQKKKVCAYVRVSTDSLQQEDSLENQTTYFKGFITANPEWEFVGIYSDQGISGYKENRPGFQKMIEDARAGNIDLIVVKSVSRFARNTETVLKFSRELKSIGVGIFFQLQNINTLSGAGELMLTVLAAFAQAESEGASDNAKMTYKRKFESGIPAHGLECTFGYKANAQGDIVVDEEKAAVVRQIFDLAEQGIWPSKIKQYLNKNGVPGCAGGDWDDTAVFRVLHNVSYKGDAILQKTYTDSRRKRHKNEGQVDQWYIAENHQPIVPPDQWDKVQEILQKRSEHLQTPALPKTDEPRSSRNTYPLSNMMYCPHCGAKLIHNWSNKGRQEYWVCRTNNKVSKDACKGVWLPAEVANSWGEITEPIVVVQYEDEYGMRRFTAYPKDEYDAFKRED

SEQ ID NO: 25536 - protein, 458 aa, synthetic construct
MSRVYKIEKPFALPEVKRKVRTAVYARVSTRTDEQLESLAAQKEYYENLVMNNPEWTLAGIYVDEGITGTSYKKREQFKAMISDCKAGKIDQIITKSLSRFARNTVDTIENIRMLKVLGIGIWFEKEKIWTLDGKGEFVLTLMAGFAQQEAQSLSENTTWGIRKRMAAGKYSVGYKSFLGYGRGFMIEEDGAYTVKLIFKFFLQGYSSFQIKDMLNKYEYRTASGHGKWCAAVVRAILQNEKYKGDCLLQKEFSDNFLTKRKKKNQGELEQYYVTDGHEAIIPRELFDYCQEIYSERHQFRYSGMTLMNSKIRCGKCGSIYGPKYIHSNDKYRHISWQCLNRYRKDKLCTNNIHFNDSDLPALWNETTKATIKAYPKVKTSVFQIISQVVDDTNRTDKIKKHIGRIAHVDIADWSLLVNHLTVTGHVAEIELFGGRTVHTRLRTGDKDVHKKRGAVAP

SEQ ID NO: 25537 - protein, 437 aa, synthetic construct
MAKIIYQTMPGGRKKAGKKRVAAYARISCVKDAMLHSLSAQVSYFSDLIQRNPDWIFAGIYADEVTGTTKERKDFQRLLTDCRNGQIDMIIVKSLSRFARNTVTLLETVRELKALGVDVFFEEQNIHSMNGDGELMLSILASFAQEESRSVSENCKWRIRNDFQRGKPSFFRIYGYKMKNGRLEIVPEEAEVVRMIFRDYLDGMGRELISKKLNEAHIPPMISDQWWPSVITAMLKNECYVGDLRLQKTFVADHLQKKQLPNRGELPQYLVHDAHEPIIDRETFDAVQCLTIIRIAHYHPNRDASGRYPFSGILRCDQCGSYYRRKIASAGTPYSKPVWICTTYNMKGKRYCASKQIPESILLQTTANVLGLEEFDEEAFAAAIECVHVTGPNSLRYIFRSGQEQEVVWQDHSRRDSWTDDMRVQAAAHARRRYDHE

SEQ ID NO: 25538 - protein, 531 aa, synthetic construct
MSENYAASPRITVFPATLNRFTATPIAEKRKRRVAAYARVSTNSDEQKTSYEAQVSYYTDYISAKPDWRFVQVYADKGITGTSTKRRERFNDMIADALAGKIDLIITKSVSRFARNTVDSLTTIRLLKEHGVEVYFEEQNIYTLDSKGELLLTIMSSLAQEESRSISENVTWGQRKRFADGKVSMPYKQFLGYRKGENGEPEIVPEEAETVRRIYRLFLDGMTPYKIKLTLESEGTLSPSGRSTWQPRTILSILTNEKYKGDALLQKTFCTDFLTKKMKVNEGEVPQYYVENSHPAIVSDEVYEEVQLELERRRKLGRQHNSQHCFSGRIYCGCCGSVYGSKVWHSNDKYRRTVWQCNARFVKGTGCQTPHLSEPMIEQKFLAAFNQLLTQRDFIADDMQAILQHLTDTAELDAEKEALQVEMGIVSELIRQAVGQNASAALDQAEYNRKYNSLTERFHKAADRVKEIDAECSRRKGQRREIENFRDTVLTNDQPVTFFSTELWNATIDRMTVNLDGSVKVAFRNGIEMTV

SEQ ID NO: 25539 - protein, 536 aa, synthetic construct
MIIILNDFNTSLRVGIYLRLSNEDRDKISKEEVSESIKNQRNMLLDYIEKNSEFMLIDEYCDEDLSGAGTYRPEFERLIRDCENGKLDVVLCKSQSRFSRDMEIVEKYINNKFKEWNIRFIGLSDNADTEVLGNKKSRQINGLVNEWYLEDVSNNIRSAFYSKMKQGEFISPFAPFGYEISPYDNNKLIVDTAASIIVKEIYDLYLKGMGFTGIAHYLNDKNIPCPSLYKYKKGIKLNIISNRPREEIKWNTNAIKTILKNELYLGHLIQGKRTTVSYKNHKVINKPEDEWIRRENMHEAIIDEETFAKVQLALKERTKPMKSTGIVHNFSGKVFCKECGHYMRKKNSSKHEYLVCSNNRDGYNDCINKSSIRYDALEELILSHINKKVRKFYDLNILETESAKKENNKFTKKINLLTKQKENIVNQMTKTKNYLKNLYEDKVNGIINAEQFKELITNYNNDDKKLKDQLKSIDNEINYYILKESSKKNTKELFNKYHQLEKLNRVIVVEFVDKIYIGKINDETNTRDIEIKWNFE

SEQ ID NO: 25540 - protein, 576 aa, synthetic construct
MEKKILCIIRASTEQQETESQKKELVAYCITKGFAVEEMAFIEVAGASARKLNKKYIQMLEDIKATLLSSPTIKAVAIWHLNRLGRVESKLHEMKEFFVSHKIQVYCKNPDFTLLDDEGNESAAGGLAFSIFSATVKMETDEMFAKMNRGRERNRANGIFAGGKIKFGYTLDATKHFIINENEAKTIRLIFELYATGKYSFYTLVEELRARGITKNGQKITYEMIQNALADEAYYKGINGKIPLIDKKLFDKCAAIKANTVAVKRTKESRNINFAVGLLKCSCGNNFIASGDFYRCYSKMNNNRKKKVVECDAPTIRRDVLDDLLWLVTRPLQQKFLMEKDTVSIEEQKDKINVLTVKVSTAQKELSDIKGRKEKLEDAYYVDGSMTEAQFKKRLASLHSKELQTESQIRNYKLEIADTQKIIEQIELPTNDRYFQSLILSDLDDNEPEHRKKIKEMMFANIDKVTVKKLMKGSHKCVEITITSKAKLSFVFLYDSWLNSHRKGECNVFYANKPVYYIDGHIIRQNPTVRNMLYQKIGLPELTNKEIGEAAIRYAKLPEPPFVITFKAPNIPHNHK

SEQ ID NO: 25541 - protein, 571 aa, synthetic construct
MKMKDKPQVKQYVIYSRKSKFTGKGESIENQIELCRQYIAMHFGENAADNVLVYEDEGFSGGNLERPQFKKMMKDSQKIEFAAIVVYRLDRISRNIGDFAKLIEDLGDRYIDFISIREQFDTSSPMGRAMMYIASVFSQLERETIAERIRDNMHELAKTGRWLGGTTPTGYESESLSSVTVDGKVKKACKLKPIPEEIQLVKTIFSVFMETGSLTKTDHYLLEHRCVTKRGKQFTRFAIRCILTNPVYMIADETAYQYLKENNVDLFAERSEFDGEHGIMAYNRTLQRPGKSNQIRPMEEWIVSVGKHPGIIAGSDWVQVQSMLDVNKSKSYRRPRSNVALLSGLLRCSECGDYMRPKLTNRHTADGELIYTYMCSTKERSRGTVCDMKNCNGNTLDAKIIAEVRKLSADKETLARLLSQTKKVISANKEGYDAELALLEEKHAETEDRIKRLVESLSVASETSAKYVMEQIDELHRESETQQARLSELEALTEQSRMLNQEFAFHQEMIESFASAVDSATLEEKRRLLRTIVKKVVWDGKNAYVYLFAEDGEADLPPVEQPMIPLGEDSE

SEQ ID NO: 25542 - protein, 514 aa, synthetic construct
MRNEYNPIIIKYVAEYLRKSRGETTEDLIKHKTILEELCKSRGWVYVVYEEVETGESLFARPVMQQLLRDVEDNIYDAVVCVDLDRLGRGDLVDWGQIKRVFQKTNTYMVTPSSLYNLNDDNEEFAVDLQTLFARREYKKITHRLSMGKKVGAKLGAWTNGTPPMPYEYQEWIDPATNKRYYNEKGLVVNLQKLSIYRFMVDSFIKDKKSTNEIAWELNRRNIPSPRGGRWCNMTVRRLLVDETHLGKIISNKTKGDGHKNKSPNKQPFQKIPKEQWTVVENRHEAIKTQDEHEKILIGIQKNLKSPYRRSDHYYPLKGLIKCGLCGYGLPLEYKRGKDLIVKKCWHKDYLGNKCPNSSGKAQYIIDAIDEQLKEYEEQIRKEIESCEDQSTDLIQLQIKTIMDKLNKKDIALKRARIAYDEGVDTLDEYRSAKERILKEVDELENQLSIENLKLQKAQSITNHEKLHYIEEFRRSRWEDELDDKELNDLYKTIISSIIWTKQGDNIDIKVNFL

SEQ ID NO: 25543 - protein, 590 aa, synthetic construct
MKTVEKIERKLPILKTRKRVAAYARVSMESERMQHSLSAQVSYYSALIQKNSEWEYAGVFADYGISGTGTKKREEFNRMLEECEAGNIDIILTKSIQRFARNTVDLLNTVRHLKDLGIEVRFEKENINSLSGDGELMLSILASFAQEESRSISENVKWGTIKRFKQGIPNGKFSIFGYEWQDDKLVIIQEEAEIVRWMYAEYMKGASRIEIGRALMQRGIYTRQGKPWVDSNVKVILTNITYTGNMLFQKEYCEDPITKHRRKNYGELPQYFVEDTHEAIIPMDEWQAVQAEFKRRRDLGPFGNKSLNLSAFSTKITCGCCGKHYRHSGKRNTAGEVYYIWTCQTKSQKGASACPSKNIPEKMLQNTAAKVLGLDEFDEDAFSKQIEEVIVIGDDTLTFRFYDGHEVTTKWQSTAKTDWWTDERRKLWGERHKRKDTNPNKHLFYEFTGFIKCGCCGANYRCQSGKRKDGTPTRSWYCTGPKDQCHNPGIRDETMKRLVIGVLGLDEFDEAAMDAQIENATILDHTVTFHFRDGHTEFRGFLDKRHGTPWTEERREKARESMKVAWTDKRRKAMSERIKKIRSEKKWPKP

SEQ ID NO: 25544 - protein, 523 aa, synthetic construct
MAKTVTTIPATLSRFTSAPINSKKKRRVAAYARVSTDNEEQLTSYEAQVDYYTNYIQGRDDWEFVSVYTDEGITGTNTKKREGFKSMVADALSGKIDLIITKSVSRFARNTVDSLTTIRSLKEHNVECYFEKENIWTFDGKGELLLTIMSSLAQEESRSISENCTWGQRKRFSDGKVTVPFKRFLGYDMGPDHNLVVNPEQAKLVKRIYGMFLQGQSPFQIARILTEEGIPSPGGKDHWNPSNIKSILTNEKYKGDALLQKSFTVDFLTKKKKANEGEIPQYYVKDNHEAIIDPETFEIVQTLMATRKKGRNRKSSVSIFSSKIKCGDCGSWYGPKVWHSNDAYRKVIWQCNHKFDGLKCTTPTLTEEEIKELFLRAANQVIDQKEQFIAIYEQVLSKSLDTTAFEGELTELEAEINIAAELIEECIKENSHVALDQADYQKRYDGLVARFDKAKARHTEVTELIAERTARRHQIETYLQELRSREPVTEFRDSDWLAMVDYITVHSKKDIGVTFKDGTEIKA

SEQ ID NO: 25545 - protein, 572 aa, synthetic construct
MNEQKIVALYTRVSTGYQIDKDSLPFQKKELSAYCKHILHAEKMELFEDAGKSGKNTDRPAFLRMMKKIRAGEISHVVVYKIDRISRNLVDFSVMYDEFKKYRVTFISLNEQFDTSSAIGEAVLKIILVFAELERKLTSERVIGVMLDRAMSGKWNGARMPFGWKWNPETEFPEHDPVELEKALTLYRVYDETHSTAKVRDYCYDNDIQTKRGGKWTTTTILNFLKNPMNKGDYRYNYRGSARGTKKPENEVVYLPGVFPPLVDPDLWDRVNAIIKDNAEKHDIHKNPHIKKHVHIFTGGILKCAYCGASFQVSRLDKKRLNGFQPSLYVCTSRRTYRACDASGASDVVIGAFFFNYVRNLVQATKSRAKIGTPADLEQILLSGDEFSRIRYIDPSDLDIIYQAIRGTIAPGSGVTYIPAPPDSDKKDAPELSGLRTEAARLSRALDRLKKAYLFDDDAMSEAEYLSTRSELTEQLTRINNKIADALTDESYSAAAELSFVNSASSFLLSYRLQGADHIVYSDFAASVDALVLKNFVNMIVDHITIKDGDPVEIVFKNGLRNRFVYQDDATV

SEQ ID NO: 25546 - protein, 525 aa, synthetic construct
MSSVDKTAVIYARYSSHGQTEQSIEGQIAAAQKYAEGKGYTIIHIYADRAMTGRNDDREQFQKMLSDTATHQFGVILLWKIDRFGRNREEIAFNRYRCKKNGVRVERVAEDVPDGPEGVILDSVLEGMAEYYSLQLAQNVRRGQRESAKKSQTVGGCNIIGYKVNPDTKRYEVDPKTAPFVTEVFKRYANGETISEIVAWLNVQGVRATRGGEFTVNSLHRLLKNEKYTGVYIFHDIRNEGGMPALTDRATFDKVQEMLKVNRRAPARVWSKTEYLLTDKLFCGHCGAMMVGESGHGRNGTKHSYYTCWNRKKKKSCSKKPVRQDVIEPMVLRVISKMLSDEATLEYIADQVWAVYERSDTSGDTIKALDKQIADVDRALSNVMKAIEMGIINEMTKARMDELTDQKQALSVARAEAGLAGGFKLTRDMILFFLHDMAATNMTDRDCQKRLIKTFVNAIYLYDDHFDIAFNYTSNGKMVVKMQEINDTTSGEVFGRCAQSPAKSTAVVIQMYRKTAVLFVCGSIR

SEQ ID NO: 25547 - protein, 501 aa, synthetic construct
MEIQIREGSREQKRKLKVCAYCRVSTDEDEQENSLENQVRHYETVIKANPNYEYAGVYSDFAISGFKEKRPGLQKMLADAEKGKIDLILTKSVSRFARNTSIVLEATRKLKELNVGVFFELQNINTLSGEGELMLTILAAFAQAESESGSAGAKMVYQRKYEAGIPVQYLERSFGYTKDERGVFVADEAEAVWVRKIYKMAAEGYTPASIKRYLNENGIKTVGGVQWVDSTVFRLLENEIYKGDYIMHKHFVNEERKLVRNRGEVDAWYIEDDHEAIVSPELWQKAQDALAAKRDYLAEGSVIEEFTEENYPYMNKIYCAKCGYPLYKRIYSKGNRLNWGCSGTKRYGKSFCDGINIPDGVLRSAWHFEENTYIDEKASDKGVKEFTYLKERSWKRRHKKKQPSAIPENTETEYPYREKIFCALCGSRLVRYVNPQNYKVTWVCNRRKRKGKEACDGTRVPDTVIKGWGEIKKDIYIQRKDDKNGKKRYSYTSKKPSGIRV

SEQ ID NO: 25548 - protein, 529 aa, synthetic construct
MNRTAARSVTVIPPTINPLTHLSRVAVQKRRVAGYARVSTDSDEQFTSYEAQVDYYTQYIKRNPEWEFVKVYTDEGISGTNTKHRIGFNEMIADAMSGKIDLIVTKSVSRFARNTVDSLVTIRKLKEKGVEVYFEKENIYTFDGKGELLLTIMSSLAQEESRSISENVTWGQRKRFADGKVNLPYKQFLGYRKGADGFPEVVPEEAIVVHRIYTRFMEGLTPGAIAKELTADGIPTPSRKQCWQTSTVESILQNEKYKGAALLQKCFTVDFLTKKRKVNEGEVPQYYVEHSHEPIITPEEFDKVQTELARRKHISRQYSGKSIFSSRIVCGDCGSYFGSKVWNSTSKYRRVIWQCNGKFKGEHKCETPHLDEETIKVQFVSAFNAIIESKDNILEDCRLMQTTLTDCTGIDAEIESLLEEIEVVTELTKRCIAENSQTAQNQEEYAARYNGLVERYEKVKARLEQLRTTKAAREAQTEAIGAFMFEVQELDALTEFDEKLWLTVIDTVTVHADGRMTFKFQGGKTLTSY

SEQ ID NO: 25549 - protein, 434 aa, synthetic construct
MERVVERVDALIPAQPKALRVCAYARVSTGKDAMLHSLSAQVSYYSKMIQSHNGWMYCGVYSDEAVTGTKRERAGFQHMIEECRQGNIDLVITKSISRFARNTVTLLQTVRELKILGVDVFFEEQHIHTQSSDGELMMTILASYAQEESLSASENQKWRVRKAFENGEIINLRFLFGYDITPDGIQVNEKDAAIVREIFERFNNGESMSSICRDLDTRGHKGVLGGTWCAERMRNTLSNEKYLGNALLQKQYRNNHIEKKLLPNRGELPMYYAEGTHVPIIDQATFDKAQERLRMLAQQAANRKKPTRSVFSGLIHCGLCGNTYKRVTYRKKHYWNCTTFQTKGKSECAAKRIPEETLEVLTCEVLGAVSFDPDMVRSKITAIRAEKNNVVVYCMDDGSEIVKRWKDRSRAESWTPEMKEKARQRALQARRKKK

SEQ ID NO: 25550 - protein, 517 aa, synthetic construct
MRVSVNLNAQKPDTTTNAVIYARYSSHGQTEQSIEGQLAKGHEYAAAQGYTVVHEYIDRAMTGRNDNREAFQKMLSDTGKHQFQVVIVWKVDRFGRNREEIAFNKHTCKKNGVRVEYVAESLPNSPEAVILESVLEGMAEYYSIQLSQNIRRGQLESAKKCQCVGGSVPLGYTLDSDKHFVIDPQTAPVVKKIFDLYAEGATISEITGQLNEQGIRTIRKQLFTKNSLTKLLKNEKYIGVYTYKDIVRVEGGVPAIVDKSTFDRVQELLKINRRAPSHTWTKVEYLLTDKLFCGHCGSPMVGESGFSHTGAKYSYYGCIKRRREKACDKKPVRQDWIEALVLDETVKLLHDDELMEYIIDRTWEYYQVTDKVQEEKAVLEAQLAEVDKAINNLVRAIEAGIFNAATKSRMDELDAQKAALTASLADLELTSGIRITRDHIEYFLLRLRDLDVKDRECQKRLVQTFVNAVFIYDDGRVKITYNYSGQSSTITLNQIASAEKGKGFVCCLPCSTTRTVM

SEQ ID NO: 25551 - protein, 524 aa, synthetic construct
MPKYNPEELLPAVAYYRYSPGGGQTEQSIEGQRRDCMAYAKSHGYVIVKEYIDRHLTGRNDKRPAFQLMMKDAELHRFDTLIAWKNDRISRNRRDALNYKDQLRKCGVQICYAEMDIPHGPEGILMESLMDGLAEYYSAELAQKIRRGMTESAHKCRALGSIPPFGLRINKEHHYEPDPTTAPYVRWIFQQYAQGVQITEICYALNAKGVRTSRGNEFNKNSLRTVLSNEKYIGVYEAKGIRTENAITPIVSQELFDMVQQRIPQNAHYGRKLNGPRQFPLSGIAYCAICGAPLIGDSGTGKNGKLHTYYACTTHKHKHGCTKKNIRQAKLEEMVYDATANMVLCPSITRAIAKQVEASAAADTSHAEEMQAVQARLKDIEKRINNILAAMEEGSFSKAVSSRLTTLETEQSRLEKQLKNLRRVKPNITASRVEYMLSTMCRNPAEQQPDHLKRLLQVFVERIDLSEETMSITYTLTKKSAVLSSTADNPTVKTLHYIDIKQCSTIACYGGADGSRTRVRKEIG

SEQ ID NO: 25552 - protein, 546 aa, synthetic construct
MAMNQAASDLVRISPNGTKVRTIPATVQRFAPAMPLRARLRVAAYARVSTDEEEQLSSYEAQVDYYTRYIQSNPEWTFVEVYADEGLSGTNTRKRRNFNRMIDDALAGKIDRIVTKSVSRFARNTVDTLTTIRKLKEKGVGVTFEKENIDTLDSKGELLITIMSSLAQEESRSISENVTWGWRKRISDGKVSVAYSHFLGYEKGEDGSMQVVESEAKIVQQIYGMFLDGQTPSSIAAFLTKQRIPTPAGREKWQSSTVKSILTNEKYKGDALLQKTFTVDFLSKKAKINEGEVPQYYVEKSHPAIVSAEVFDLAQYEMKRRAKKGRHTSAVSIFSDKLVCGECGAVYGSKVWHSTDAYRTMIWRCNGKYAVKGQPCPSPHLRDEEIQNAFVQAVNQVLEQKEEILSALQEALVGLTDTSGLELECERLQAEQDAVAQQMSRMIRENAEVAQNQAEYTARLQPLEERYEALKSAMLRAKEAISEQTGRHRKLEAFMRELRESSLLTVFDERVFLGAVERITVFKGASRGEKRLVFRFKDGRNVAVAL

SEQ ID NO: 25553 - protein, 438 aa, synthetic construct
MEQSMEQSKKMIIHKVKPAAAMPRLERVAAYCRVSSGKDAMLHSLSAQVSHYSELIQRRPGWAYAGVYADEALTGTKDDRPEFQRLLADCRAGKIDRVLTKSVSRFARNTVTLLETVRELKELGVAVYFEEQNIDSLSGDGELMLTILASFAQEESKSVSDNCKWRIRKDFSEGKPMNLPLLYGYRREKGRIVIDEREAEIVRFIFRSCLNGMGKGRITEELREQGVPCRLGGEWQSETVGGILKNEKYTGDALLQKTYIENHLTKRKCFNRGELPQYYAENTHPAIIDHETYEKVQTLIAERREKTNVQKDVAARYPFSGMIVCGCCGAHYHRRTNPTRITWQCVTYLRRGKKYCPAKQIPEETLLSLTREALGVPEITEENIRILAEIRIPCPNHILFVFKDGHETERVWQDRSRAESWTDEMKEKARAQMKRRHV

SEQ ID NO: 25554 - protein, 501 aa, synthetic construct
MQINIIEGKSQNNRKLKVCAYCRVSTDADEQENSLENQISHYEDDIRSNPDYEYAGVYSDFAISGFKDKRPGLQKMLADARKGKIDLILTKSVSRFARNTSIVLEAVRELKELNVGIFFELQNINTLSGEGELMLTIIAAFAQAESESGSIGAKMVYRRKYEKGIPVQYLDRSFGFTKDERGVFIADENEAVWVRKIYEMVADGYTVAAVKRYLNEQGIKTVSGTKWIDSTVFRLIENEIYKGDYIMQKHYVNEERKLVRNRGQVTSWYIEDDHEAIVSPELWQKANDLIAKKREYLATGSFIEEMNDKNYPYRNSLFCHKCGYPLYPRIYSNGNRLNWGCSGTKRYGKNFCEGINIPDGVVRAWKFEGNIYVKVVNSGKHIDRFSYTKEASWKRRNKKKVVESGVPELTEANYPFKDKIFCAHCGSPLVRHFNTKNHKVFWICNGNKRKGKSFCQGIRIPDEEVRAFGEIKKDIFIEGKVDRYGKKRYSYTCSATKSDSQ

SEQ ID NO: 25555 - protein, 463 aa, synthetic construct
MARSVTVIPAAPQRVTVSRGQVVEKKIRVAAYCRVSTDHEDQIHSFDAQVDYYTKYIKEHENYELAGIYADEGISGTNTKKREQFKRMIADCKAGKVDLVITKSISRFARNTQDCLQYSRMLKNLGIGIIFEKENINTLDSTGELLFTILSSLAQDESRNISENCKWGIRTKFRNGQMHLNTYKFLGYDKNEEGKLIINKEQAKTVARIYEEFLWGINPQQIAKELEEEGVPGCCGQTKWYTTTVIGILKNEKHKGDALLQKTYTADFLTKRQVKNNGEIMQVYVEDSHEGIVDKFTWEVVQAEFRRREEFMKKHGLTKYFYGSECNPFTSKVFCGECGHSYTKHSWKNRGVEQWQCKNHRTNGRLTCKNQFVDAGDLEKAFVQAYNELITEELNRERWKKQLESEDALGSYRASQMLELLEQGTLSSFAPEIAQLTVIEVTVLGAKKFEFEFVDGSKINVTI

SEQ ID NO: 25556 - protein, 681 aa, synthetic construct
MNSETSTNKILRAVLYERLSKEDGDKLTKEEKSESIKNQDLMLRSYAIEHGYEIVGVYNDEDWSGADSSRPQFNEMIKACEAGEIDVVIAKTQSRFARDMELIERYLHNKFLEWNVQFKSVVDHIDNTRRETKKTSQILGLTDEWYLEDTSINIKETLRAKRASGEFTGSFAPYGYDRDPENKNHLIIDPVASETVKQIFENYINGMGLKTIARYLNDNFVASPYEYKMSKGSNLKLAYLDNYLVYDYIEKAGLYKADISYINESREILHNLISYNIFSKDKKNFDNKCKLYLKNYSEKKMKIYYTTDNDIDYNNFDVKKWTLLRKDDLIPFDTTCIATVVEMLDRKHTINYQFDILLENNIEHEKYYFDIIQITNDEKKIIDYEKNIRKKCKWCDQMIKKILTDEVYIGNLVQSKTTNVSYKNKKKVKKDKEDWIRVENTHERIVSLEQWLKVQERLKQRVRANKDGYYNPFIHKLYCKCCGKIYCRTGDSNHVYFRCKDQQEKYKSCDNRSNISKDELNNFALGKINELLNRFYNEEQLKEFKEKDTDSDLFKSRINSLNKELIDVNKELQNKKTYFQHLYEDKINGLLDTDEYIILKSKYKDDSEKLENRAAKIKEELKLINDKKAILKTKETVYSKYKHIECIDIDIVSDFIDRIYIGKYDKETNTRDMKIVWNFES

SEQ ID NO: 25557 - protein, 442 aa, synthetic construct
MEALLYTRVSKEDQVKFGMSLDAQLESLKQYCSENNLKIRNIYSDEGISGGSITKRKAFQNMIEEAKPGDIILFTKLDRFSRNLLDANIVIKELTKKDVSIKAINEDDIDTSTADGKFIFNLKLSLAQREREKVSERINDVFEYKIKQGEVCTGKVPVGYMIKDKHLVLDPVKSVWIREMFDYFLKHQSIVGTCKWWNAKHPEQTMEYSTIKGSRLTSTFYCGKHPSGLNDHYCEPIISEEEFDKIQKLLKKNVKSNRTNHVYLFTGLLTCSHCGRRMGGFYKKWKDISITNYYRCQAYCGYRTCDMSHSISERKVEAYLLEDMVKKCDEMLSASLKHENTDEVKLQNKKANTEAKISRLKDLYVDGVLTKEEFDTKYKQLQDEIEAIKQEIKPKSNKLLELHDIDVKELYSKLNPENKRAFWRKYVDRIYFDGHDLKVVYY

SEQ ID NO: 25558 - protein, 546 aa, synthetic construct
MERMNTAPKRVRTIPATVQPLNVYSTEYLLKRVAAYCRVSTKQEEQLNSYETQVRYYTDRINREPGWKLAGIYADKGITGTSMKKRDEFNKLIRQCKRGKVDMIIVKSISRFARNTLDCLKITRMLRELKVDVYFEEQNLHSIDPSSEFYISIYGSVAQSESENISHNVAWGKARSAKNGNVFFAYKSFLGYRRGADGKPEIDPEQADTVRRIYDRFLAGNSLQQIANGLTADGIPTPMGRTVWQASVVQSILSNEKYKGDALLGKTYVEDCISKKVRVNAGERPQYYVENNHPAIIDAATFARVQEELARRASKRKVKQTGTTTEQGKYCGKYALTELLICGECGTPYRRCTWTVGGKKRIVWRCINRLDYGKKYCHHSPTMEEAPLQNAIMDAVLKTAQIDPNILQTLKQHIQLGLGAGAGEDKSVEIQIRIAQIDQEFKNLLNSVTAENQQELLTDPRIKELMTEKRQLEKELAEYAAAEQHRQNTASRLDNIFTILDGMKNHPLTYDDAVVRQILQCVIVESKEKVKVVFIGGMEVEAEVEQ

SEQ ID NO: 25559 - protein, 511 aa, synthetic construct
MRKTVTELAMPEQSQRLIRLAPYTRVSSGSDDQLHSFAAQVKYYTEYAAAHPEYELVDIYADEAVTGTRMDKRDDLNRLLRDCRKGKIDRIITKSVSRFARNTTELLTMVRGLKELGVSIYFEEQGIDTATIDLEMILTFPGMAAQKESETISENMRWSYQKRMESGDFNCCKAAYGYELIDGQLYINEAEAVVIRRIFDLYLQGCGKQAIADQLNADGIPRRYGYKTWHLNAIHYILNNERYMGDALLQKNYTTETLPFRKRRNRGEKPQYYVENSNPAIVSREIFQAAQALQQRKTAGGSAPKNRYPFSGVLRCPVCGHAYRRQVTNGTAFWLCSYKASGRSECASDRVPENTVKDAFMRMSGKLADNREELLGDLIQQLEKLQSRTSGSGERIYQLNRQIADVNAQDLVVAQLHSSGILNNAEYAAQSGELNRKVSELRSERRRILMEDEDNEVIESLRALDEIMADYAPTGDFDEDLFGQIVESITVVSKNALRFCLAGGLALAERI

SEQ ID NO: 25560 - protein, 536 aa, synthetic construct
MPKITVIPQTRNIFSAAPISSVSKRKVAGYARVSTDSDEQVTSYEAQVEYYTNYIKSNPRWEFVGVYTDEGISGLNTKHRDGFNQMIADALDGKIELIVTKSVSRFARNTVDSLTTIRKLKEKGVEVYFEKESIWTFDSKGELLLTIMSSLAQEESRSISENVTWSVRKRFADGRVSVPYSMFLGYDKGPDGNLVINPEEAKIVVLIYQMFMGGKSTVLIAKHLTEQGIPTPGGKTEWQSSTVKSILTNEKYKGDALLQKTFTIDYLSKKMKTNTGEIPQYYVEGNHEAIISPEEFDLVQAELERRKKYGRTISTTSIFSSRIICSECGCFYGQKVWHSNDKYRRLVWRCNAKFRKGKPKCSTPAIDEEQIKRMFMKAYFQLENCRDKVLDDVRKLLASITDFSVIDAQIAAKEEERDEINTLVRAEIQNNASRSNMQDVFDAKFERLRERYDAVEATLNDLHQQKANQLNRQSRIALFLKEIDREEPVEMWDERIWVTTLDSATIFPDGSMEFRFYNGQSIRVEPENKEKENTNG

SEQ ID NO: 25561 - protein, 466 aa, synthetic construct
MNRAALYIRVSTLEQAQEGYSVGEQKERLIAYCKAKDWIIADIYVDGGYTGSNLNRPGIQKLISETDKFDLVLVYKLDRLSRSQRDTLYLIEEVFRPKGVDFISMQESFDTSTPFGKAMIGLLAVFAQLEREQIKERTWMGRVARAKTGLHHGGGHIPIGYEYEDGHLVINPYEAEQVRKIYEWYLAGDSLKTITDKLQEVGYTNKYSSYNSWTSVRNILGNETYTGRLHFGDVIVDNAHEPIISKEQFDAAQVLRGKRQEQYGGQAFQSKHLLAGLIYCGHCGGRYYLRNTGKYSYYACYSRTKQMKSMVKDPNCMNKIWKGAELEAIVDAQIRELLSSPEMAAEIATSRSKPAPVSKNADIEKRLREIDKQIGKLMELYQHDDIPPELLGERINKLYNERTALESTLAPVVEDEAMPFDLVEALISDAAQVWDFADESQKRRILQSLVSRIVLTDDDVKIEWAF

SEQ ID NO: 25562 - protein, 528 aa, synthetic construct
MNNRAVLYLRLSKEDVDKISEGDDSASIKNQRLLLVEYANKHNMTITNIYSDDDQSGLYDDRPEFNRMMEDAKLGEFDVILAKTQARFTRNMEHVEKYLHHDLPILGIRFIGVSDGVDTADDNNKKTRQINGLVNEWYCEDLSKNVRSAFRAKKRAGQYVSPSCPYGYIKDPKNHNHLVIDEYAANVVREIYSLYLQGIGKARIGRILGERGILIPTLYKREVQGLNFNNPNALETTKVWSFQTIHQILNNEVYIGNLVQNKISTLSYKDKKKIQLSPDKWIRVENAHEPIISKEAFERVKALQKIKTKSINAQDPKYESIFSGLIFCADCKHSMIRKYNRRGQHEFVGYMCSTYKTHGNRVCTSHSIDYEELTDAVLLSIQREARKILSNDDVEELKKTSCRNRRIENIEKEIEFAEERKQKINKFKKKTYQSYLEELISKVDYKEYTANYDKELEKIEAEISGLEKRREDDKELESEYQEWVDKFSEYVDIDKLTRGIVIELIERIDVSEDGSICIHYRFKNPYED

SEQ ID NO: 25563 - protein, 542 aa, synthetic construct
MAERVYCLYRVSTSKQVDHDDQNQADIPMQRKACHDFADKMGWIIVGEEKETGVSGYKVSADDRDKLQLIKKYAEQGKFDILLVFMFDRLGRKSDETPFVVEWFAKKGVRVWSVKEGEQRFESHTDRLTNYIRFWQADGESQKTSMRTKTALGQMVEEGRFRGGNAPYGYRLEKSGILNKRKHEVYMLVIDEDEARVVRMMFDLCVSSGYGRWRLANFLNDHGIKNRKGQNWHDASVGGILHNPLYKGILRSGETYAGPFDELQIIAPDHFDLAQKLMLERTNERKEHRTVPLNTTGQSLLSGNIFCGHCGGRLVLTTNGKTVRRADGTAVYKKRIRYVCYNKTRRRQECTGQTGYTMHIVDGIVTEVLHQVFNKMQGASGDMIVGSAVQKQMAMIRSELQRARAENTKANKEYESLKAEVLKAIQGKSALPQDVLSEMLEDARQKVLSSSERITELTAELNDGNSKIEEMKAEFNQIVSWSKIFDDSPMEVKKMICGYIIKKVSVCKDYDIKIEFNINVEQFLNGIDGVSECDTSELSIAQ

SEQ ID NO: 25564 - protein, 457 aa, synthetic construct
MECVAYMRVSTEKQAEEGNGLESQKRDIENYCKKNEYIITDYYIDDGYTGANMDRPELQRLISDCVAKRIKCVVTFKLDRLSRSMVDGIYIIERVFQANNILFKCVHDSISYDSPMEQAYTQMMAVFAQLDKNTMMLRMRGGMLERVKQGYWMGGGNTPYCYNYDKEKGILVAIPERKKQANQALDLFIDGYSDAAIKKMLNFKHEHTVKMILTSPVNVGMIPYKGNLYQGLHEPIFDKDRFQLAQEVRKNRRKKKTVSLNKEPNLLTGLCYCGVCGCKMRYQKWGSESDAPKKIYCCSRNKDLFYLPNYNKDCDNSIEWAANIEKQVEAEIMKISLNLSSQKPVAKQSKIEIIQSQIKKEENRRKRLFNLYADGNDDVLDMIKQSDDTISSLKEQLETELSSKEANKKKSVAYENIKKIADVWDNIDKRNKNMILKSIIDKIIIVNGDIEIQLKNF

SEQ ID NO: 25565 - protein, 467 aa, synthetic construct
MARKIEVIPARPEFTNRAERKQRKTRLAVYCRVSTSQEDQLESFENQQIHYRDYVASHPTYELVKIYADEGITGTNTRRREEFKAMIADCEAGLIDMVITKSISRFARNTADCLQYTRLLRDKRIGVLFEKEDIFTLDGKGELLITIMSSLAQDESRNISENITWGIRARFQQGKMHLNTNRFLGYDKDKDGALVINEAQAEIVRRIFDQFLDGLSPDIIASRLNHDGIPGVCGIPQWKNSTIKNILRNEKYKGDALLQKYITEDYLSGRIIRNDGRVEQYYVKGSHEAIIPAEKWEIVQLELKRRDNYRIKHGLRTLGRYTDEQPFSNKVFCGVCGALFWRRTWYRLAGEVKIWHCTDRYDKDDRPGCPSLIIKEKDLHRAFVVAWNRIRDTRDERLPVWQKQKDTGTPLVAFYAERFIQLSAGEPMKEIDLSIVTKTLEHVVVSKNGSYTFYLLDGSKETVDLQK

SEQ ID NO: 25566 - protein, 529 aa, synthetic construct
MIMETYCIYLRKSRADAEAEARGEGETLARHEHTLLELAKRQRLPISKIYREIVSGDTIAARPQMQQLLQDVESGTYAGVLVMEVERLARGDTIDQGIVAQAFKFSNTKIVTPIKTYDPSNEYDEEYFEFSLFMSRREYKTIKRRMQAGRAAAAREGKYVGNIPPYGYDRKKIENDSGYTLVPNEKAEIVKSIFEWYTIGAVMPDGTRQRIGTTNIANKLHQMGVQTAKGGRWSQHTIRSILTNPVYCGVIRWGYRKNKNIIKNGVVTTTRPNAEDGYITVQGLHEPIISQETYNTAQGLSHAAAQIPKVNIDRALKNPLAGIVVCRKCGRYMTRRPYTRTHRQETLICKTLGCSCVASDLCLVEQRLLDSLETWLTKYAIPWGSAHKSSPEPSQDADRAALDALRKEQEKVKQQLNKCYDLLETGVYDANTFAERSEMQKKRISEIQQKMENLADNIKRAESRDDDIRAIIPKVENILETYHSIADAVAKNQMLKEVLEKAEYNKDHSTRWHGNADDFELVIFPKLPR

SEQ ID NO: 25567 - protein, 510 aa, synthetic construct
MQKRRTKYANSQGDNAVIYARYSSHNQKDTSIEQQIEVCTKYARDNGYRITNIYADRAISGKTDARPQFRLMMQDAREHKFDVVISWKSSRLGRDMLDAMTNDIILRNLGIKCFYTEENFDDTAAGRFALRNMMNVNQFYIENMAEDILRGMRDNAKKCRVNNGSPPLGYRRGDDGKYEIVPEEAETVREIFTKVLAGMAFVDIANELNARGIKTKKGAPWGRSSFSRLLSNERYIGTYKWSDIVIENGMPAIIDREVFEMAQKKIKGERPLRRRHNENGDYLLTGKLFCGKCDSPMTGMSGTSKSGAKHHYYACYSARKDGSCDKKAVKRDWVEKTVALFIKEHVLRDEVIEWMVDQYMVYQKATFESQRIMEMRNQLKDVQSQLDNLVDAIARGMYTDSTKDKLLKLEADKKEIEQDIRLATYNLKEYDREHVRCYFLSFKEGSVESKDYLKRLFDQFVTKIYLYDDEIRIAFSGTKDDSPVSFKIIDEAEELAVSSVRLSSASSHQA

SEQ ID NO: 25568 - protein, 498 aa, synthetic construct
MPEALNAVIYARYSSDRQTEQSIEGQLRECYAFAKANDIAVIDTYIDRAISGKTDNRPAFQKMIEDSAKRQFQAVIVYRLDRFTRNRYDSAIYKARLKKNGVKVLSAMENLNGSPESIIMESLLEGMAEYYSVELSQKITRGMRENALKGKALGGQRVLGYKVNSDCYFEIDETTAPVVVDIFKLYSSGKTVKEICDILNARGVKTARGGAFNKNSLHTILTNKKYIGIYKTKYGEIVGGIPAIIDKELFEMVALRMEQNKKAPARAKAEINYLLSTKLFCGKCRSAMVGESGTSKTGKKYYYYACVKKKREKACDKSNVKKDWIEDLVIQRTVTDILKDDVIEKIADRLVELQKAEAAESGTMLYLENSLAEIQVSIKNIMTAIEKGIITESTKTRLTELEDEKRNVEIEIAKESIARRIISREQIIYWISSFKDGDITSEKYRQQLIDTFVHAVFVYDDKIVITYNYSGENNTATISDLDLSSPPQVKKSEHYHQW

SEQ ID NO: 25569 - protein, 526 aa, synthetic construct
MQYCLYLRKSRADSEAEALGEGETLARHEKALLDLAKKLNLNVTAIYREIVSGETIAARPVMQQLLQEVEQGIWDGVLVMEVERLARGDTIDQGIVAQTFKFSDTKIITPIKTYNPNNEFDEEYFEFGLFMSRREYKTINRRLQRGRMASVKDGKYVANKAPYGYNRIRIENDKGWTLEINKEEADVVRLIFELYTVGEKQSDNTFNRLGTGFIAKRLNTMKVSPKRGKVWVVASIRDILINPVYIGMIRWNWRPQQKKMIDGQLHISRPRATDYMLCKGLHPPIISKETFDIAQDLMQHNPARPIGEKNTVKNSLSGIVVCGDCGRHMVRRPHTKYPDMLICSEPTCNNVGSQLRVVEERILQSLKEWLGEYKISWDITSPPVERISQVSIKKKALQKEQHELDTLNKQISKTHDLLEQGIYTTDVFLERSRALSLRMDEVKEHIAILDKELKTEITREDSAVNIIPKVEKLLEVYHDLPSPKAKNDMLKDVLEKVVYTKKERSKKGNLDNFNITIYPKIPKYIT

SEQ ID NO: 25570 - protein, 512 aa, synthetic construct
MNKYIAIYVRRSVSDKEKGNNSLSIPTQIADCIRFVGEEAFYKVYEEDGKSGKDIKHRPAFRQMFEDCREGLVSKIVVKKYDRFSRNMREYLNITDELDKLGVSVVSLCEPFNTDTKEGRMMRNNLLNFAEFEREAIAARVKDSYDTKAQETGFYQGGVVYFGYQSSRQTINGKTGSVLVPYDSAVTVKAMYDVYANPEASLRDVILYINENNLPMEAPKGDGTVTRGFDAPNIAAVLKNPLYVRADKNVYEYLLKNNYRIIDDVDAFDGKHGLFWHNYRSKTDRYVKVGYHEGLVDADIWLTVQEKFSRHQIPIRKGKVLRSWLAGMIRCGYCGHAVKVDYTHNPKLGNSWIYFTCSGYNSVRGCDSSRIKLKVKDVEQSVYTAMKAHIEEFEVAKKNESKPSTEEDRLKAEILKIDSETAKLMEKLADADEVLFGYIQDMIKVLHSNKMEYEKSLMLMERKIKKVNTKPLIEPLNRWDELTVEEKNQLAILMIDKIYLSNEKGVEIRFSF

SEQ ID NO: 25571 - protein, 567 aa, synthetic construct
MSEDKRIVALYVRVSTGYQVDKDSLPFQKKELKAYCEHVLHIDKKRIEIFEDAGKSGKNTKRPAFERMMEKVKHGQVSHVIVYKIDRISRNLVDFSLMYDDFKYNKVTFISLNEQFDTSSAIGEAILKIILVFAELERKLTSERVTDVMIGRAQSGLWNGARVPFGWDWDDENKCPVHSKTEAKYVKQMYSDYLNGGSSVSIAKSYNANKIPTKRGGEWTSKTIADVIRNPMNKGDYRYNYRESARGRKKPQEEVIYIKGIFEPLVSINDWEKANKLMDGRGLKMNSSGQTIMNKRCNVFTGLIFCGKCGERYNVRSKDSRQGSGFRPSSYACGKRSRKGTCDNQNVSDVAIAPIIINYIAAMADIAKHKRHIKTTKELEQMILKRISFSDIAGIAEDSLKDTLDLLYGKNGTQLWSANTVSQEDESENKQKLTELQAKLEKTERAIERLKKAFLFDDDGLDEKEFLEMKSALEINRVKIENEIKGMEAESISVNVNQVEFIKTASQYLLMHELNKDEIINYKELAITDDDSIKNLFNSVLDHITVIDKHITKIVFKNGLTHKLLYK

SEQ ID NO: 25572 - protein, 500 aa, synthetic construct
MRMCGYARVSTDEERQLDSLEHQMEFFSDFAKQNGHHLVNVYTDEGITGRQLKKRDAFNKMLSDSKLGLFDLLVVKDVSRFARNTVDLLTSIRQLKSRGIDVIFVNNSQKVLGESEFVITLLGAVAQEESSNLSKRVKFGKNITSKKGRVPPRIFGYDRIDNFTMEINEREAEVVREIYHLYIDEGLGCRLIAITLGEKQMKTKYGNDWNQRNIRRILENPIYSGHYINHRYTVVDFLEGTTKALPKEQHYHHDRPEWAIITPERFQQAQEILEQRRKQYATEYTHFTGRYSNRHLFSTLIRCKECGRAFSRRVTHYPNSDYIYWRCPTNNQYTAKRCSNNTIVREDDLIETLSTYLKEVVSNKESIAQEIARKFKEANAVEGSKPDAQALEAKKVKLKAKLEKYMEMYANDIITMEALKSKTAEINESINVIDDQLILLEGQRTQERTIESITNEAMAEIERFLSLQSATNMDLRRIIDSIIVDDKKKVKINLKITGNL

SEQ ID NO: 25573 - protein, 479 aa, synthetic construct
MSGHQTALTERKIEMAREVVHIPARPQVVGTRTTPEKKIRLAAYCRVSSEQDEQLNSFENQVTYYKEYISSHPDYELAGIYADEGISGTSTKRREEFNRMIADCEAGLIDMVITKSISRFARNTQDCLMYSRRLKDLGIGIRFEKENINTMDSTGELLFTILSSLAQDESRSISENCQWGIRSLFKRGIHHLNTNRFYGYDSDENGKLVINPEQAKVVKWIYESFIEGINPDVIVKILNEKEIPTCMGKSKWTCNQIKSILRNEKHMGDAVLQKTYTPDYLTHKSVKNEGQLPQYYIKEDHPPIVSQQLWEAVQLELDRREAFMKKHFLKSMGQYTDENPLSHRIICGICGHTFNRRTITRLEGRIKVWQCGQHYAKKGEHLCDGRMIREEELYKAFQLAWDHLVEERDNKAKDWKKKMAEGNALEAYRAEQFLRLTADGGRIKEGKPLVSTVLDHIAFERNGDLTIYFLDGSQVCVEP

SEQ ID NO: 25574 - protein, 540 aa, synthetic construct
MRRVQIKVIHPSVERELERKKVCAYVRVSTDSDEQEDSYENQIRYYKDKIESNPDWKFVGIYSDLGISGYKEKRPGFMNMIKDARNGGIDLILVKSVSRFARNTETVLKYSRELKRLGVGIYFELQKINTLSGEGELLLTILAAFAQAESESNSGNVSLSIRRKFEKGELNFPISKIYGYTEDADGNPILDEEKAKIVRLIFDLAEKGIWVTKIAEYLNKKQIPGIAAEKWNFGQIGKMLRQEAYMGDRILQKTYRDSRRRTRKNKGQVDQWYVKDTHPAIVTREQWYRVQDILLERNEELYDDTPISEEKNLNTHSTYPLSGKLYCPYCGRVLMHRWEGKKRYENWVCGLHRKISKDACPGICIPNRIASSWGEIKEPMTVLKYTDEYGMDRFTAIPKVEYEASEDCPYEVVKPEPKPERPKKPSYKKAPKPEKPRYTRNVYPLSGKLFCPNCGKVLTHKWNKGVEYWVCSTNRNKHRTENFEKCKGMYFPAEAAKDWGEITEPVTIIAYKNEYGHRLYTAMPKEEYERSPDCPYRKED

SEQ ID NO: 25575 - protein, 486 aa, synthetic construct
MNGVIYARYSSENQREESIDGQLRECTAFAQHNDIQIVGEYIDRAFSAKTDNRPSFQKMIKDSAKGEFDVIIVWKLDRFARNRYDSAHYKNILKKNGVKVVSATEAISSGAEGIILESVLEGMAEYYSAELAEKVSRGMKENALKCKYNGGSVPLGYYIDESKHFQIDSSVAPFVVECFEHYADGMTMKQLRDELNMKGVKNSRGGKLSIDVISRMLTNRKYLGEYTFQDITIKDGIPAIVSTSLFEKVQDRLTKTKKAPSSHKADDDYILTTKLFCGKCKSFMVAESGTNAQGKKYRYYKCVNHKKHQGCDMKSIRKDLIENMTIKYIREFLNDEDLINTLIDLAYDAQHKENEQLPLLRKQLAQTEKGIKNIVDAIEQGISTKSTRERLLDLEQRKNDIEMSISKESIENPMLTKKQFKFWFDQLKKLDISKSEQRQKLVDLFVNSIIIYDDHIKFFFNYKEHTETITFDELNNCSDLPDSPRP

SEQ ID NO: 25576 - protein, 463 aa, synthetic construct
MTTKVERCAIYIRVSTTEQMMHGKSLEAQKEYLTIYAKEHNMAIVGIYADEGKTARKELKKRKAIHSLLQDVEAGKIDVIIFWRIDRWFRNLSDFYKVQDILDSHNVRWISTSEPGINMETRDGRLQLNVVLSIGQNEVDTTSERIKFVNESSIRSGKLIFGDANMGYGYKSGIVDGQKRMIKDPDREHVVDAFYKYFFKHQNKCATLRYIQETYDPDFSFGIMRTLLSSEFYKGTYRGFPYCPAYLTEDEWNKLQKIQKRNVKATPSGRIYLFAGMIRCPVCGQLLCGTGCSSIINRKTGAKRTYCYYRCNRAMIDHICSYRHRLSQNLVENYLLDNLENEYKNYKVKCEKIEKEKEKQKKKQSPEKLIKELDRLNFLFQKGRIDWDYYNEEYGRVESELNALQNALPEPVTNYGYLEELLDTDFRTMYDQLSQENRRAFWRSIIQEIHVNEDHAITSVDFL

SEQ ID NO: 25577 - protein, 463 aa, synthetic construct
MARSVTVIPARNRQASGHRAAPQKKIRVAAYCRVSTDQEDQLHSFEAQVDYYTKYINDHENYEMAGIYADEGISGTNTKKREQFKRMIADCEKGKIDLVITKSISRFARNTQDCLMYSRKLKNLGIGIIFEKENINTLDSTGELLFTILSSLAQDESRNISENCKWGIRTKFKNGEMHLNTFKFLGYDKDENGKLIINREQAKTVRRIYRDFLWGLNPAQIAKELEEEQVPGCLGQTKWYASTVVGILKQEKHMGDALLQKTYTADFLTKRQVRNNGEVAQVYVKDSHKGIIDKETWNAVQEEFDRREKFMQRHGTDRYSYGSECYPFCEKIFCGECGSLFTRHSWKSRGIIQWQCKNHRKDGKVACTNAYVDNADLEKGFVKAFNRLVSEREKHMERWNAMKADGTPLEKIRAEQMMEATESGQLQQYVPEAAQLVLEEITIFGAKKYEFAFLEGSRVKVSV

SEQ ID NO: 25578 - protein, 501 aa, synthetic construct
MEIQIREGNGRQKKKLKVCAYCRVSTDADEQENSLENQIRHYKEVITSNPDYEYAGVYSDFAISGFKEKRPGLQKMLDDARKGKIDLILTKSVSRFARNTAIVLEATRKLKELNVGVFFELQNINTLSGEGELMLTILAAFAQAESESGSIGAKMVYQRKYEAGIPVQYLERSFGFKKDERGVYIADEEEAVWVRKIYEMAAQGYTLAAIKRYLNENNVKTVGGAKWLDSTVLRILENEIYKGDYIMHKYFVNEERKLVRNRGEVDAWYVEDDHEAIVSPELWQRAQDALEVKRDYLAEGSVIKEFTEENYPYMNKIYCAKCGYPLYKRIYSKGNRLNWGCSGMKRYGKSFCDGINIPDSVLRNAWHFEENTYIDEKASDKGVKEFSYLKERSWKRRHKKKQPPSFPKNTEAEYPYRDKIFCALCGSRLVRYVETKNHKVTWICNGRKRKGKDFCDGTRIPDHILKGWGEIKKDIYIQRKDDKNGKKRYSYTSKKPSGIGA

SEQ ID NO: 25579 - protein, 667 aa, synthetic construct
MAYAKNKVVKLWTQKKAALYVRVSTRYQVDKDSLPFQRKKLKEYCKFLEIDKYVIFEDDGYSAKNTDRPHFQEMMSRIRTGEFSHVIVWKVDRVSRNLLDFAAMYQELKDHKVTFISMNEQFDTSTAIGEAMLKIILIFAELERNMTSERVTGIMLDRAEQGLWNGARMPVGYRWNEQTKFPEPDPEEVKIVQLIFDRYEEWRSSIKVARFLNNKNFKSKRGGEWTSRLIYDIIRNPFYIGTYRYNMRESGRGPLKPESEWIVRENNHPGIISKDQFDRCNKIMDENASRRDTSEMRARKFVHTFSGHLVCSNCGSNMIACKDHARTNGWRPSIYRCAKRSRMMTCDNSKTVNETYLGTFVFNYIANLARVQKNFTKITSTEKLESELLKGEAFEAVSGIIPDSLNSTFQALLYSNLGNGTYVPDIALLSKFDEVQDHNQIDLLNTEIEKSKNAITRLTDVYLYDPASMTKEEFAAKKKELIKKIEEMEHQLAELLDNSEDNDLTDLSFIKKASAFLVTQRIVSKSFIDYVQMAQELDNEILKNFVDQIVDRIVIKDGRIQSITFVNGLTHEFFYSRPAELPVCKKCGGRIGSTCGCRTRTFSFNGKRYQRIKVGDPRDALYGQKNPVCPECYAKEGRWHHWLCGIELCPICGKPLQTCEHGPNGKE

SEQ ID NO: 25580 - protein, 513 aa, synthetic construct
MQENKQNLRFTALYCRLSSDDELKGDSNSIIHQKQILQDYALKHSLTPTEIYVDDGFTGTNFDRPDFKRLLSDVENDLVKTVIVKDLSRLGRNYLKVGYYTEVLFPEKGVRFISIADNLDTSVNDELNDFIPFKNIMNEWYAKDLSRKQRAVVKSKGNSGIRLATRPLYGYKKAENGDWLIDEPTAAVVQKIFDLYLKGYGPVSIANYLFANKVKIPSTIGLPKLNPEQNPYRWSKDTVAKILTCQDYCGDMINFKRSDADSLVIFPDRQEPIISREIFAEAQKLRLDRKPVRHDYSEPVLFSDLLLCADCKSRMYAQRRYHGTTSYSCSKARKTQGCTSHYINENKLIDCVKSDINKLIKNKGIVIKLAKEKMHIDTKTAQCANSQNLKNAKKRILQIDTILKNLYEDKVLGSINLATFKKLESDYLREQAELNKVIFEQSKIKVNLENRSKSICGFLKKLESYNNPVSELSRDLLIDLIDKIEICEATKNGNKRSQQVHIYYKEIGKINIE

SEQ ID NO: 25581 - protein, 556 aa, synthetic construct
MAKNVRKIEPTASVMSVLDLRPLLKKKRVAAYARVSTEKDEQQNSYDAQIDYYTALIQNNPEWEFVDIYSDEGITGTSIKNRDGFNRMIDDALAGKIDLILTKSVSRFARNTVDSLTTVRKLKEKGIEVYFEKENIYTLDAKGELLITIMSSLAQEESRSISQNTTWGQRKRFADGKMSLAYSNFLGYRRGAELGDMEIVEEEAIIVRRIYSEFLAGKTPYDIAKHLTEDGIPTPMGKAKWHTTVIESILKNEKYKGDALLQKTVTTDFLTHTHKRNEGEAPQFYVEKNHPAIVRPEVFEMVQEEFRRRKAAGGRMQSVSIFSGRIVCEDCGGFYGRKVWHSTSEKYRAYHWHCNNKFQKRCSCQTPTLKEESIEQAFLSAINSLIKKKKEIRENYALCLDAITDDSAYVARLDEINAECCRLQAETKSLITAAGRKNGGGLSEVNRQYEDYLAKFEGLQKEKSELSTQISKCAAKRVQVSSFLEELQKYDGPLKEFDPLIWQATLNHAVVHKNCTITFVFRDSTEVTRKIKNGVRKYVKRKASDPDNPESPGEKA

SEQ ID NO: 25582 - protein, 490 aa, synthetic construct
MSSEKQVIPIIQSPLEKRRKERVAAYCRVSTQAEEQLHSLAAQREFYEKSLSDNSEVEFVGIYADEGISGTRTRNRTQFLALIQDCRGGKVDRILTKSVSRFGRNTVDTLIFTRELRSLGVDVYFEKEKLHSISPEGELLLTLMAALAESESVSMSDNIKWGKRYRYKQGLVTALAISNIYGYRKKDGEIAVNEAEAVIVRRIYKEFLDGKNYDEIIAGLTADGVPTRKNATWYSRTVIGILSNEKYCGDCLFQKTFIPDPISHKTVVNCGEIPQFLVEDCVPAIIEKKQWLAAQEMRKRHQGVSKPPVKALPFRSLVFCGTCGKPCPQYSSHSEGRLLTAYHRCISWRDHTAAEVPGMTYVPPHKAGYNYNPTPELAAYRAIYKKPKSRPLLCTDVKIRTERFPKAFVQAWNLIVSKKQRYLPSLQSTAATSENPLTAYRAEEMVGLLETAGRLEEFDFSLMIRTLNRVEIMPTEKLSFIFQSGIRITV

SEQ ID NO: 25583 - protein, 428 aa, synthetic construct
MNKTVTDITPKLQKDLRKLRVAAYARVSCDKDAMLHSLDAQIHYYRNLICGNPDWEFAGIYADEAKTGTKESREQFQQLLSDCRAGNIDMVITKSVSRFARNTVTLLRTVRELKELGINVFFEEQNIKTLDADGEVMLTLLASFAQAESLSVSDNCKWRIRKGFEEGRASTCTMLGYRLVNGEITIVPDEAVIVKKIFDLYSDGCGQQKICNILNEEGICTRRGYAWYPSAVRLILENEKYAGDLKLQKVFVRDHLTKEKVVNHGELPIYWVENDHEPIISRDQFQAVQLRLKKQSEGCTASKGAESVFTGKIRCAGCGKNYRRKTTPYRVVWCCATFNSRGKKYCPTSKMIPEETLKTACATALGLPEFDAEAFEEQVIYIDACPGNLLRFHFHDGSEKELTWRDRSRSESWTQEMREAARQNALSR

SEQ ID NO: 25584 - protein, 487 aa, synthetic construct
MPEALNAVIYARYSSDRQTEQSIEGQLRECYAFAKANDIAVIDTYIDRAISGKTDNRPAFQKMIEDSAKRQFQAVIVYRLDRFTRNRYDSAIYKARLKKNGVKVLSAMENLNGSPESIIMESLLEGMAEYYSVELSQKITRGMRENALKGKALGGQRVLGYKVNSDCYFEIDETTAPVVVDIFKLYSSGKTVKEICDILNARGVKTARGGAFNKNSLHTILTNKKYIGIYKTKYGEIVGGIPAIIDKELFEMVALRMEQNKKAPARAKAEINYLLSTKLFCGKCRSAMVGESGTSKTGKKYYYYACVKKKREKACDKSNVKKDWIEDLVIQRTVTDILKDDVIGKIADRLVELQKAEAAESGTMLYLENSLAEIQVSIKNIMTAIEKGIITESTKTRLTELEDEKRNVEIEIAKESIARRIISREQIIYWISSFKDGDITSEKYRQQLIDTFVHAVFVYDDKIVITYNYSGENNTATISDLDLSSPP

SEQ ID NO: 25585 - protein, 580 aa, synthetic construct
MPEKIINCAIYTRKSTEEGLEQDFNSLDNQYEFCTNYLKSINDPALQLLPARYDDGGYSGGSLNRPALQRLLADIQCGLVNRVIIYKIDRLTREIRDFFKLLDIFEKYNVEFVSVKENQYYNTTTAIGRLMVNMFLVFAQFERENAGDRIRDKIATSKAKGMWMGGCPPYGYDIGDRCLVINETEAQNIRFIYQTFCNTHSLADTTEALNSGGIRTKCYTTRQGRTFGGRKFSVKTVQRILQNPLYKGMVTHRDKQYPGQHAAIIDAAQFDLVQAIFAAHKDKREARRCPPKASGGERETAALTGLIFCGCCGSAMTPSYCCKGDIRYHYYRCYRRASKLEDKCPINQIRTSEIDRVVMEQVLAILKSREFFVQYISHHHEFDVSTAFALFNNLDDVWNSLFETEKRRILRELLAKVTIFKDKIVLDVKKAGLAGVFAELSRNNRLAEVEYKENETFQISIAYRATRLANGAKIIVPATAKEESRFNGSLRLARQIAKGFAWRKMMESGLSLQELTASAKTNERDIRFAMRLSMIDPAIVESVLSGKSPEFLTYAFMKKHPIPLLWSDQRKLYGFEERKQ

SEQ ID NO: 25586 - protein, 412 aa, synthetic construct
MRIKVIKPTVAAENKRLKVCAYVRVSTDSLEQEDSLDNQTAYFKDYIQSNPAWEFVGIYADQGISGFKENRPQFQKMIADARAGKIDLIVVKSVSRFARNTETVLKFSRELKSIGVGIFFELQNINTLSGPGELMLTIIAAFAQAESQGASDNANLTYKRKFEAGMPVHDLKYTFGFDTDEGGNTYIVEEQAKTVRLIFDLAHKGVWPSKIKQYLNKNGITSCAGGKWDDTGVHRVLRNPAYKGALVLQKTYLDSNRIRHKNEGQKDQWYIADNHPAIVPPEQWDEVQEILLARSESLAPRPPQKPSQPRSSRTQYPLTNKLFCPLCGQKLHHKWSNQGKSEYWACSTNVKVGASACKGIWLPAEIANSWGDITEPTTVVGYKDEYGMQHFTAYPKAEYELSDDCPYTRKED

SEQ ID NO: 25587 - protein, 455 aa, synthetic construct
MKTVACYCRVSTEEQVKYGFSIQAQKDALTNYCKENDYKYDVYIDEGISASSMKKRKALQEMLEKSVAYDMILFTKLDRLSRNVLDANNINKILQDNHCTMKAIDEDDVDTSTADGMFMFNLKVSLAQREIGKTSERIRFVFKNKREKGEVTSGTPKYGYKIKDKKFVIDSEEAENIRNLYKYFISVNGDHKKTYSYFVKHFPGKGKDALFNYLRETAYIGKYKLYRKNVYLDNYIPPIMDKELFNEVQNLLPRVEKVLKKENIPSIFAGMLYCYYCKSRLVRKVDYRSKNKIINYFCDKQYKYKVGINEKQCQNSKVISDKSVEEYLINNLKYLCKPYISKSIIKTKPKPQKNNIKINSLKNKLSKLKDLYLDDLISKEDYKQDYIKINKEILKLEEEQKEKPQKDFTYLNELINKDIPDIYNTFNIDEKRKIWLKIIDKIYVKDGKIKEVTFL

SEQ ID NO: 25588 - protein, 506 aa, synthetic construct
MTNAVIYARFSSHSQSEQSIEGQLAECNAYAQRNGYTIVGEYVDRAISGTTDARPNFLKMIDDAQKKQFQYVIVYQLDRFARNRYDSATYKARLKKCGVRVLSARENIADDASGILVEGVLESMAEYYSAELSQKVQRGMNINAQKAISNGGSIPFGFKTVNKLYVVDDDTAPAVVRIFGMYANGHTIVEINDWLNSHGYRTTLGAPFNKNSLRHLLKNKKYIGTYCYNGVEIPDAIPRIVSDEVFNAVQERLSVNKKAPARTKAISEYLLTTKLFCGHCGEMMTGTSGKSHTGTVYFYYKCNNAKKKACDKKAVKKEVIESFVVAECRKLLTAGNIKKIAKEVVALCEKEADRSELNRLAKQIKDVERRQNNIMSAISECDDETTRKMLFAEMKRLSAEKDDAEKQYEIEKASNVVVTEDEIVFFLSSLKKGKADSLSYRKTLINVFINKIYLYDDRAVFFFNTSGKPKTVNAETLGFTTNNDEFAFNLSCFTNNPFSNADLRSC

SEQ ID NO: 25589 - protein, 545 aa, synthetic construct
MDIFAVRQQLKHANIREIPLRVTFYARVSTDSEEQALSNAHQIKYFTDKIAANPNWTLVEGYVDEGISGISTKSRISFQRMIEDAKAGRFDLIITKEISRFARNTVDSISYTRDLLRNGVAVIFENDGINTIEEDSEFRLTIMAGVAQDELRKLSSRVRFGHKQSIRQGHVLGTDNMYGYHKSGAKLTVDERMAPLVRKVFELYASGNHSLREVARLVGQEGLRNRNGGELSTRTLRNILSNPKYKGYYVGGKVEIVDMFTKKQKFLPEDKWVTFKDDGSRIPALVSEELWEKANAVLSARSEHVKARQGKMNMQNLFTGVIRCGACGGVYYKKENILRDGVRRTRWSCSTKLKGGRAACDSPDVYEEDLIEVIRALLLSDELDIERAAGQYEALLQEQRRDGEAEAQRAELNREIEKLSKQKTRLVQMNLDGAITDAELVELMRENRALLDAYAERLQALPEAETRAADIRAMVTELRQALQAARGDVFRALDRRFVERYIDRIEVRREGEGEVTVTVYPKFGGKAAARIGKNEVRCEDIFLTM

SEQ ID NO: 25590 - protein, 445 aa, synthetic construct
MNVIRGVGYIRVSTAEQATRGLSLDAQEAEIRTYAKAHGIELFNIYVDAGITARKRLDRREAFGQMMKDVDSGLIDEIIVMRLDRWFRNIYDYHKMMNEHLIPHGVNWSAVKEDYDTKTTNGRLMINLRLAIAEQECDTDGDRIRDIHDNQIANGIWIGGCAPPGYRIENKRLSIDPDMQPAVSYFFERLLSCGSVRRAMLDMNERHNLHFEYGQAIRMARSTTYCGVRRENYNYCPTYISQDEHAQIMAALEHNVRVRSADNARIHIFSGLLVCACCGRRLAANTVRKKSVTWTAYRCHRAFGDHVCDNRHLVDERKVEAWLLDYLENGLSDYIVSASVADAQPVVVDNTAAIRERQERVKELFINGFIDLQEYKRRATELEAKIQVPEKQPPRSMEKLKSLLERGVRAIYNDLSRGERQEFWRSIIREIPVNNGAVSGDPIFL

SEQ ID NO: 25591 - protein, 427 aa, synthetic construct
MRIALYARVSTEEQAIHGLSIEAQSEALEEWAKQEHANVVGTYIDAGISARKPASKRPSMQRLLADIERGKIDMVVFTKLDRWFRNIAEYYKVQEVLERHGVSWKTIHEDYDTATASGRFKVNIMLAVAQDEADRTSERIKAVFDSKRKRGEAVSGSVPPGIKICNKKFTVDEDKAPIMRDVFNFFIANHSVYATQRYAANTHGFLRDTSTLKRLLANPLYRGRVVDEATFDLAKELLSVRSQRNSGSPRGRIYLFKGMLHCDVCGGMMSGIVCKDFYYYRCNKHTFTGNCPNSKYIRESHVEQWLLERVVSECDAYNSRITRERTERPRIDDAGIRRKMSKLKDLYLSDLIDRDEYERDYTELRQTLEKVQEAEPPAKPIDVEYVRSAIAMYDDLERPEKKEFWMRIVKEIIAYPDGTFSFVLRNI

SEQ ID NO: 25592 - protein, 485 aa, synthetic construct
MPTSDLKIAAAYIRVSTDDQEEYSPDSQVRLIREYARKNGYLLPEEYVFQDDGISAATARKRPAFNRMIALAKEKERPFDAILVLMFSRFARNREESVLYKGLLRKQGISVISVKEPAVDGPFGTLIESIIEWFDEYYLINLSAEVKRGMSEKFLRGEAMGTAPFGYRIDSANKTFTVDPERAEIVCDVFRSYADGAGLRDIAVQLGDAGITTRRGNRPDSRFVEYMLRNPVYIGKIRWTPGHKTRYSRVHIADGVEVVDGKHPPIVSMDLWEAVQRRMDQRKAAYGRYQRQAPAAWMMRGLVRCSACGATLIMAGRSSSCPFLQCHSYAKGACHTSHSLSLRRANAAVLTGLRRSVGTLIFHMVPHLTSVPSRTADYGRLLEQERRRLARCKDAYQAGVDTLEEYRDNKARLEERIRRIEEQAASAAAAPESLDKAAYGKKAADILRFLETSADEGAKNEVLRSVVDHITYEKASRHLAIYFYT

SEQ ID NO: 25593 - protein, 506 aa, synthetic construct
MNAVIYARYSSDKQTEQSIEGQLREGYTYAERAGMTIVGEYIDRAISGTSDQRPDFQRMIADSAKRQFEAVIVWKLDRFARNRYDSAIYKSKLKKNGVRVFSVTEGIGDGDESIILEAVLEAMAEMYSKQLGQNAARGMRETARKGLCTGGQIPLGYVVGEDHKLHIDSKTAPAVQLIYTLFADGKTKTQIAKELNARGFRTKNGKLYTSNSFFRILTNPMYYGDYTYKCDIPRECPAIISRALYDKCQERNEATKRSRGMKTSEVEWLLRGKLFCGHCGTQMTGDSGTGRANEKHYYYTCHKRKRYKDCDKKSEKKEQLERAVCQKTVEYVLREDRIGYIAERVVEQYEKEFDASIIKEKEMSLVKLDAELDKCAESLMHTTVRSVVDRINARAEELEAAKSELEHELAQLRITSKARITVDEIITFLRGFCSGDVEDIQFRRKIVDTFINAVYVFDDKYVVYYNVRDCKQVTYSDMLASIHAPSDMSAHGSDCLLYGEPLLNVP

SEQ ID NO: 25594 - protein, 502 aa, synthetic construct
MEIQIREGNSRQKRKLKVCAYCRVSTDADEQENSLENQIRHYEEAITSNPDYEYAGVYSDFAISGFKEKRPGLQKMLADARKGKIDLILTKSVSRFARNTSIVLEATRKLKELNVGVFFELQNINTLSGEGELMLTILAAFAQAESESGSVGAKMVYQRKYEAGIPVQYLERSFGFKKDERGVYIADEEEAVWVRKIYAMAAQGYTLAAIKRYLNENNVKTVGGAKWLDSTVLRILENEIYKGDYIMHKYFVNEERKLVRNRGEVDAWYIEDDHEAIVSPKLWQRAQDALEAKRDYLAEGSVIEEFTEENYPYMNRIYCARCGHPLYKRIYSNGNRLNWGCSGTKRYGKSFCDGINIPDGVLRGAWHFDENMYIGEKQTDKGKKEFTYLKEASWKRRHKKKEPEPIPENTETEYPYREKIFCGLCGSRLVRHVNTKNHKVIWVCNGRKRKGKDFCDGTRVPDTIIKGWGEIKKDIYIQRKDDKNGKKRYSYTSKKPKGADRA

SEQ ID NO: 25595 - protein, 504 aa, synthetic construct
MEDFIYARQSVDKEDSISIESQIELCLREVGNNPYRVFRDKGYSGKNTERPDFQDMMAAVRAGGARRIIVYRLDRISRSVLDFANVISELQKYGVEFVSITERFDTSTPIGKAMLMIVMVFAQLERETIQQRVMDAYRSRSRKGFYMGGRVPYGFELENTVMEGIKTCMYKPIPEQIQVVQLIFSLYAMPQVSFADVVRYLSQNGIKNPNGKNFSRMRIRDIITNPVYAKADASIFEFFHGQGTEIINDISQFIGTNGAYLYTGNKAAKRKSISLDGHVLVLAPHAGCIDSDTWIRCRRKCLNVRQIAKPVKAKNTWLAGKIKCIDCGHALSLKSYPRKRSADARYYICNSKYVSASCDGVGAIQASGIEDIVFDEMSRKLKEFNKLSFKEKHGDPIELTKLKIRAEEIEKEIATLIDKIVSASTATMEYINERIDALDEEKKTVKEKIAQMSAEMYDRQNIGVISDYMSKWNDISIDDKLTVVDTLIESIHVGHGKVKIAWKI

SEQ ID NO: 25596 - protein, 525 aa, synthetic construct
MQKNVRAIPASVNLYNAETITNKKKRRVAAYARVSTDQEEQLTSYEAQVDYYTNYIKSRDDWEFVDVYTDEGISGTSTKHREGFNKMVKSALAGDIDLIITKSVSRFARNTVDSLTTIRKLKDIGCECYFEKENIWTFDGKGELLLTIMSSLAQEESRSISENVKWGHRKRFADGKVTVPFNHFLGYKRGEDGNLVIDEEQAVIVKRIYREYLSGSTAVAIAKGLTNDGIETPGHKQKWHASTVRSILTNEKYKGEALLQKYYTPDFLTKKQKVNNGEIQQYYVENNHPAIIEPEIFEMVRIEKDRRLMLNGKYSGTDILTSRIKCGECGGSYGAKVWHSSSKYKKVIYQCNRKYAGKEKCTTPAIRADDVEERFVNVVNSLFENKEEIISNLEMVLEKIGSKKELTEEKDKLEKSLTEQVEKIQELIEVNSRVAQNQNKYKKEYDALIQEYEETKNKYEQLESEISRKAAKHQMLKDYINTLKKQNKPLEKFNGLIWGSLLESATIKDKDTIVFRFKDGTEIVG

SEQ ID NO: 25597 - protein, 447 aa, synthetic construct
MRKITKLETKKIDLPKLKRVAAYARVSVERGRTLHSYSAQVSYYNDLIQKNPEWEFAGVYADLGISGTGIEKRNDFKRLLQDCEEGKIDIILTKSVSRFARNTVDLLKVVRHLKELGIEVRFEKENINSLTGDGELMLSILASFAQEETMSISKNVKWGIRKKFEKGIPNGGFIIYGYRWKDKKLEVVPEEAEVVRYIYDNYLQNKAYQKVAAELNELGYKAYKGGKFSPSSVREILSNITYTGNLLLQKYYIVDPIIKKEKKNTGELTQYYVENNHEPIISMEQYEKVQKEIERRNKLGQRANQSLHITCFTSKVKCPLCGKNYRRSGKKNRMGKDYTYYVWVCLTKSEKGAKYCGAKVIPEEELKIATCNALGWSEFDSELFDETIEKVVPIGEDMLEFYPYDGEVIKQEWHSTARSRGWNEERKRITIEKRLKTLEAKKNAKEC

SEQ ID NO: 25598 - protein, 545 aa, synthetic construct
MSGATNKITALYCRLSQEDARLGESLSIENQKVILLEYAKKNHFPNPVFFVDDGYSGTNYDRPGFQSMLVEIEAGRVGIVITKDLSRLGRNSALTGLYTNFTFPQYGVRYIAINDNYDTIDPNSVNNDFAGIKNWFNEFYARDTSRKIRAVQKAKGERGVPLTVNVPYGYVKDPENPKHWLVDPEAAAIVKRIFSMCMEGRGPTQIANQLWVDKVLTPTAYKLSHGRSTNAPAPEDPYRWDKRAVSLILERREYTGCTVNFKTYTNSIWDKKRHLNPVENQAIFPDTHERIIDDDVFEKVQEIRNQRHRMTRTGKSSIFSGMVYCADCGSKMQYGSSNNRDFSQDFFDCSLHKKNGSKCKGHFIRVKVLEGRVLSHVQRVTDYILRHENYFRKVMEEQLRVESSEKLTVLKKQLARNEKRIVDLKRLFMKIYEDNANGKLSDDRFDMMSQSYDAEQKQLEEESLSIQQEIEVQEQQIENIEKFVQKAHKYVHIEELTPYALRELVSAIYVDAPDKSSGKRVQHIHIKYDGLGYIPLDELEAKEKA

SEQ ID NO: 25599 - protein, 433 aa, synthetic construct
MSRKITIVSKPPKLERKKRVAAYARVSSGKDAMLHSLSAQVSYYSDLIQSHGEWLYAGVYADEAKTGTKDSRAGFQSLVADCRAGEIDMVITKSISRFARNTVTLLQTVREFKALGVDIYFEEQNIHTMSGDGELMMTILASYAQEESRSASENQKWRVKRNFEAGIPWDRTLLGYRMENNHYVIVPKEAEIVRRIYNEYLSGSGYQLIAKRLNEEGVPSRFGGKWNQSAVSRILSNHTYTGNLLLQKTFRENHITKRKIFNNGELPKYLAEESHEAIVDEETFQAVQEEKSRRSARFNKKSVSKKTYPFSSFMVCDNCGKNYRRKVTKSGPVWVCNTFNSLGKSACASKQIPEPILQQVTAEVLGKADFTGEQLRSRIQKIVVCNENVLIFRFRDGSEVTRKWKDRSRSESWTEEMKAAANQKALERNKHNA

SEQ ID NO: 25600 - protein, 537 aa, synthetic construct
MPKVTMIPATINPLTHLPKETTQKRRVAGYARVSTDSDEQFTSYEAQVDYYTKFIQSKPEWDFVKVYTDEGISGCNTKHRDGFKEMISDALAGKIDLIVTKSVSRFARKTVDSLVTIRKLKENGVECYFEKEGIYTFDGKGELLITIMSSLAQEESRSISENITWGQRKSFADGKIHLAYKHFLGYEKGEDGRPTVVEKEAVVVRLIYRLFLDGKTQAGICRHLESLGIPSPSGKEKWSKTTVTSILTNEKYKGDALLQKSFTVDFLEKKTKPNEGEVPQYYVEGSHPAIIDPDEWDHVQAEFNRRKALGNAYSGKSIFSAKLVCEDCGAFFGSKVWHSTDQYRRTIWQCNNKFKNKERCQTPTVDTETVQRLFIKAYNQMMCDRQQIVNDCEAMRRTLTDFKSLDDDVERQLEETQVIAELVKAIVKENATTAQSQETYIKKYEALTKRYDTAAAELKRLQELRASRSQKDKSMALYIRTLKKQPTVLHEWNDTIWTVMVEKAIVHRNGEITFVFYNGTKIRVGELNNRAAGLLIF

SEQ ID NO: 25601 - protein, 568 aa, synthetic construct
MKKKFSSVPDPDIQDAVIYARYSSHSQRDCSIEQQVADCELFAQQNGLRVVKIYADRHLSGTTDNRPQFQQMLKDAAHGHWPFVICWKIDRFARNRYDSATYKYKLKKAGVRVLYAKESIPDGPEGILLESVLEGSAEYYSASLAQNIRRGMRFNAENCKVNSGSIPFGYCKGPDGRFAIHETNAEIVRDIFRKAAAGVPFVDIATELNNKGLKTSRGGRWNKNSFVLLKNESYIGVYHFSDIRIEGGMPAIIDLGTFLAANERINANRRVRGRHHDGGDYLLTGKLKCAHCGSYMVGFSGTAKNGESHYYYGCQKRRRERACKKANVPREWIEKVVVKAALDYVLRPDVMEWITDAVMEYQEREAASSQLAALTAELEENQKATDNVMRAIEAGIITATTKQRLLDLETKAKDLKRAIELEKLSHVRLEREQILYWLEQFQGGSLQSQEFRRKVIDTFVSVVYLSDDHLRIAFNYSGQNRSEADFNLIMDAETASADYPINSFSLPLCPPHKKNPNLFPLEKGSDFSFAAFLTASFSFPVSAARLFSRCRLHIRSGCRLFRQRGGRE

SEQ ID NO: 25602 - protein, 556 aa, synthetic construct
MNQSNQIRKTALYCRLSQDDGIEGDSNSIQNQKAILQKFAEDHHFPSPCFYVDDGFSGGNFQRPAFQQMISDMENGEIGIIVTKDLSRLGRNQLHTGLYIEERFPMFGVRYIAINDNVDTDSSESNDLMPFKNLFNEWFIRDTSRKIRAVLKAKAERGERLGSRAPYGYRKAPDTKKLIVDEEAAAIVRRIFAMCASGSGPSQIARILKKEQILTPTMYAYTRYGITHTCLDTAHPYNWSDSAIANLLENEIYLGNTVNMKHSSRSYKDKRRVEHPREECMVFENTHPALITREVWDIVQRVRKNKRRLTKMEEQNKYSGLVFCADCGSNMVLHRAHTMSASYNHFTCRTYKKDWEACTGHYIRECVLDEVVLEDLRRVTAMARERPEEFAAYIGSRQSAEIQREIRRQEKELAAMRKRKAELDAIFKKLYEDSVLSRITTEQFQMLSSSYTEEQNQIAAGIPQKEADIQRLRETVSGTDGFLDKAKRYMDITELTPELLRLFIEKIVVHEKEVKWSKHAPQTVEIYYNGIGFIDKQHQDMESLQPLKAEEPRQAS

SEQ ID NO: 25603 - protein, 505 aa, synthetic construct
MNKSILSAMYLRKSRADDPGEDVMDTLHRHESILRAVAKRGKYLVHEDCIYREVVSGENIFSRPQMIRLLEDVTKGKYQSVLVVDIDRLGRGDMRDQGLILETFKAADTLIVTPEKVYDLNNEMDEELTEFKGFMARREYKMITKRLKRGREQTVRAGGFVADPPYGWKRAKINNLPSLEPHETEGPIMQMIVEMYGNQEPISTIQERLAAMGVYNRKGQPFCRSSIRHIATNPVNAGLIRWNRYKNIRKGQNGSPTGYEIENPPEDVILVKGVHQPQVSVEAYQKCVNVCKSRAAPSVKKGLHGVVRNPLSGIVICSNCGSRMQMQHSSTKDTRTLLCTHPGCMPGVDIVRAEAAMLDILRDKLEEIRTGQGKKQQDKALAALQKSAHAAEKNIQTLKKQQDKLYTLLEQEVYSLEVFKERNQVISQKLTDAQEQLKIIQDQVDDLSSRKEERLAQNIEDVLANYEYSSIKEKNRLLKTVVEKAIYFRKTRTSPFALDVTFINM

SEQ ID NO: 25604 - protein, 584 aa, synthetic construct
MRRLPLQHSTLFGYGQAKAPALVRCSAGDNMECSTKPDKENFMLAGVSIPRSLHMGNRPEGSVIMPRKKSTAADAPRLVAYYRYSGGSRQTEQSIEGQRRDCEAYARAHGMTILREYVDRHISGKTDDRPAFQQLVADSAAHTFDAVICWKTDRLARNRYDSAVYKKKLRDNGVEILYAAESNISGAEGIIIEGLMEALAEYYSAELAEKARRGMRESALKGKALGSSRPLGLTVDADKHYIIEPTGAEAVRYIFEQYAAGLSSSSIVERLNAMGLRTSHGGPFNKSSINRIIQNEMYHGVYVSKKFDVRIEGAIPAIIDNDLWERAQKMFERNRQSRTPHASRADYILSGKLYCGECGCLMKGVCGRSSGNGQMYHYYACPGRSIGRACTRKNIPQDELEAMVVNSVADLLLEPALLEQIADAIVELQQAEAARPDPEKQALEKSLSDVRSKIQNILTAIENGTSSAALSARLADLEQQESTLSYQLSSLTAKKPLTFTRDQILFLLQQFRVSPSERTKAYCRRLVDTFVDHIELTNTELILYFNLSDETVDKNKKAPRSNPSEESSTEKRLVRVARIELTAS

SEQ ID NO: 25605 - protein, 491 aa, synthetic construct
MYLRKSRAEEGQSTEEVLAKHRAALEELADRLGLPVDGVYEEVASGEKLYARPEMLKLLERIRAGEVEAVLCMDIDRLGRGGMADQGTILDAFRESGTLIITPEKTYDLTNDVDIEMTEFKAFFARAEWRAIRKRMRRGLMQTIEAGGYTANAPYGYRRCRIGKLPSLEVIPEEARFVRYIYERYLAGIGAQTIAQELNAMGSTPRRGAEWNRNTVRHVLRNPTFAGKVAWNRVKHYRPGTHGKDKHHVVYTPEGEWLMVDGVHEAIIPWDTWLEAQERRKQRYIPPSNTGQRANPFAGIIRCSKCGNNMQRMGTNKGEPYLLCTTKGCTAGAKFEYVEERMVELLYDELARLRLLIDSGAAPNVDALEAALAAAQREQERVQARIPRLYEFLEDGTYDRSTFRSRLDAAEKELAELASKRADLERQIDERRRSDPRKAAAALENLVQLYPTMSPADKNSALKALGVEVTYTKEKKTKPRDFTLELQLRDF

SEQ ID NO: 25606 - protein, 592 aa, synthetic construct
MKKRINTNSAARAVIYARYSSANQRDCSIEQQVEKCRELAAREGVTVIEIYADRAVSGKTDRRPNFQRMMKDASLRQFDVVLAWKSNRMGRNMLQAMMNEEQLRSNGIRTIYAEEDFDDTAAGRFALRNMMNVNQFYSENMAEDISRGLMDNASKCMSNGSLPLGYKTGKDQKVVLDEAEAAIVQEIFTRVSCYEPFIDIARDLNRRGIKTKKGAEWGRSSFHTICRNERYRGIYIYRDIRVEGGMPRIVSDELFYKVQEVLKVKKNPQGRRKRSGYEEYLLTGKLYCGHCGSPMTGIAGTSKTGAMHYYYTCQKRRTDHSCDKKAVRRDQIEKAVAIAIQQQLLTDENIQMMADETMAYNARTEIKYRLQSLQQQLYSNETSTANIMKAIEMGIITDTTKARLLALEQEHGQLLAKIDTAKAEMVPINREDFVSLLDIYRTGDVNNKKYLAALFDTFLVRVDLYDDHFKITFDPTGGKMPVDIPIGAEDFPESPGDSPESSDFEASPQDAEKFVLALHNRTKILERLFGDFFVLMICLGCQASPPCGTGGSRFSAIDTATAPVLHWNRGCTILHPLYAMKSGRGLPSFSHW

SEQ ID NO: 25607 - protein, 591 aa, synthetic construct
MAKITRVEQAVPTIKTKKKVAAYARISMESERMNHSLSAQISYYSSLIQKNPDWQYAGVFADDGISGTGIAKRDEFKRMIEAADNGEIDIILTKSIQRFARNTVDLLQTVRHLKDIGVEVRFEKEHINSMSGDGELMLTILASFAQEESRSLSENCKWGIRKRFEKGIPNGHFRVYGYRWEGDDLVIVPEEAEIVKRIFQNFLDGKSRLETEREFAAEGITTREGCRWVDSNIKVVLTNVTYTGNLLLQKEFISDPISKQRKKNKGQLPQYYVEDTHPAIIDKATFDYVQEEIARRKELGPRANKSLNLTCFSGMLKCPHCGQSYMHNKRTDRGFMEFWVCGSRKKKGGRCPVGGSINHENLKKACAAVLGLDEFDEDAFHDRVDFINVPERGMLEFHLKNGEVITKDCPNTGHKDCWTAEYRAKTSEKRRKRPNCKGSSVMTGKIKCVGCGCNFRRATQPSSTSESGKAYYWRCAERDGCETVGLREDVLKPFIAETLGIAEYDDGEFEKRIDHIDVLSATEMVFHFKDGRTVSRAWEQPKRVGRPWTDEQRAKFKESIKGRYTPEVRQQMSEHMKQLRKERGKAWRKEK

SEQ ID NO: 25608 - protein, 508 aa, synthetic construct
MKKAIAYMRFSSPGQMSGDSLNRQRRLIAEWLKVNSDYYLDTITYEDLGLSAFKGKHAQSGAFSEFLDAIEHGYILPGTTLLVESLDRLSREKVGEAIERLKLILNHGIDVITLCDNTVYNIDSLNEPYSLIKAILIAQRANEESEIKSSRVKLSWKKKRQDALESGTIMTASCPRWLSLDDKRTAFVPDPERVKTIELIFKLRMERRSLNAIAKYLNDHAVKNFSGKESAWGPSVIEKLLANKALIGICVPSYRARGKGISEIAGYYPRVISDDLFYAVQEIRLAPFGISNSSKNPMLINLLRTVMKCEACGNTMIVHAVSGSLHGYYVCPMRRLHRCDRPSIKRDLVDYNIINELLFNCSKIQPVENKKDANETLELKIIELQMKINNLIVALSVAPEVTAIAEKIRLLDKELRRASVSLKTLKSKGVNSFSDFYAIDLTSKNGRELCRTLAYKTFEKIIINTDNKTCDIYFMNGIVFKHYPLMKVISAQQAISALKYMVDGEIYF

SEQ ID NO: 25609 - protein, 576 aa, synthetic construct
MKKNFKMPGSGSETPIRVAIYVRVSTVYQIDKDSLPMMKQDLTSYCKYILNTDDFVIFEDAGYSGKNTDRPAYQKMMSQIRQGLFTHLLVWKIDRISRNLLDFANMYAELKDLGVTFVSKNEQFDTSTAIGEAMLKIILVFAELERNMTSERVTATMINRASNGVWNGGRIPFGYSYDKPTQVFSIDPEENKIYNFMVETYEDTQSIVHTSRRLNEAGYRSRNGNMWSPVAVWTILRNPWYKGVYRYNYYKIPGRKAIKDESEWVIVENHHPASIDPDRFDRIQATLDKNARYRNTPGRKTAQKNVHVFSGLVWCAECGSAFTASPGKLHVSGYRPSKYGCPNVRKTKTCHAKYTSDVVLGEFLLNYILNILNAQKQFAYIHSTDDLQKRLLHGSTFSNVDHVDPDGLASLLNMLEKCSGSDPVLLKRPRSKPKMDPELKRMMADQKKQQRALDRLNDLYLYSDDSISEREYLVRKQQITDRLQEINEAIGMMSQEPWMRTMNDEEFIRQASSFILTQKLADKQYIYYENLAESLDPEILKNFFVSILDSIILRDGRPETLVFRNGLSHTFTYKDS

SEQ ID NO: 25610 - protein, 514 aa, synthetic construct
MAKRKFNKGGEVRLVAYYRYSGGSGQTEQSIEGQRRDCETYARLHNMTIQKEYVDRHISGKTDDRAAFQQMITDSDKGAFDMVICWKTDRFARNRYDSAVYKKRLRDNGVEIVYAAESNIAGAEGIIIEGVMEALAEYYSAELAEKMRRGMRESALKGQAISRCRALGLKTDEHKRFVIDEKTAPTVRFIFEHYAAGESATSIVDKLNAKGLRTSQGNPFNKSSIPRIIQNEAYRGVYISKSYDVRIEGAIPAIIDDELWERAQTMLKLNRQLKAKNEPKADYILSGKLYCSCGSLMRGMSGHSATGEVYRYYTCPNKDCHLRNIPKDDLEGKVMQSIVDHLLQPESMEALAEAMVEVQKADVEKPNAERVAIEQSLSDVRRRSKNILDAIENGTANAQLCARLDDLTEQERTLNFQLSALEKEKPVVFTKEQYLFLLEQFLVEPSERTPEYGRRLVNTFVTSMVVSDRELVINFNVSEETVNKNKKTSQTNLQKESSSGMRLVRVARIELTAS

SEQ ID NO: 25611 - protein, 580 aa, synthetic construct
MARRKTALRGVSASTRITKVAIYIRVSTIHQVDKDSIPMQKKDLIAYCQLILGTDNYEIFEDAGYSGKNTDRPAFQDMMGRIRKGEFTHVLVWKIDRISRNLLDFAEMYEELQSLRVTFVSKNEQFDTSTAIGEAMLKIVLVFAELERNMTSERVTATMISRANNGQWNGGRVPFGYSYDSGTSTFSIREDEAVVCRRLKDLYLDNKSLVYTARALNEDGYKTRAGADWTPTAVWIIASSPFYAGIYRYNRYKGTENRTLNPEEEWVMIPDHHPAIFTLEEHEAMKSSLKTNARYVDNPVGKPHATANIHIFQGIAYCGKCGNKMVSTPGKKHADGYRPSNYSCPLHRKSKKCDNATVNDMIVGEFAINYILNMLNAKKTFSNIDTPEELQRHLLTGSTFSDISSIEEDGLNDFFNLLSRYGSDNSYVFAIKTPRRKKASVNPELAALRKEKEKQERALQRLQDLYLYSDKSMSEKDFILRKSEISDRLKNINAQLGLITQNPDSLLSDEEFIKQASHLLIQKELKGRKYIYYKNLATSVDPEILRTYMETILDSMYIIDGRISSIVFKNGLTHKFIYKN

SEQ ID NO: 25612 - protein, 463 aa, synthetic construct
MTTKIERCAIYIRVSTTEQMMHGKSLEAQKEYLTNYAREHNMAVVGIYADEGKTARKELKKRKAIHSLIKDVEAGKIDVIIFWRIDRWFRNLSDFYKVQDILDSHNVRWISTSEPGINMETRDGRLQLNVVLSIGQNEVDTTSERIKFVNESSIRSGKLIFGDANMGYGYKSGIVDGQKRMIKDPDREHVVDAFYKYFFKHQNKCATLRYIQETYDPDFSFGIMRTLLSSEFYKGTYRGFPYCPAYLTEDEWSTLQKIQKRNVKATPSGRIYLFAGMIRCPVCGQLLCGTGCSSIINRKTGAKRTYCYYRCNRAMIDHICSYRHRLSQNLVENYLLDNLENEYKNYKVKCEKIEKEKEKQKKKQSPEKLRKELDRLNFLFQKGRIDWDYYNEEYGRIESELNDLQSTLPEPVTNYSYLEELLDTDFRTMYDQLSQENRRAFWRSIIQEIHINEDSTITSVDFL

SEQ ID NO: 25613 - protein, 455 aa, synthetic construct
MKTVACYCRVSTEEQVKYGFSIQAQKDALTKYCKENDYKYDFYIDEGISASSMKKRKALQEMLEKSVAYDMILFTKLDRLSRNVLDANNINKILQDNNCTMKAIDEDDVDTSTADGMFMFNLKVSLAQREIGKTSERIKFVFKNKREKGEVTSGTTKYGYKIKDKKFVVDPEEAENIRNLYKYFISVNGDHKKTYSYFVKHFPGKGQDALFNYLRETAYIGKYKLYRKNVYLDNYIPPIMDKELFDEVQNLLPRVEKVFKKENIPSIFAGMLYCYYCKSRLVRKVDYRSKNKIINYFCDKQYKYKVGINEKQCQNSKVISDKSVEEYLINNLKELCKQYISKSTIKTKPKPQKNNIKINSLKNKLSKLKDLYLDDLINKEEYKQDYIRITKEILELEEAQKEEPQKDFTYLNELINKDIPDIYNTFNIDEKRKFWLKIIDKIYIKEGKIKEVTFL

SEQ ID NO: 25614 - protein, 513 aa, synthetic construct
MPEVRLITPITRQSTKKMQVAAYCRVSSNSADQLNSYAAQIRAYKKLIGERDDWKLVDIFADEGLTGMKSETRDEFQRMIRMCELKQIDLIITKSISRFARNTKDALAYVRKLKLLGVGVQFEKEGISTLSMGDEMLLNTFSALAQEESQSISMNQRLSIVKRMELGEYVDSNAPYGYRLVDKMLAVYEPEAVIVRNIFTLYLQGFSTSEIARELNKLNIPTKSGKETWRPSRVAYILRNEKYIGDSFYQKTYRETTVPFNQHTNRGQEDRFYAKGTHPGIVDKNVFDTVQTLIEKRKENFSKVTTQNIYPLTSRIQCSECGSFYRRRIVSGTVKWVCSLHKDDSTACDSNYYNEERIYDGFISLVNKLRFSEDNILGQVISRLEMTLAAMKRNNTAARDLSKSIAELNAKLLMLEQLRSKGYLAPEVYQAQANEISAELAKLKDVRQEKFNSKAAIMLEEVKKLKMLIFELEEPLDAFDEKLFLEIVKSIQINKEDEMSVELLGGLRFRERI

SEQ ID NO: 25615 - protein, 543 aa, synthetic construct
MEVTKVPKKIVTVIEPKRSMTVDKEKYRQKRVAAYCRVSTDSEEQLVSYTNQKKVYTEMIASRKDWCFAGLFADEGKSGTRADKRPEFNKMINDCLAGKIDYIITKSVSRFARNTVDCLDYVRMLKSKGIGVYFEEQQIDTLKTDSELYLVIYAGFAQSESESISKNITWSVRKKFEEGTPVFMYKRFLGYKKGADGEPEIVPSEVAIVERIFNLYLAGETVDKISKMMQAENYDIPGKSISFSKGMIMNMLSNERYCGDAILQKSVTIDCIEKKRKKNTGEAPMYYVQNNHPAIIDRVTFNKVQEELARRKTKTPGSAKSSITSTGKYSRYALTDVLICGNCGTRYRRVTWSRNGVKRIVWRCISRLDYGKKYCSDSPTIMEDKLQEAIVRAVNKFNEQDNATYKALMRATISEALGLNGDPEEVDMLERKIEALNNKMLTLVNESVSSGDGIEAHESEFMTLSQEAELLKQRIAAIQESTAKDNGEQSRLEQIQAIISERESKCMEYDDSIVRQMVECIKVYPGGKLEIIFGGGYLVEESV

SEQ ID NO: 25616 - protein, 548 aa, synthetic construct
MKFKYPAMGTTKNAVIFARYSSHSQREESIEGQLRICHEYAKAEGLAIVGEYIDRAISGTTDARPDFQRMIDDAKKKQFSYVIVYRLDRFARNRYDSVLYKHELKQCGVKVVSATEGIGTGDESILLEALIEASAEYYSMELSRKIKRGRQDSAMKGNFLGGAVPLGYKVVDSKFIIDDETAPIVRYIFERYAAGIGKKQIIDELTAKGYMRRTGKPFTYRAFDSVLRNRKYTGEFTQTGITVEGGCPAIVDTEMFEKVQARLEINRRAPAKAKAKTEYLLSGKMFCGYCGEPMIGISGTGRHEKTFYYYSCVGRRGKSGCKKQHEKKDFIEWYVCEQTVQYMQDPERLSHVAKRIIEINDAEFDGGKVKELERAVENCDNDIRKLVDALTTIPDAGRAALYDKIERIGAAKADMEIDLAKVRVLSEVRYKQEDVEAWIRSMCRGDLMDFEFRRQLIDVFINSVYLFDDRVVIVYNIKNGKQVSAIDVLNAVEELDGVELSSDSTEDGNAGGSGSFLVADAPPYMKNPNLFPIGNGFGFLIFIKDIID

SEQ ID NO: 25617 - protein, 635 aa, synthetic construct
MPKITRIEPGIKALPAKKKVAAYARVSKDTERLMHSVSAQVSYYSDLIQKNPEWEYAGVYADFGITGTLVAGRSEFVRLLEDCEAGEIDIILCKSISRFARNTVDLLNTVRHLKDIGVEVRFEKEQINSMSGDGELMLSILASFAQEESRSISENVKWGIRKRFKNGEIGAANKHILGYQYDDEQKKYIIIPEEAEAVRWVFQMYIDGVTLRDIADRMNKAGIRTTLGNDFQEASVRQLIFNEVYAGDIRRQKCYIEDPITKRKVPNRGELPQYYITDSHEAIIDRNTYAKVKAEMERRSSLVNPTYCFTGKFKCAVCGANFTRKKSNVRGKEYVDWICRSKKEHRVTCKSHNYPEHKLMEICAELMETDGFDEAAFTESVKSITSLADGSIEIQLYGGKIRRWQMPPKPVKTKKIKPESKHPRNLFDGKIFCGKCGRRFGRAMSDTTDGGHLYWYCRAKSNHGSTCDSVNYPDKEIRDIFCRVMGKKTFDEDFFTKTVDRMVVQASGSIDFHLKDGTVKTFETLKLRSNRHVTTSTDEFTGMIQCACCGNLYHRYCGYGKYVYWRCSGKHKVRTECNGQDMADFNIRKVSAYILGMDDFDGKAFTEQIDHITALEDGSLVYIFKDGRAKKWQRT

SEQ ID NO: 25618 - protein, 526 aa, synthetic construct
MAKNVITIPATISKFTAFPLGSREKRKVAAYARVSTDRDEQLTSYEAQVDYYTNYIKGREDWEFVAVYADEGITGCNTTHRDGFNSMVEDALAGRIDLIITKSVSRFARNTVDSLTTIRKLKESGTECYFEKENIWTFDGKGELLLTIMSSLAQEESRSISENCTWGQRKRFADGKVTVPFKRFLGYDRGEDGNLVVNEEQAVIVRRIYGLFLQGKTPYAIARQLTEEGIPTPGGKKNWGKKTVESILTNEKYKGDALLQKVYTTDFLTKKKKKNEGEVPQYYVEGNHEPIIPPAQFDRVQKEMQRRCGDTDRHGCVSIFSSKIRCGDCGGFYGSKVWHSNDKYRKVIWRCNHKYDDGNQCSTPHLDEDTIKALYLKALQILGEERNEIIATFESIKDEMYDTADMEKEQAALHEEVMVVTEMVEQCISENAHVAQNQKDYQKKYDALSERYDRTKERLDKVNGRIMERQARRELIEAFLRDLAEMDKDVQEFTDDLWFNLLDHVTVFSKKDVMFTFKNGTEIRVK

SEQ ID NO: 25619 - protein, 512 aa, synthetic construct
MNAVIYARYSSHNQTEQSIEGQLRDCYEYAKRNDLTIIGEYIDRAISGKTDERPDFQRMIKDASKRQFERILVWKLDRFARNRYDSATYKHKLKQYGVKVISAMENVGEGDESVLLEALLEASAEYYSLDLKKKIARGMRESALRGKFVGGTLPWWCRVDDEQKLTVIDERAAIVREAFMRYDSGEGSKSIVSDFAKRSLRSNRGVPVTLSWLLSILKNRKTIGEYTYNGIEIPGGLPAVVDKPLFDRVQDRIARNRRTGGGEARAKTEYLLQGKLFCGLCGSPITAECGQNHKGVVYNYYACSLKKKKHQCKKANERKDFLEWYVVEQTLDYVLTPARTEYIASAIVAEYEREFDKSGIRVLEQKIALTEGEIQKTMDLCIQATTDAMRDRFMKRCEELDAKKADMEIDLSKLRVAASIVYTKDEVCAWLRQFCTGDCFDPAFRRRIIDVFINTVYLYDEKLIIYYNLRDSRQVSYIEAIGASSEIENLLPVPDNKKSAAECSTADGDGGA

SEQ ID NO: 25620 - protein, 587 aa, synthetic construct
MEGLFLFDGGIMKKNFKMPGSGSETPIRVAIYVRVSTVYQIDKDSLPMMKQDLTSYCKYILNTDDFVIFEDAGYSGKNTDRPAYQKMMSQIRQGLFTHLLVWKIDRISRNLLDFANMYAELKDLGVTFVSKNEQFDTSTAIGEAMLKIILVFAELERNMTSERVTATMINRASNGVWNGGRIPFGYSYDKPNQVFSIDPEENKIYNFMVETYEDTQSIVHTSRRLNEAGYRSRNGNMWSPVAVWTILRNPWYKGVYRYNYYKIPGRKAIKDESEWVIVENHHPASIDPDRFDRIQATLDKNARYRNTPGRKTAQKNVHVFSGLVWCAECGSAFTASPGKLHVSGYRPSKYGCPNVRKTKTCHAKYTSDVVLGEFLLNYILNILNAQKQFAYIHSTDDLQKRLLHGSTFSNVDHVDPDGLASLLNMLEKCSGSDPVLLKRPRSKPKMDPELKRMMADQKKQQRALDRLNDLYLYSDDSISEREYLVRKQQITDRLQEINEAIGMMSQEPWMRTMNDEEFIRQASSFILTQKLADKQYIYYESLAESLDPEILKNFFVSILDSIILRDGRPETVVFRNGLSHTFTYKDS

SEQ ID NO: 25621 - protein, 675 aa, synthetic construct
MRRLFFCNRRILPADAMGKVRYIVDPRMDDEHSLGNRKGGDGLKKKKCYIYTRVSTMAQTEGYSLDAQQEKLRKYAEYKSLEIAGEYCDAGKSGKSIKGRPAFQQMMEDVASQKDDVSYVLVFKLSRFGRNAADVLKSLQLLMDYEVDLVSVDDAIDSSTQGGRLTLAILSAVAEIERENITVQFLSGKMQKLKEGGWPGGPIPYGYRKEDDKLVQNPQEAEIVKLIFDLYLQDGMLATSIVRHLNDNGLTRMIKGKVSPFKYDFITTVLDNPVYCGKIFYGRRTNNKEQQKQKREVLEIQGNHEPIISVKQWEQVQQKRKEYSGRCQKIDEPERVSILSGLVKCPACGAGMIATKNKHVNKNRGGHYKTLHYYSCGNARKQNGMTCKFRHTYNQAKVDSAVLEMIGKLFTVPSFQKETSKWFQGKDSIEELMEQLKTIRKKLYHQEQQKRRLGEILDNLDILADDYDETYDKTQDEIDGVYDEIERLEILLSQTKKKLEAVEQGTKALKQVENLIQNIPKFFEEMTCEEKREFYRLLIEKIEMYPEETPDGRIVKSISFKIPVFYEEWEPKTELIADEVITYTLDTSEVGITSAEAKATYVELKKYILDRYGTKVSSLYIAQIKRKYGIDMGENYNKPDDPNKRVPKCPKAKEEMIIEALKHFKMLEPDVMMIA

SEQ ID NO: 25622 - protein, 666 aa, synthetic construct
MKKRTKCYIYIRVSTAMQVDGYSLEAQKERLTKFAEFQDMEVVREYCDAGKSGKSITGRPEFTQMLQDVADDKDGVEYILVFKLSRFGRNAADVLNSLQYIQDFGVNLICVEDGIDSSKDSGKLTITVLSAVAEIERENILVQTMEGRKQKAREGKWNGGQAPFGYTLDSKKGMLVVNPDEAEIVKIIFNKFVNEGLGADSISNYLNQHGYVKTKYRSHELNYFTRSLVRKILDNPVYIGKIAYGKSSTEKIKGTRDQYHRVQNDEFLLAEGLHDAIIDLDLWEGVRARREETGVKWVKTHSLEHEHILTGLLKCPICGVGMSGTVRRRKNKSTGEYKDDFYYRCKHRKKINESDFCNCSLVLNQNELNGEVERHIMDLVNNKDGRDFIIRRMESRVDVSSLETEREQLRGQLRQLSGAKKKLTDMIDRLDVTDKHYDRKYQDMHDRLDNLYDKIGDIDDQLQDVNEKIRMAYENQITSKQVYQILTCFDKIYFEMTDLEKKEFFRNFIDEIELYSERQSDGRIVKQINFNFPVYYNGNEGNAIRLPDENTVETIVLLSHKSPDSVINVKVEFGEGEGRVPLDAIAERAKKYQSKPKITYKMIQEYVEKKYGLKVHTAYIAEVKRSLGLTMYDAPNTTEELRQPRKRPPKEKVEAITEALKYFEVI

SEQ ID NO: 25623 - protein, 430 aa, synthetic construct
MPVTITKNEPIPAISKRERVAAYARVSCGKDAMLHSLSAQVSYYSQYIQQNPAWEYAGVYVDEALTGTKDSRPEFQRMLADCKAGKIDRILTKSLSRFARNTVTVLESVRMLKSLGIDVYFEEGSIHSLGADSELILTLLASFAQEESLSVSENQKWRIRKGFEQGEVMCWRFMLGYRIEHGEVEIDPDGAEIVRDIFHRAIAGETYGSICKRLNAQGKTGALGKPFRSAHIRDILTNEKYTGNALLQKTFVRDHLSKRRVANEGELPQYYATETHPAIIDEATFEAAQEIVRQHTERRKDCAQPQRSEFTSKIRCPFCGQAYKRVTSNGTVGWNCSTYQEKGKKYCHGKKIPEAVLMTLVADVLGLPCYEAPEMETQIDHIEVPADNHLKFYLRDGRVEERIWKDRSRRESWTPEMKEKARQNAMKRKR

SEQ ID NO: 25624 - protein, 529 aa, synthetic construct
MAGKVTCIPATKNRFTALPVTSVSKRRVAAYARVSTDSDEQFTSYTAQIDYYTNYIQQHPEWEFVKVYTDEGISGLNTRHRDGFNEMIADALAGKIDLIVTKSVSRFARNTVDSLTTIRKLKEHGVECYFEKESIYTFDGKGELLLTIMSSLAQEESRSISENVTWGMRKRFADGKVSMAYKQFLGYEKGPDGTPVVNEKEAEIVRLIYRLFLEGKTPFGIKEVLEAAAIPSPSGKSKWSVTTINSILRNEKYKGDALLQKSFTVDFLTKTMKPNRGELPSYYVKESHPAIISTDEFDMVQAEIERRSQQGRGYSGNSIFSSKLFCGDCGGLYGAKVWHSNDMYRRVIWQCNRKFSKTQEQCKTPHLTEDAIKEMFLKAYNRLMRQRKQLIEDCELMKSLLTDCAEQEAGMEQLRQEIEEIADMTQNLVRQNTRQTQSQEAYNAKYNALAERYEKASAKHDKLEAEVARRKNKARQIAAFIDQLEKAPASLEEWDSQVWSLLLEKGTVNRDGSITFEFRNGKEIKVEAK

SEQ ID NO: 25625 - protein, 527 aa, synthetic construct
MAYCLYLRKSRADIEAEAHGEGETLARHEKLLLEVAKRGHYNITQIYREIVSGETIAARPVVQKLLQEVEDGKWEGVLVVEVERLARGDTIDQGVMAQAFKYSGTKIITPLKVYDPANEFDEEYFEFGLFMSRREYKTIKRRLVRGRNASAKEGKWVSGLAPYGYERVRIKGDKGWTLRPVEEQADIVRFIFKLYTSGEEDDNGEVRRLGTYTISKRLDSLGVAPPSSAQYWNDRTVQCILQNPAYIGKVRWGVNKSKKRIVNNSIEVERYKAPAEEVIYVDGLHSAIVDEAIFQKAQDLLQRSGPPPVPKRNSVVNPLAGILVCGKCGRSIVLRRGRIDILICHNRICDNVGSKYEYVEERLLQALSSWLDGYRLEWSNKLPADEQAILDLKQKALRKTVAELETLHKQLDRTHDLLEQGVYDTDTFLVRSRSLTERIAAAEEDISTLTAEVQADKERAASRLNVIPKVEKLLEVYPVLPSAQAKNEMLKEVLEKVEYTKNERSGRNGPFDNFELVLYPKLPPKIE

SEQ ID NO: 25626 - protein, 521 aa, synthetic construct
MTTIQPTLTRFTAAPIAEQRKRRVAAYARVSTDSDEQFTSYEAQIDYYTKLIDARDDWEFVHVYTDEGITGTSTKHREGFKQMVADALDGKIDLIVTKSVSRFARNTVDSLTTIRQLKEKGVECFFEKENIWTFDGKGELLITIMSSLAQEESRSISENCTWGQRKRMADGKVSVPFSRFLGYDRGADGSLVVNHEQAEIIRRIFRMFLQGKTPHTIAAALTADGIPSPAGKEKWSSTTIRSILTNEKYKGDALLQKCFTEDFLTKKQVKNQGQVPQYYVTGDHEAIIEPEVFDLVQREVAKRKPGGNRHSGVRVFSSTVYCGECGGVYGSKVWHSNDQYRRVIWRCNRKYAGEKHCETPHFDEEALMHIFLTALNKLAINRKSIKASFDEIRDTLFNTTALEDELAKLDAEMEIAAEQVARSIHENATVAQDQEAYKVRHNALCDHYEGLKVRYNELQATITDKQTRRAAIEDFLTELMKQKEITTEFDPVTYHILVERMTVYAKDKVIVRFKNGIEIEV

SEQ ID NO: 25627 - protein, 641 aa, synthetic construct
MRKKKCYIYTRVSTAAQTEGYSLEAQQERLREYADYKNLEIAGEYCDAGKSGKSIVGRPAFLQMLDDISSEKDNISFVLVFKLSRFGRNAADILKSLQLLEDYEVDLICVEDAIDSSTPGGKLTLTILSAVAEIERENINVQFMAGKMQKILNGGWPGGPAPYGYRSVNKELVVEPEEAEIVKLIFDRYIQDDGTLNGVAIWLNNNGYSRISKGEVKPFTYDFIVNVLDNPTYHGKINYFRRTNIKGIRKNPKDAVEVDGIHEAIIDENLWQQAREKREASSGRQEKVDEPDRMSLLSGLIKCPACGNGLIASKNKHVNKNRGGHYKTIHYYSCRYYRKSAGRTCEFKHTYNQSKIDSAVFEIVSNLAAHPAFEKAMAMAAGGDESVEAYEKRMKEIRKDLYHQEHEKNRVGAELDNLDVLSDDYDTEYERIQAEMDDIYDRIESLELSLKKIKKKCSEAKQGVSSIEGIKKILKNFGKFYEKLTSEEQRELYRQFIERIEVYLEEQEDGRVLKSIHFRFPVRYGETDTIETWMGAEGEPDDEIAFVLDCTKVQVTVAEAKATYAEIRAYVLEHTGMKVSSLYIAQIKRKYGIDVGIAYNKPEQNKNHVPVCPVEKELAIMDALKAFRMLTEDTEYMEAAV

SEQ ID NO: 25628 - protein, 667 aa, synthetic construct
MKKKKLKCYIYIRVSTSMQVEGYSLEAQRERLTKFADFQDIEIVREYCDAGKSGKNITGRPEFSQMLNDVAEDRDGVDFILVFKLSRFGRNAADVLNSLQYIQDFGVNLICVEDGIDSSKDSGKLTITVLSAVAEIERENILVQTMEGRRQKAREGKWNGGQAPFGYTLDSKNSTLIVNPEEAEIVKIIFTKFAHEGLGADRICDYLNQHGYTKKKVKKKELNYFARSFIMKILDNPVYTGKIVYGRHKTEKVKGSRDEYKRVMADDYMVVDGMHEAIIDRDLWEATRLRRKDTGVKWNKTHSMDHEHILTGIIKCPICGRSLVGTVRRRKNKKSGEYKDDWYYKCLHRAKIDETHFCDFRLVLSQVELNSQVEQIILDMVADPQFKDYMVMKMDEKVDVSSLEAERDQVREQLRQVVGGKKKLAEMLDRLDVNDKHYDRKYQDMHDRLDILYDRISELEDTIAEIEEKISGAYGEKITADELYKVLLSFDRMYFKMTDLEKKRFMRDFIDEIELYPERQEDGRILKQLHLGFPVFYEGSEGDTIRLLKQNTVESIVLLSHKSPDSKINVKVEFGEDDDKISLNAIAERAKKYQPKPKITYKMIQEYVEKKYGFKVHTAYIAEVKRSLGLTMYDASNAVEELNQPRKHPLKEKVEAIKDALKYFEVI

SEQ ID NO: 25629 - protein, 491 aa, synthetic construct
MRAVLYARYSSDNQRYESISGQFHCSEEYCRRRGYDIVHYYYDEAKSGTTVAGREQFNQMIEDASRGIFDVIVFYQIDRTARNEMDYYASVNKLLKLGVRYEYSAEGIDVSTPNGKLTEGVKVAVAAFYSRDLSIKIKRGKKENLLQKKHNGGISPLGYDIEPDGTYVINEYEAIAVKKIFSMKIEGAGYGKIVDWLKANGYKTKRGGDYSKGAIHDILRNRKYIGVLELGNSTKHNSRKKADNYMEFEDALPAIIEKKDFLTVEKIMARRRNGATNAKEIYALSGRIFCECGAAMSGTRIGARGNKYIYYACSNQKNKHGNCDVSMVRKDKIEYVVYLAIVDYIKAHKQSIIAEFLNQSENREEKVRADELRQKIGVQKNKAKNLLALYDGTDDMVLNAYKEAKKTLDMMEAELIDLNKNDYSAINKDILEAFIDSFITEVGVSDAFLKKFFDSLDVKVIVNNKNAEIQLNLSVLPFVVALKGIEPLISP

SEQ ID NO: 25630 - protein, 517 aa, synthetic construct
MLRAVIYARFSSDMQREESIDAQVRACKNYCQSKGYLVIGQYVDEAKSGRELTKRDAYNQMLADALEDKFDIIIFHKIDRNSRNELNYYTTKDKLEKLGIRYEYAVQHIDASPEGQMMEGVLVSMAAYYSRNLSKETKKGLNENAYKTQFNGGTAPLGFRIVDKHYEIEPIEAEAVRLIFKLYLAGYSYIRICRELELAGYKKRNGKPFDKTCLYDILGNEKYMGRYTFNKTPRAKNGQARNSHSKTRPDDFIAIDNALPAIISKEDFAAVQAKRETNQRRFSSYKAVEPYLLSGKVICGYCGSAMSGHRVAPRNGEPYGYYYCLKKERVAGERCPQKYIRAEKLERIAIRALEEEIFSEASMKKIAALMREGYAAMTNEADESRKALIQAKAAAEKKLDNLYTFIENGEVDEYSLARMKKIKDELAKIKARLCETSVKFSKTLTEEEIFATLAAFKKDLESNADNSAKRFVVNLLINKITVRDNCATVEILPNMLTVYLVPRTGIEPVRVSLPEGF

SEQ ID NO: 25631 - protein, 447 aa, synthetic construct
MSITNVAIYVRVSTDRQAKKGDSIDEQLSTCKAYIASKENMVLAGTYIDDGISGRKIKRGDFEQLLDDVRLGRVNLIIFTKLDRWFRSLRHYLNTQAVLEANHCDWLAVDQPYFDTTTPHGRAFVAQSMTFAELEAENDSVRIRDVFDYKYRQGEVLSGRAPLGFSVENKHLVPNQDAEKVLHIFQFYATCNSLNQTIAHLESDMGIVMTQSNLKTAILKNKKYIGVFRDNDHYCPAIIPLDLFERVQELLSINVKISQKYNYIFSGLLRCTHCGHSFSGATRKIKKKTGGFYKYPFYKCHGAYPSKRCSNRKVMFESCIERYLIANIKPLLQEHIAEYEITSAKVIDYDSRRTALLKKIDKLKDLYINDIITMDELKRDKEKYIKELENLPRNQEQKDLTPIRKLLKMDLDSIYQTLEPAERRQLWRSVIKEIQIDDHKNLKVIFL

SEQ ID NO: 25632 - protein, 531 aa, synthetic construct
MARKKKQASGDAVIYARYSSHNQRDVSIEQQIEACRKYAASLGLKITVTYEDRAISGRTDNRPAFQRMMNDAEDGKFCYVLAWKSNRMGRNMMQAMVNEARLVDCGVKVYYAEEDFDDSAAGRFALRSMMNVNQFYSDNLAEDVRRGLMDNASKCIANGKQPFGYKRGSDGKVVLDEPAAAVVREVFTRVASGETNTSIARDLNRRGIKTGSNGEWNKCSFHGLCTNERYRGIYIYGETRIEGGVPRIIDDRLWHKVQEAIRMRNRRKNGRHRPGEDDYLLTGKLRCGHCGGYMIGMSGTSKTGTIHHYYACQNRRVGRTCDKKNIRRDIIEPAVAQAIKQYCLTDDVIEWIADKTIEYWEDDDRKLQITSLENELADIKSSISNVMKAIEQGVITSTTRDRLIELETQQSDLSAKLNSAKEDLVHVDRKNLISSLLLFRNGDVYDRQYQEDLFNTFLVAAYVYDDGNRLKLVFNCFGDSNTVDLDLCSDENNDNSSISNEANCGNLFAQALKQSTRLKPSEEAQVAFLFV

SEQ ID NO: 25633 - protein, 520 aa, synthetic construct
MKKVTKIAENTVSLTEHTKLRVAAYCRVSTDSEEQLESLDTQIKHYESYINANPGWEFAGLYYDEGITGTKKEKRPELLRMIADCENRKIDLIVTKSISRFARNTTDCLELVRKLLDLNVFIYFEKENINTGSMESELMLSILSGLAESESFSIAENNKWSIKRRFQNGTYVISYPPYGYDNVNGEMVVNKSQAKIVRLIFSEILSGKGTYKIADELNRRKIPTKKGGRWTSTTINNMVHNEKYTGDVVFQKTYTDEHFNRHNNNGQKDQYLIRDHHEAIISHEDCGAAQEIIKQRGKERGLEKQSNKYKNRYPFSGKIICSKCGSTFKRRTHTSGKHKIAWCCSTHIEDIKKCSMKFVPETDIEYAFVTMMNKLIIGYEVVLKPLLSSLRGMNFEDTLETIRVIDKKLEENADQQNVLVGLMTKGYLETAVYKKSNNELLQEAERLRRQKESITRFLNSDFQNLSEVSALLQYVSRACILKDYDDDLFTRFVERIHVYSRTEIGFELKCGITLKERLVR

SEQ ID NO: 25634 - protein, 521 aa, synthetic construct
MAASRSVTVIPARKHVIENKDEEKPKLRVAAYCRVSTDSEEQATSYETQIDHYTAYIQGHPDWVLAGIFADDGISGTNTKKRDEFNRMIDECMAGNIDMIITKSISRFARNTLDCLKYIRQLKDKNITVYFEKENINTMDSKGEVMLTIMASLAQQESQSLSQNVKLGLQYRYQQGEIQVNCARFLGYTKDENKRLVVVPQEAEIVKRIYREYLEGASMLKIARGLEADGILNGAGNKRWHTSNINQILRNEKYIGDALLQKTYTVDFLTKKRVKNNGIVPQYFVENSHEAIIPREVFMQVQEELVRRRIVHTSPNGKTRTFSSNHCFAQIVICGNCGEVFRRVHWNNRGKKSIVWRCVSRLENTGLFCDARTVLENTIEQVLVTAINQALCDKNSFLSTLQDNIATVINRENDKGLADIDKRLEELQTELLKLATSNADYDKVGDEIHRLRDQKQKLQIENVNREELKKRMADMSAFLKKQSAALTEYNEQLVRRLIEKVTIYEDKFTVEFKSGVTVDVE

SEQ ID NO: 25635 - protein, 466 aa, synthetic construct
MNRAALYIRVSTLEQAQEGYSVGEQKERLIAYCKAKDWIIADIYVDGGYTGSNLNRPGIQKLISETDKFDLVLVYKLDRLSRSQRDTLYLIEEVFRPKGVDFISMQESFDTSTPFGKAMIGLLAVFAQLEREQIKERTWMGRVARAKTGLHHGGGHIPIGYEYEDGHLVINPYEAEQVRKIYEWYLAGDSLKTITDKLQEAGYTNKYSSYNSWTSVRNILGNETYTGRLHFGDVIVDNAHEPIISKEQFDAAQVLRGKRQEQYGGQAFQSKHLLAGLIYCGHCGGRYYLRNTGKYSYYACYSRTKQMKSMVKDPNCMNKIWKGAELEAIVDARIRELLSSPEMAAEIAASRSKPTPVSKNADIEKRLREIDKQIGKLMELYQHDDIPPELLGERINKLYNERTALESTLAPVVEDEAMPFDLVEALISDAAQVWDFADESQKRRILQSLVSRIVLTDDDVKIEWAF

SEQ ID NO: 25636 - protein, 530 aa, synthetic construct
MKIARNVTVIPPTAKFTVGDIATPALQRRVAAYARVSTGSEEQQTSYAAQVDYYTKYIKSKPEWKFVSVYTDEGISATSTKNREGFNSMVEDALAGKIDLIITKSVSRFARNTVDSLVTVRKLKEKGVEVYFEKENIFTLDSKGELLITIMSSLAQEESRSISENVTWGQRKRFADGKVSIPYRNFLGYKKGENGLPEIVPSEAETVRLIYRLFMEGKTFSAIAKHLTDNGILTPMGKKNWQAAVVSSILQNEKYKGDALLQKTFCANFLTKQMVKNTGQIPQYYVENSHPEIIDPDEWNAVQAEISRRKSIGAIGRCTSPFAGKIICGDCGGFYGKKVWGSYKEDKTYRREVYRCNDMYKHTRRCESPIVTEEEIKEHFLLAFNTLMSNRDSIIEDCRLVQSTLCDTEEIDTKIAELTREIEVVTELSRKAIYENARTAQSQIDFNKRNEEYLKRHSKATNRIEKLEKEKQERLAKSNTLERFITDIEKRPLVLERWDKELWLIAIDSVIVTTDGLMTFRFKGGAEITT

SEQ ID NO: 25637 - protein, 433 aa, synthetic construct
MKRKITKIEPLLQPMNLKRVAAYARVSTTKDAMLHSLAAQVSYYSDFIQSHPEWEYIGVYADEAQTGTKDSRSEFQRMLSDCKDGKIDMIITKSISRFARNTVTLLETVRALKEMGIDVYFEEQNIHSTDGDGELMLTILASFAQEESLSASENQKWRIRKGFENGELLNLRFLYGYNISRGKIEINKVEAEDVRYIFAEFIGGATIGSIARKLNSDGKCCTHGGKWSAQRIRDVLSNEKYIGDALLQKKYRNNHIDKKEIINNGVLPKYYAEGTHDAIIDTNTFNKAQNLLKLISERHSGNKPKKETVFRGKIQCQKCGKNYKRQTSNGTVGWNCSTYLTQGKSVCHGKKIPETTLKSVCNEILDINCFDENLFAETVKQIIVLKPNHLTFILYDGNQVSKEWNDRSRRDSWTEEMKQVARERTIMQRSKEK

SEQ ID NO: 25638 - protein, 537 aa, synthetic construct
MQIKVIHPSVERELERKKVCAYVRVSTDSDEQEDSYENQIRYYKDKIESNPDWKFVGIYSDLGISGYKEKRPGFMNMIKDARNGRIDLILVKSVSRFARNTETVLKYSRELKRLGVGIYFELQKINTLSGEGELLLTILAAFAQAESESNSGNVSMSIRRKFEKGELNFPISKIYGYTEDADGNPIIDEEKAKIVRLIFDLAEKGIWVTKIAGYLNKKQIPGIAAEKWNFGQIGKMLRQEAYMGDRILQKTYRDSRRRTRKNKGQADQWYVKDTHPAIVTREQWYRVQDILLERNKELYDATPISEEKNLSTHSAYPLSGKLYCPYCGRVLMHRWEGKKRYENWVCGLHRKVSKDACPGICIPNRIASSWGELKEPMTVLKYTDEYGMERFTAIPKVEYEASEDCPYEVVKPEPKPERPKKPSYKKTPKPDKPRYTRTVYPLSGKLFCPNCGKVLTHKWNKGVEYWVCSTNRNKHRTENFEKCKGMYFPAEAAKDWGEINEPLTVIAYKNEYGHCLYTAMPKEEYERSADCPYRKED

SEQ ID NO: 25639 - protein, 465 aa, synthetic construct
MAREVVHIPARPQVVGTRTTPEKKIRLAAYCRVSSEQDEQLNSFENQVTYYKEYISSHPDYELAGIYADEGISGTSTKRREEFNRMIADCEAGLIDMVITKSISRFARNTQDCLMYSRRLKVLGIGIRFEKENINTMDSTGELLFTILSSLAQDESRSISENCQWGIRSLFKRGIHHLNTNRFYGYDSDENGKLIINPEQAKVVKWIYESFMEGINPDVIVKILNEKEIPTCMGKSKWTCNQIKSILRNEKHMGDAVLQKTYTPDYLTHKSVKNEGQLPQYYIKEDHPPIVSQQIWEAVQLELDRRESFMKKHFLKSMGQYTDENPLSHRIICGICGHTFSRRTITRMEGRIKVWQCGQHYAKKGEHLCDGRMIRETELYKAFQLAWDHLVEERDNKAKDWEKKMAEGNALEAYRAEQFLRLTANGGRIKEGKPLVSAVLDHIVFEKNGDLSICFLDGSHVCVEP

SEQ ID NO: 25640 - protein, 478 aa, synthetic construct
MHKVAIYVRVSTTSQVDEGYSIDEQKAKLTSYCEIKDWNIYDIYTDGGFSGSNTERPALEQLIRDAKRKLFDTVLVYKLDRLSRSQKDTLYLIEDVFLENDIEFVSLLENFDTSTPFGKAMIGLLSVFAQLEREQIKERMQLGKLGRAKSGKSMQWAKTSFGYDYIKETGTLSINPYQALIVRKMFEWYLSGMSITKLRDALNEQYGQDKEWNYRTVRVILSNPVYCGYNQFKGQIFPGTHEPIISEEDFNKTQEEIKTRQRTAAQRFNPRPFQAKYMLSGIAQCGYCSAPLAIKLGMIRKDGTRLVKYECKQRHPRKTKGVTVYNNNAKCDSGFYFKDDIEHFVLTEISKLQTDSDYIDKLFSNTNQETIDRASYQKQIDKLTAKISRLNDLYIDDRISLEELQKRSSDFMAERTALEKELDADSSLKAVERKEDVRRVLDTKDIFTLDYEQQKAIARALISKVRVTSESIVILWKL

SEQ ID NO: 25641 - protein, 612 aa, synthetic construct
MRAAFLIRCSTKKQDYERQVNDLTRLAKKFGYTSSDNMIFGEHITGKDDASKRDRQSIQRLKDAAINKEFDVVLVSEVSRMSRDPMSGRLYVRQLINMDIPVYFRDIDTWTIDPVTGKKVRDAETIIGAAFDAAWKYIKSMKTQIASGRRDELDNNQMSIGQPFFGYKRYGGRDKGKKNSWVINDDAAKVVVDVFEEYVKDGATLKSTALAITAKYGEQFNKKFSIGTIEHILTFEPYCTGIKVVSLTDPDTEDVDEFEVEIPTIITRAMFDKATTKRATNRTARTPYPKQATYILSKLLKCPICEHSLTPQKRGGDKGDKYRLMNGKVAIRWSCMSGINNATDCSSRITISNEKLEAIIWGLIKQELIGFANLNDEDRVAKVEELTDKITNLEMNIANFTSHISNMDRLIERAYSAYMDAPDSVMDIAKDKYYKTLTKCENERAECKGKIEALSAEKLRLENMRTFFNQPTLPKDAIEKAESDPIKMRNLVMELIDKIYPYRITTYVSPATNRIMKNGIVLLEVYTINGIYNVLYDGNQRNNKVAYYISGVYATFQNGRNKFDAYDTGEYFVISNATLVTNTEDVDLLVTFNELIKICMQNGWEIDYTYKM

SEQ ID NO: 25642 - protein, 523 aa, synthetic construct
MRFFSYGRKSVFSDKSDSIDNQFRMNREYCESKFSGQVDSWQQFSDEDFTGANTSRPDLQRMLSFIKGGFCDVLVVYQLDRLSRDVRDFANIYALLEEHGVMFISIKENIDTTTPIGRAMMYVTVVFAQMERETIAARVTDNMLGLAKKGYWTGGNPPVGYVRKHIVVNGKKHCSIEVDPDGARYVTQIFDTFLAYNCSLQGMETRFKNQGIRTQSGKFFSTTQLHKMLTMPYCVEATPEVYDFYAAKGCIMDPGSPREMWDGSVGVIIYGRSTEKNKKHQAQPPEKWTVCLGKHKPFMPAEKWLAVQSRFTQNKCIKDAKWPVPLLKGVLRCKCGNLMQVSRKKKVDGTCSSWYYCRKRMRQGVDACDMGQIKCDLLDEEVLELFRGITADPALIQKFVKAEAPADVTDLKAAQARVSACERKIGRLAASLALAEDSAASKYIIAEMERLDVELGALKREALLAEMESHRAAASAKDAKATAAEIAKLIHGLDGFDDKEKNAIARAVIQECTWDGERLFITL

SEQ ID NO: 25643 - protein, 497 aa, synthetic construct
MNAIYARQSVDRADSISIESQIEFCQYEMRGEQYKVYTDRGYSGKNTDRPAFAEMMNDIESGVIGKVVVYKLDRISRSILDFSNMMEKFGKHRVEFVSTTEKFDTSSPMGRAMLNICIVFAQLERETIQKRVADAYYSRSQKSFYMGGRVPYGFRLIPTTIEGIKTSMYEINAEEAEQVRLIYELYSKPECSYGDIIRYFQAHGILKNGKPWGRTRLADVLRNPIYVRADLSVYEFYRDQGAIMANDPSDFIGTNGCYYYKGQDSVGRKQMNLEGNHLVLAPHEGIIPSDLWLKCRAKCLEAQQIKPYQKAKNTWLAGKIKCGICGYALVDKHYSTTRSRYLLCSNKMNSKACEGPGTIYTDEFEQIIYNEMRKKMAQFKTLRRCKGNYINPELTALNVQLTQVETEIGSLMDRLSAADDTLFRYISGRVKELDGKKQELMKRISELKLHKEADYTEIYNHLTMWDELSFDDKRQTVDQLIRVIYATSDSIKIEWRI

SEQ ID NO: 25644 - protein, 503 aa, synthetic construct
MANIRRIEPVLPRLKARKRVAAYARVSMETEQLHHSLSAQVSHYSALIQSNPEWEYAGVYADEGITGTATKHRDEFKRLMADCGAGKIDLVLVKSVSRFARDTVDTLKATRHLKDLGIDVYFERENIHSISKEGELLLTLLAAFAQAESRSISENIKWSIRKKFKQGIPNGIKAPYGYEWNGDNFSIIPEQGEVVREIYSRYLAGEPAYRIAKGLAEKGVKGQSGVPMDDSTIKNILSSLSYTGTMLLQKNFFTEGHKRRKNKGELPMYAVEEMFEPLVSETDFEKAQQIMKDRAEAMPNRNPKLTAFSGIVRCANCGCSISRRTSKYGKKWICNTKERKGKAVCDFRDIYESELEDAATKALSLDRFDADEVKSRIALITIDNAYITFRMKNGTSRQVLRKYKKGYSGFSTRLFCGYCGGMLEADTWNMGPAGKKTKYKVWVCRNCSAPREFDSTFRKATQELFHEEQCEGLFAQNIEKAINYDDRIDFYYKKGKVITWQKE

SEQ ID NO: 25645 - protein, 529 aa, synthetic construct
MAKRVTTIPATLNRFDSKPLQSVRKRKVAGYGRVSTDTEEQATSYAAQVDYYTRYIKSNPEWEFVGMYTDEGITATNTNHRDGFNQMIEDALAGKIDLIITKSVSRFARNTVDSLTTVRELKEKGIEIYFEKENIWTLDAKGELLITIMSSLAQEESRSISENTTWGKRKAFADGKASVSFSNFLGYDRGSNGEFVINEEQAVTVRYIYKRFLEGLSTYQIAKELTAMGVKTPAGKDKWYTSSVLSILRNEKYKGDALLQKSFTKDFLTHKRVDNNGEVPQYYVEGHHEGIVTADQFEQVQAELYRRQNMGRYSGVGAFSSILKCGECGGWYGAKVWHSNDKYRKVIYQCNKKYAKGCKCKTPHITEDEIKELFIKAANELFTEKDEIIANTKAMMKMVCNTNELDKELGDCIAELNIIADQMQSAISENSRVALNQSEYEERYSELTERYNTIKARYDELTRKIDGKKAQRELFKGFIQALEKQGALIEEFDEGLWSSLVQEVVITSKDDIRFVFKNGNEIKTRQIKS

SEQ ID NO: 25646 - protein, 487 aa, synthetic construct
MPEALNAVIYARYSSDRQTEQSIEGQLRECYAFAKANDIAVIDTYIDRAISGKTDNRPAFQKMIEDSAKRQFQAVIVYRLDRFTRNRYDSAIYKARLKKNGVKVLSAMENLNGSPESIIMESLLEGMAEYYSVELSQKITRGMRENALKGKALGGQRVLGYKVNSDCYFEIDETTAPVVVDIFKLYSSGKTVKEICDILNARGVKTARGGAFNKNSLHTILTNKKYIGIYKTKYGEIVGGIPAIIDKELFEMVALRMEQNKKAPARVKAEINYLLSTKLFCGKCRSAMVGESGTSKTGKKYYYYACVKKKREKACDKSNVKKDWIEDLVIQRTVTDILKDDVIENIADRLVELQKAEAAESGTMLYLENSLAEIQVSIKNIMTAIEKGIITESTKTRLTELEDEKRNVEIEIAKESIARRIISREQIIYWISSFKDGDITSEKYRQQLIGTFVHAVFVYDDKIVITYNYSGENNTATISDLDLSSPP

SEQ ID NO: 25647 - protein, 519 aa, synthetic construct
MAMAQNITFIPAVKTVGTQKPAEEKQKVRVAAYCRVSTEFEEQESSYETQVAHYTSYINGNPEWEMVEVYADNGISGTRTAKREAFNRMIADCEAGRIDMIITKSISRFSRNTVDCLKYTRKLKGMNIAVFFEKENINTLDAKGEVLMTIMAALAQQESESLSANVRLGIQFRNQQGKVQVNHNWFLGYTKDENGKLIIVPEEAEVVRRIYREYLEGASFVKIRRGLEADGILNGAKHARWHETNIRQILTNEKYIGDALLQKTYTVSVLDKKRSMNDGAMPKYYVEGCHEAIIDKETFLLVQEELARRSALYKGGKKRMYSSKYALSGNVACGHCGNIYRRVTWYVGDTKPVVWRCVSRLTPGEECVGRSVPEEELHAAIASAVNMTYANRDDIIPVLKENIESVVGCDVDEEIEVIDNMIRKSQMDLLDAGKDEVRIQEIGERIVSLRERRQDVLTQAALKKDKIDRIKAMIRFIEEQTGEAEYSDALVRSMIGKVAIHDDRITVEFKSGLAIDVDA

SEQ ID NO: 25648 - protein, 512 aa, synthetic construct
MKRITKIDAAAKETKKLRVAAYARVSTDSADQLVSLDAQKEHYEQVIKNCPNWEFAGLYYDEGVSGTKMAKRDGLLRMLADCERGLIDYILVKSISRFSRNTVESVETVRRLSAMGIYIFFEKENIDTGKMEGELMLSIMSSLAEDESRSLSENNKWSIQKRFQNGTYVIGTPAYGYKNADGKMVIDEEKAEVVRRIFDSVLEGKSGGTIAKELNAKGIPTARGVQWRSSVITAMIRNETYTGVAVFQKTYKDDQFNSHVNHGERGMYRIEGHHDPIVSEEVFLAANTAVDNNAKEKGVVRNSGKYSVRYALSGKIFCGECGGKCKRKKIYGDIWYGCETHARESKKCRQLPVRADMVEAAFVNMMNKLIYGRDAVLLPMSGRLLGGGDKEIIDRLAEINTELDAVAERRQAADKFFAKGLLDAAVYREELDELARKEKELHTVRAGIEGDPNLDSDRQRALNELLRYTAKAELLTAFSDEVFTKHVDRVIIFSRKEVGFAMKCGPVFRERI

SEQ ID NO: 25649 - protein, 504 aa, synthetic construct
MNYNDSKGIYLMYLRKSRADEYNQDVENILKRHEEELQSLAKREFGDLIPEKYIFREVVSGGTIKDRPLMKEILKMMESGIIAGVLVVDPQRLSRGDLLDQGHIINAFKYTNTLIITPYKTYDLNDTTGTDMKLLKMELNHGADYLDYYKMVQARGKLASVRAGNFIQPIPPFGYRKVRYGKVTTLEPIEDEARIVRIIFQKYAEGKTICGVTNELNAEGYIPPSKQIWTKGSVKRILSNPVYDGKIRWGFTPNKTVMEDGKLKKYRPERHDYLLFDGKHDAIVNHVLFMSVQERLSKNKSFTNDRSLKNPLYGIMYCKRCGRKISRLNVAESRGGHRYACPNKLCDVQSSRYDLVIEAVIDTIQCAIDDFDITFHDCNSSGSDEKIRELRQELTRLNNKEDTLFELLETKVYSTSVFTQRHAELEKKRQEIIGKINTLSLIPPPESCNNKKMRFKDALLALKDESMPPKEKNHLLKKCIERIDYDIEGVRYHSKVKLDVYFKF

SEQ ID NO: 25650 - protein, 518 aa, synthetic construct
MQENETYVIYLRKSRADSEKSSLEEVFAKHESELQSLAERTLGNRIPEDKIFREVVSGETITDRPVISQILKVMESKKIKGVFVVDPQRLTRGDLLDKGHLINVFKYTNTKIITPYKTFDLNNDFDLKLFKMELDKGSDYLEYYKMIQARGRIASVRSGQYIGSTAPYGYDKYSYKENKHTVNTLKPNSDEATVVQLIYHLYVNESLSYAAIANKLNTMNIKPRKSTSWSPYSLKEILHNPVYIGKVRWNRRKTVMKYKNESLLKTRPIALNDSIISDGIHEAIIDEALFDSAQECNGKTPRNHSSSKLINPLAGLIFCGNCGRAMSYKTYKNNAGSEKQPPRYLCNNQSNCHTKSAKATDVINQIISALECYIEDFKVKLENDDGNSFNVRSQIISVLNKQLQDLEVREETQYEMLENKIYTPELFKKRRQKLLEEREVLLDKLQEAKVQEPVKIDYQEKIISFTDTVEALKNPDIDILQKNMLLKKCIKKITYTTDEEKGNRWRESTFEIDITPLI

SEQ ID NO: 25651 - protein, 503 aa, synthetic construct
MSKIHKIEAVIPKQIEKKKVAAYARVSALTEMTQYSFSAQVNYYSALIQKNPNWKYVGVYADKGITGRSIKKRIEFNRLIDDCDNGKIDLILTKSVSRFARDTVDTLNTIRHLKNIGVDVYFEKENIHSISQEGELLLTFLAAYAQAESENTSENIKWGIRKGFKVGKPNGYKAPYGYKWNGNSYSIVPEQGAIVKEIYKRYLDGEPAYSIAKTLKKRGIKGQTGIPMDDSTIRYIVSNISYTGTLLLQKWFFTQNHVRKENKGELPMYAVENMFEPLISKEDFQKALQIKKERAEAMPNKNPRLTAFSGIVKCGNCGCSVCRRTTRYGKKWVCNAKDRKGMAACDFRDIYEIELEAAATKALAVNEFKEDLVRREVKLITIDNAYIVFNLKDGKKKQILRTYTKGYSGFSCRLFCGNCRKMLEADSRTLSINGKKKRYKIWCCRKCPGQREFDDVIRKATQSLFNEPQCEGLFAQNIEKAIIYNDRIDFYFKEGKVITWEKE

SEQ ID NO: 25652 - protein, 526 aa, synthetic construct
MDEYCLYLRKSRIDLEAEANGQGDTLARHRAALLKLAQKRGFNITGCYEEVRSGESIAARPEMQRLLNDVEDGRWAGVLVMEVERLARGNTTDQGIVADTFKYSDTKIVTPNKIYDPGDEFDEEYFEFGLFMSRREYKTINRRLQRGRRASLSEGKYIAGKATYGYERYKLSGEKGYSLRIIPEQAEIVRQIYNWYVNGELLPDGTLRPLGSYTIAKRLDARGIPSPTGGKWPPCTVKDILTNPTYIGKLRWSYRPTVKRMVDGELVKTRPVDRSVHLSDGRHEPILDEVLWHRAQLMLKNRSHAPVPKSTNIRNPLAGLLICSKCGRSMERRKFKHGRDTVACPNKDCTCKSSVLEEVEAGMLDSLRIWLSDYKVKLAQSQETISHTGPTAEQEITSLQRTLGTLQAQMENLYNLVEQGVYSTDLFLQRSQALTARMAEVNQQIESTQAALTASRRIARNRFEIIPRIERVLALYPTLTDPREKNTILKEVLEKILYTKTTGSRWEASDMNLYVFPRVETDGEQL

SEQ ID NO: 25653 - protein, 480 aa, synthetic construct
MQDLLPTAIYVRVSSEMQAGEDRYSIPEQIDRLRKYCDAQGWTIAKEYVDPGHSGSNLKRPAIQELISDAKNGFIRRVVVFKLDRLSRSQRDTMYLIEDVFKAHDVAFVSLSEMFDTSTPFGMAMIGILSVFAQLERENIKDRMSMGRLGRAKRGLWRGGSNTPVGYDFIDGQLVINEYEALQVREIFRLFIDEQLSFHAISREMQSRFTNKYSTYNDSGSISTILRNRLYIGKIKYGTQEFDGQHQPIIDRETFERAQARIEEISRNTGEHWKNPYHGKHLLSGLIWCGNCGARYFCVTTKRKNGPQYRYYQCYTRNGSSDMRKADFCKNPNWRVEKLNAAVMEEIRRLCTDEKYFNRIARDGKKENNNAGKEKALQRELSSIEKQISRLVELYQMGVSVQDIATRIHDAQERKNKLTQELLSLNQQSPKNRRQEALTYIHELKWCLDTDDVAAQRRLLDALVNKIVITDGGFEVDWKF

SEQ ID NO: 25654 - protein, 512 aa, synthetic construct
MQKKIIENKGKAVIYARYSSDRQREESIEGQLRVCEDFAQKNDLMVVDTYIDRALTARTDRRPAFQKMIADCKKRQFEYILVYKLNRFSRNRYDSAVYKHKIAQYGVKVLSAMERITDDPSGILLESLIEGIAEYYSVELAENVLRGMKENALEGKANGRLPLGYQKGPDGKVIIDPSTASAVKSIFKGTAAGKRMKAIAEELNAAGYKNASGRPYNPNSFAALIRNKKYIGMYQWADTELEGVIPALIDKATWEKANGVLNSRKHKSNRIRSDQYLLTGRLVCGSCGSAYVGKSGTSHRGTTYQYYCCSNRIKRKGCKGKNFRQDQLEAWLAAETVKTLNHPDIIRQLSNQILAVQKSLENEKDPLVDGISTELKDYQKRLANSIKAIESGIVSDTISANIQQYEEKIKILEKQLARAKLKQQPFTLTASHVEFFLSALLDGNPKDQEYRTKLLDILVSRVVLYPNKAEVFYRYQKELPSLPNPVIIREERGSNGNQLVGPLGFEPRTNRL

SEQ ID NO: 25655 - protein, 468 aa, synthetic construct
MVKEINNNMNDFTKKVEEVALYIRVSTEEQAINGDSLRTQREALTKFALANHYHIYGIYEDDGFSATNLNRPALQRLLEDVRKNKINRILLTKLDRLSRGVRNYYKVLDVLDAHCVFWQTIFEKYDSSTASGRLHINIMLSVAENESAQTSERIRSVFNNKIHQKEIISGKIPIGYKKEEKKLVVDEDKKALVIDAFNFYLKSGSVYKTFEYLALFDPSINYPRTARLLANPLYIGTKVCKYGSIENYCEPIISKETFDEVQNLLKKNQRKRDNSDHEFLFSGLLRCNECGYKMSGKYCKNFPTNCTFYYLCSNARLKKKCNMLKQLNETKIEKKLLEQIVPEINKYIDKNNILEQEKAQIRDISKERDKVNKQLEKLRDLYVNDLIQIDHYEKQYKELTSKLDSLKEEEKPVEEKKTVNYDEFRSFLSRDFVTLYNSLSRTEKRLIWASAIDTIYIDDNYNLRIVFI

SEQ ID NO: 25656 - protein, 518 aa, synthetic construct
MARKTDKPLSNIAVIYARFSSHNQREESIEQQVAECKLFAAQQGLEVTEIYSDAAQSGRTENRSQFLRLQRDAKKGKFTNIVAYKSNRIARNMVNALTFENDMEKLGVKLYYAKEEFGNNAAGRFALRMMMNVNQFYSENMAEDIRRGMEDNAMKCKVNGPAPYGYKSGKSGTYEIDEPAAAVVREIFTRVACGDSFVDIYTDLNNRGLKTRKGNKWGRSSFQSILKCEKYTGVYIYDNIRVEGGMPEIISKEMFLKVQRILGTKGNPQGRHRINGDYLLTGKLFCGECGHHMMGLSGTGKNGLLHYYYGCSGKKEKPRCSKKNVRRDELEYEVARLVQTYILQDDVITWLADTLTKYQEEHSSDGDMAILNTQLSETEKSIKNLMAAIEQGIITPSTKERLMELESEKSKIENNITLLKADTITVSKEQIGGWLDSFRDGNIKDKRFQKRLFDSFLSAVYVYDDNRVRIVFNLCGLNKGDIDTKLMLGDTEAIEKISDCSYKRCYGSPDLIKVEHLF

SEQ ID NO: 25657 - protein, 503 aa, synthetic construct
MEITVEKVDTGVQKLGFQALSTLKTVRVAVYARVSTDQEIQLHSLEEQMKAFRAKIAQHPGWMLVDVYADEGISGTSVKKRKEFLRMMEDCEAGKVDYIMAKSISRFARNTVECLSYVRRLQSIGVQLYFEKEGLDTATSVSELILTVMAAFAQEESRSISENLKWGIRKRFESGESRWTKTYGYRKTKDGEIVIEPDEAAIVRMIFKMYQYGIPMTDILDELTFIQAPSARGKQTWNKTALKYLLENEKYIGDMRLQKWVSVDHISHRSVRNDSTVIPVYNVRNHHVPIIDRHTYQQVQRIMELKSPHGEYSRYPYFDTNIVCPLCGKKMIPRVMKVNSHKRILGCFDVDGCRGYAVKGYLVDAALLEAYNTLEIKEKKRTVAMQRMLEIKAESPKLDTVQYYWLDDLVGHIEFKQDTMRVFWKCGLESEVALNASKVEEPTHVAELYRNSLDRAQRSENKPVSVVRADKKSVNTREAQRNAAMQTAKNLRAKENGVAANDY

SEQ ID NO: 25658 - protein, 455 aa, synthetic construct
MKQKDRIKTVALYIRVSTDRQAKEGDSLEAQEKALTDYAKKNKYKIYDTYIDGGESGQKLKRTNLQRMLKDLETGHIDLILMTKLDRWFRNIADFYKVIEILKKNNVAWKTIWEDYDTTTASGEFWLNMSLSLGQMEAKRTGERIISVFDHKFRVQKTVCSGKVPYGYKISDDKKIIIDPETAPHIQGLFDQYLLTNNLSKTVRWFQQNCSQKSYDSIKIYLKNTAYIGRYVRKSTGEVLEDFCPQIVEDDVFYRVQELFKNNIKEIKHKNTDPYIFSRLIKCGQCGRKMAGRYASKNNTHYYRCKRANENNYCSNKYNVPEKRIEEFVIKNIFTQFEQKKLKIDEVNQKEKKINIDSIKRKMNKLSELYLNDMIDIDFYTDQYSSLKKILEENEKNKDIDKTKSNLKKIQKYLSSDIFKTYDKLNNQEKRELWGSIIETIEIKSKNEFEINFLI

SEQ ID NO: 25659 - protein, 534 aa, synthetic construct
MKKEIKEEPKKKAVVYARYSSHRQGEQSIEGQLAEAYKYAAAHGIKIIHEYIDRAMTGRNDNREQFQKMLRDTAKKQFETIILWKIDRFGRNREEIAFNKYRCKKNGVKVVYVAESIPDSPEGVILESVLEGMAEYYSLQLSQNIRRGQRASAEKCQCTGGNRPLGYRTDPKTKKFVIDEETAPTVKMIFEMYANGIPLADIIRTVNNKGLRTLRGNKFNKNSFKRLLKNEKYIGVYKYKDDILVEGGIPAIIDKETFERVQEMLKKNQTARSAKGKKADFLLTDKIFCGRCGEPMIGESGVGKTGKVYYYYTCTDRKNKKQACKKKPVSKDNIEKLVINKIAEILHNEDLLDMIIDKVYAVYREEHNNDDERIMLNKKLAEIHLAQENILKAIEQGMISPLFKDRTAELTAQQSEIESELASIEAQEKIQLTKEHIRFFLEDLASKDIDDTDVQKKLIDTFLNAVFVYDESVTFAFNYSNNGEKVTLSEVDNINGSGDFFECGYDGGDDETRTHYLYNANVALSQMSYAPKRL

SEQ ID NO: 25660 - protein, 531 aa, synthetic construct
MLAYGYCRYSSNLQDEKSIEQQKNELEEYAKKNNISIIKYYIDEAKSGTKDTRDSFQNMISDACKSKEIQAVLVWKTDRFARKAIDSLYYRNKLEKVGIKLISITQPIDTETPEGKLMSTMLAGVDEYYSQNLASNVKRALKLNAQNAQFNGGIAPLGYDIVNKKYVINEREASSVRFIYDMYIEGYSLIEIALKLNSMGFKTKKNKPFSKTSIYDIIGNEKYIGKYIFNKGTKSNHDGIRADAIILEDAIPQIICKEVFEKAMNKRTKRKNAENTAKNFYLLSGLIKCECGGSYVGTTIKKQKNGNTYVSGYYRCSNHNKLGKCQMPSLKQELIENKVIKMLTEELLNAETRENIVKAVNAQYIEAQKDCKNDVEILKENLSSINQEINNIVNAVAKGYATDSLLKRLEEIENTKKNIEDEINFKDNIATHNYITSEKIEEVLKKDLSELKDKSKEKLKILVQKYIKKIEVKTTEVLIYLDFGESSPKKLVAKMWFEHMTLRVWTECSSQLSYFAIWNLYYYNKFEAFCQ

SEQ ID NO: 25661 - protein, 527 aa, synthetic construct
MYYLMYLRKSRADLEAEARGEGETLARHRRALRELAARNGHEIRREYAEIVSGETIASRPQMQHLLMDIADPECEGVYVMEVERLARGDTMDQGRVAQAFLYSNTKIITPAKTYDPRNEFDQEYFEFGLFMSRREYKTINRRIQAGRIQSVQEGKFPSSVAAYGYRKVRVPGGKGYTLEVNPEEAAVVRQIFQWYVHGIDGKPAGVARIVRQLEKLSIPSGERSPGWRAARINRMLHNEVYIGKVRWGHVSVQRTLTPDGVQAKRAVSHNYRLYEGLHPAIVEEELFQAAQRKLTGTRVPLRNGMALANPLAGLVFCKHCGHQMTGQTASGKRAAQIFCKMHGCPTVANARGPVEDAILGELRAWLDDYQAHIDPFRKLTQGDNEERSLLEKVLAQQEEQKKKLLKQKSSLHDLLEEGVYDVTTFQERIAALQIRLRETDAAMEAAKAQLGTLGPQYRPAEQLMPAVQHVLDVYHTTASAQEKNDLLKSVISRIIYDKTVRGTTSPKSNPNSFQLDIFPALLTDLRP

SEQ ID NO: 25662 - protein, 555 aa, synthetic construct
MTKQPDKITALYCRLSRDDEQDGLSGSIKNQRTILEKYAQENGFRNTRVFIDDGWSGTNFARPAFTEIMELAEKGLIGTLIVKDHSRLGRNRLIVGQLLEEGFDSLGIRYIAIMDNIDTAKGISDLVPMQDLFNEWHAKNTSQKVRNVFKSKGMSGAPLTTNPPFGYLKDPESKNGWMVDEDAAKAVRQIFAWCVDGLGPTQIAKRLKAGKIQTPTEHWGNIGRNCSKPPAVPYNWCSATVADILGKQEYCGDTVNFRSTTKSFKNKKKIERPPEEWQIFKDTHPAIIDRETFALVQELRKHRRRPTKSGIVSPFSGLLYCADCGEKLYYSVTNNYKREQAYFFCSSYRKNSEVCSAHYIREKVVEQIVLESMQRILLNVQVFEKEFARKQMDCYTEDKKKQLAAKRRELSKAKKRIAEIDTLIQKIYEDNASGKLSDERYATLSLSYEEEQKTLKAAVPEMQAYLETETDKTESLQRFIQKVKQITELKALTPELIHEFVDRIVVYAPRYLDGKRVQLLDIYYSGVGILHELIPEEMEEAFQQHLAERNKEKTA

SEQ ID NO: 25663 - protein, 516 aa, synthetic construct
MKAAIYARFSSHNQREESIEGQVRACKRFAKEHGMTIVEIYADRGLSGLHADNRPEFQRMIQDSDHHRFEALIMWNLDRFSRDKYDTAVYKTRLKKNGVSLYYSDQSIPDTPEGIILESLLEGFAQYYSANLARNAKRGLQENARKCLWNGGCVPLGYLIDEHQRFVLEPIGAACVRMIFELYASGQSIKSIVCTLNEKGYKTVKGNRFRLGSIQGILRNRKYIGEYHASGITVPNGIPAIVDVQLFNDVQARLGVVASAKAHNKADIPYLLTTKVFCGHCGSPMIGESGTGKGGATYRYYKCSCRKNRKGTCDKKTEPKDWLEENVVRQTVKNVLRPEVIKEISENCAAALKADASDESLVQALKAQLAETDKALRNLLKAIEAGIISSTTRERMAELESQKSELEAQIAREQLRKPEITAEQISFWLESFLAGDIHDPKYQERIINALVRRVDVYDDGPEKQKLTIFYNITKNNRSFSKISISKCSDIECIALAATIENPFGNLRAKIHSFFLK

SEQ ID NO: 25664 - protein, 536 aa, synthetic construct
MPAVAAKVTVIPAKKNSIPLSPSGAQVQKLRVAAYARVSTNLEEQITSYEAQVDYYTRYIQSKEDWEFVDMYTDEGISATNTKKREGFNRMVADALAGKIDLIITKSISRFARNTVDTLTTVRKLKEKGIEVFFEKENIRTLDGKGELLITIMSSLAQEESRSISENVTWGQRKRFADGKVSIPYGRFLGYRKGADNLPEIVEEEATTIRLIYRLFLYGKSPSAIAAYLTDEGIITPGGKKIWRSKVVESILTNEKYKGDALLQKKFTVDFLTKKSKVNEGEVPQYYVENSHPAIIEPEKFDLVQYELKRRKEDGRFTSCLHPFSGKLTCGECGGIYGSKVWHSNTPHRALVWQCNEKHRGQHCKTPHLTEAEIKTAFLAAFNQILGSRAEIIEAYQEVMEALTDTRDLDTEQEQLENESEVAMGLIRKIIADNAQKAMDQGEYERKYTGYCDRYEAARKRLAEIGELRLERNAKRTKIAMFLERLESSAELVTEFDEELWYSTVDFVTVYEDMRLVFTFRDGQEVEIPAEIWKAA

SEQ ID NO: 25665 - protein, 518 aa, synthetic construct
MKKITKISSDKPKQNAKKLRVAAYCRVSTDNDAQLESLEAQKKHYEDYISNREDWTFAGLYFDKGITGTKKEKRPELLRMIADCKAGKIDFVVTKSISRFARNTTDCLELVRKLLELDIPIYFEKENLNTSAMESELFLSILSSMAEGESSSISENNKWAIQKRFKNGTFKISYPPYGYDWNGKQMVVNPEQAKIVEWIFSQILSGKGTLAVANELNKKGVPTKKGGRWTASTVRGMLANEKYTGDVIFQKTYTDSQFNRHTNYGERDRYALAGHHEAIISREDFDAAAILIQQRGREKGIVKGKNKYQNRYCFSGKIFCGECGDTFKRRIHTCSNYKYAAWCCNTHIEDKNHCSMKFIRDDNLKAAFVTMINKLIFGRRLILKPYLEALKGSNKDNSLRRIQEIQSLLLENSEQRETLAKLMAQGYIDQILYNEENNLLLAQADQYKTEISALNKSISGDATLVKSTLDLLRFAEKGVMLDAFDEALFENVVTRIRVLSRQKIVFELKCGLTLTERM

SEQ ID NO: 25666 - protein, 520 aa, synthetic construct
MGNVMVIPARRQVGNNVKRSEKPKLRVAAYCRVSTDSDEQAISYDAQIEHYTEYISKNPDWTLAGIFADDGITGTNTKKREEFNRMIDECMAGNIDMIITKSISRFARNTLDCLKYIRQLKEKNIPVFFEKESINTMDAKGEVLLTIMASLAQQESQSLSQNVKLGLQYRYQQGHVQVNHNRFLGYTKDADGHLVIDQDQAEIVRRIYREYLEGSSMDKIAAGLEADGILTGAGKTKWHTSTINKILRNEKYIGDALLQKTYTTDFLTKKRIKNNGIVPQYYVEGDHEAIIPKDIFLLVQEELVRRRRVHTSKSGKRHCYSCKHCFAQIVFCGECGEFYRRVHWNNRGCKSIVWRCCSRLDNTGHSCRSRTVNESLLEQTAIDAINQVLCKKDDFLKTLQANITTVIKQGDNLSPEVIDTRLRELQKELLKKANQKDDYDAIADEILRLRDMRKQSEVDSVIKDEQMKQINDLQDFIKNQPTTVTEFDEVLINRLISKITVFADYFAVEFRSGTTITIKA

SEQ ID NO: 25667 - protein, 556 aa, synthetic construct
MKGAVIYARYSCERQTEQSIEGQLHECYKYAEKNGLSILGEYIDRATTGTNDNRPAFQKMLADSERTTAWDIVLVYAIDRFGRNSIEIAINKQKLIKNGKNLISATQRTSTNIDGSKNLDGILLENMYIGLAEYYSAELSQKIRRGLTESRNKGLFCGGKVVYGYCVKDKTIYINEAETETVRYIFQEYNNGKTIPDIIEVLDARGIKYKGETFKKNFLYRMLRNEKYIGITKYDGVEYKNIYPPIIKEDLFNAVQSRMVTYSVGAHSKDADLLLKGKVVCGLCGHMMNGDCSTSRSGKLMHYYKCSGRKRGTGCESRILRQDKLDEFIVDVTKQVFCSKENIQLLVDKVIAVHKQRQKDESILNSLKSRHSDLVKSINNMLFALQEGIITPSTKERLNMLESDKAEIEEQIAKEELALSKQISRDDVEYYLRRAIKSSPKILLNNLVDKVIVYNDKIEIYYKYCHKIPDDPDDQRGYFFEELRIPINCGKRNRQFLPIMIDHQKMIASVKYILNRKKKMLAPINYKKRPILASQNVTGADGYLLVEPRGFEPLTF

SEQ ID NO: 25668 - protein, 487 aa, synthetic construct
MPEALNAVIYARYSSDRQTEQSIEGQLRECYAFAKANDIAVIDTYIDRAISGKTDNRPAFQKMIEDSAKRQFQAVIVYRLDRFTRNRYDSAIYKARLKKNGVKVLSAMENLNGSPESIIMESLLEGMAEYYSVELSQKITRGMRENALKGKALGGQRVLGYKVNSDCYFEIDETTAPVVVDIFKLYSSGKTVKEICDILNARGVKTARGGAFNKNSLHTILTNKKYIGIYKTKYGEIVGGIPAIIDKELFEMVALRMEQNKKAPARAKAEINYLLSTKLFCGKCRSAMVGESGTSKTGKKYYYYACVKKKREKACDKSNVKKDWIEDLVIQRTVTDILKDDVIEKIADRLVELQKAEAAESGTMLYLENSLAEIQVSIKNIMTAIEKGIITESTKTRLTELEDEKRNVEIEIAKESIARRIISREQIIYWISSFKDGDITSEKYRQQLIDTFVHAVFVYDDKIVITYNYSGENNTATISDLDLSSPP

SEQ ID NO: 25669 - protein, 509 aa, synthetic construct
MPEALNAVIYARYSSDRQTEQSIEGQLRECYAFAKANDIAVIDTYIDRAISGKTDNRPAFQKMIEDSAKRQFQAVIVYRLDRFTRNRYDSAIYKARLKKNGVKVLSAMENLNGSPESIIMESLLEGMAEYYSVELSQKITRGMRENALKGKALGGQRVLGYKVNSDCYFEIDETTAPVVVDIFKLYSSGKTVKEICDILNARGVKTARGGAFNKNSLHTILTNKKYIGIYKTKYGEIVGGIPAIIDKELFEMVALRMEQNKKAPARAKAEINYLLSTKLFCGKCRSAMVGESGTSKTGKKYYYYACVKKKREKACDKSNVKKDWIEDLVIQRTVTDILKDDVIEKIADRLVELQKAEAAESGTMLYLENSLAEIQVSIKNIMTAIEKGIITESTKTRLTELEDEKRNVEIEIAKESIARRIISREQIIYWISSFKDGDITSEKYRQQLIDTFVHAVFVYDDKIVITYNYSGENNTATISDLDLSSPPLQSNSNIFVTLDVFGLVVQIER

SEQ ID NO: 25670 - protein, 602 aa, synthetic construct
MYGSGKERDFMPNLRKIEAAVPAIREKKKVAAYARVSMQSERMLHSLSAQVSYYSGLIQKNPDWEYAGVYADDFISGTNTVKRDEFKRMLADCEAGKIDIILTKSISRFARNTVDLLETVRHLKDLGVEVQFEKERIRSMDGDGELMLTILASFAQEESRSISDNVKWGIRKRMQNGIPNGHFRIYGYRWEGDELVIVPEEAEVVKRIFRNFLDGKSRLETERELAAEGITTRDGCRWVDSNIKVVLTNVTYTGNLLLQKEFISDPISKQRKKNRGELPQYYVEDTHPAIIDKATFDFVQEEMARRRELGALANKSLNTSCFTGKIKCPYCGQSYMHNKRTDRGDMEFWNCGSKKKKKKGTGCPVGGTINHKNMVKVCTEVLGLDEFDEAIFLEKVDHIDVPERYTLEFHMADGNVVTKDCLNTGHRDCWTPERRAEVSMKRRKNGTNPIGASCFTGKIKCVSCGCNFRKATRNCKDGSKVSHWRCAEHNGCDSPSLREDLLEQMAAEVLGLDAFDAAAFREKIDRVEVLSSSELRFCFKDGRTVSRNWQPPERVGRPWTEEQRAKFKESIKGAYTPERRRQMSEHMKQLRKERGDKWRREK

SEQ ID NO: 25671 - protein, 464 aa, synthetic construct
MARSVTVIPARSQKVRTGHKAVQEKKIRVAAYCRVSTDQEDQLHSFEAQVEYYTKYINEHENYEMTGIYADEGISGTNTKKREQFKKMIADCEDGKIDLVITKSISRFARNTQDCLAYSRKLKNLGIGIIFEKENINTLDSTGELLFTILSSLAQDESRNISENCKWGIRTKFKNGEMHLNTFKFLGYDKDENGKLVINKEQAKTVRRIYRDFLIGINPAQIAKELTEEKVPGCLGQTKWYPSTVTGILKQEKHMGDALLQKTYTADFLTKRQVRNNGEIAQVYVKDSHKGIIDKQTWNAVQEEFDRREKFMESHGTDRYSYGADCMPFCEKVFCGECKSLFTRHSWSSRGIVQWQCKNHRKDGKVACTNAYVDNADLEKGFVKAFNRLVTDRDKHMERWQQMKSDGTPLEKIRAGQMMEAVGNEPLTRFVPEIAQLVLCEVTVLGAKKYEFFFLEGSRVKVSV

SEQ ID NO: 25672 - protein, 535 aa, synthetic construct
MNSYDISFRPEEVIQYLRKSRSDDPNMTIEEVLEKHEHMLRDFAVNHFGAPVPDCNVYREVASSETIDGRPEMLRLLRAIESPDIRAVLVVDVQRLSRGDLEDAGRLMKLLRYTNTQVITPMKTYDLRDEWDRDIFERELKRGNEYLEYFKKIQARGRLQSVQEGNYLGSKPPYGYDRAVIRIGKKNCPTLAVNKEQADVVRLIYELYVNKDWGAQRIANHLDSLGIHPLHNAHWNPAVIKDILRNYHYIGKVVWNRRKTITVVDNQEVYKTRPWNENMLIFDGRHEAIISEELFHAALARQGRSHRCRPDTRVSNVFASILHCSCGYSMSLRHDGRGSLRLSCDDQRHCKSGSIGYEELIDYICKVLTAYIDDFKIKVKHDNANEVDIHRALVSDLEARLAALEAKEVKQWEVYSMEGMPRAIFDKLNKQVKEDKAEIERALKQARKDSPDPVDYRERIAKFGDALNALQNPAASAEIKNQYLKAIINDMIYTRPGAVRLTADNCSDYGINYKDMAKRGGWYSPPFRLEIKFRF

SEQ ID NO: 25673 - protein, 526 aa, synthetic construct
MHGAYILARYSTDRQNEDSIEVQVSACRKWCDERSLPVLDVFADEATSGMKATRPEYARMMWQLEHGGADTVVIYDQSRMFRKLTAWFDFRDQLARLGVDVVSVTQPMIGGDLRDPANFLTEGSMALFNQMWVLQTRQKVVAKMRYMAEQGLHTGGTPPLGYKVVDGRLVIDAAEAETVRLIFGLYASGMTYREIIRRLNAEERRTKRGGNFGVNSLHDLLKNPKYVGDLVYGKVAKRPDGSRNSHAVAEDAIVVKDVLPAIVDRETWEKVQLKMQENKRSAAGRPASARAYPLKGKVFCRECKSAMLVTAAKRRGKRYYYYTCGAKHRKGLCDNSQIPVSALEGIVANAVRQRLSEPESVGGLIRILRDERAKLSEAAVQRLRAMQKRDREIAKQLDAAVNAVLGGLHSPILTAKVNALEAERAKISHDMQQLRAQVSGAEIDEPRLRELLALAMQDDAAVLSIVVRVEVGKDEIAVWTLLDADPNGDFDFAEDGVPITPSEVAPSYNNSGCPRWSTKKEASFVR

SEQ ID NO: 25674 - protein, 453 aa, synthetic construct
MRKITKLETKNIELPKLKRVAAYARVSVERGRTLHSYSAQVSYYNELIQKNPEWEFAGVYSDLGISGTGIEKRNDFKRLLQDCEEGKIDIILTKSISRFARNTVDLLNVVRHLKELGIEVRFEKEGISSLTGDGELMLSILASFAQEEVISTSNNIKWAIKKKFESGKPQCRYKIYGYRWDGDNLVIEPEEAKIVKLIFQMYLNKVSAERMEIELKKMGVIATNGGYFNIGTIRDMLKNITYTGNLLLQKSYTPNPLVRRKKENTGQLPKYYVENNHEPIIPLEMFMQVQEERERRKAEGQRANFGKNITCFSCRVKCPICGRNYMRNSRSKNSDGIKAHIWTCGTRLIGGSKACPGKTINEIALKRVSAKVLGLDEFDSNAFDEQIEKVIVVGDDLLEFHFNDGKIVSEKWEYNARKEYWTEEKKKERAEKLRKMWREKNDKKSNNNTSIIK

SEQ ID NO: 25675 - protein, 525 aa, synthetic construct
MTKKVTTIPALLNKQSTNQVGTIKKRRVAAYARVSTDQEEQLTSYEAQVDYYTNYIKSREDWEFVDVYTDEGISGTSTKHREGFNRMVKSALDGNIDLIITKSVSRFARNTVDSLTTIRKLKDIGCECYFEKENIWTFDGKGELLLTIMSSLAQEESRSISENVKWGHRKRFADGKVSVPFGNFLGYKKGEDGNLVIDEEQAVIVKRIYREFLSGSSSVAIAKGLTNDGIETPGHKQKWYATTVRSILTNEKYKGDALLQKHYTVDFLTKKQKINNGEVQQYYVENNHPAIIEPDVFEMVRLEIDRRLMLKGKYSGTDILTAKIRCGECGGSYGAKVWHSNDKYRRIMYQCNSKYSGKEKCKTPAIRSEDIESRFVNVVNILIENKDEIISNLEKVLNKICNKKELLEEKEKLENSLTEQVEKIQDLIDINSRVAQNQEKYKKEYDALIKNYDETKCKFEQLEIELSRQAAKHQVIKDYISTLKKKEKPLTKFDGLIWGSLLESATIKDKDVIVFRFKDGTEING

SEQ ID NO: 25676 - protein, 516 aa, synthetic construct
MQRAVIYARYSPGPNQTEQSIEGQVRECTKYAELHDLRIVGTYIDRKISGKTDNRREFQRMIDDSEKHIFDVIILYHTDRFARNRYDSAIYKHKLKENGVELRYATTDIPKGPEGIILESIMEGWAEYYSAELSRKIKRGMRESALKCHSTGAGRCLGYRTAEDKSLVIEPEGAKAVQTVFDMYIKGKSHADICRYLNDCGFRTAQGKLFNKNSVTHIIRNKRYIGVYTYDDITIEDGIPAIISKDTFHLAQLEAAQRKTAKRPKEPKAEYLLSGKAFCGHCQKPLVGVSGTGKSGNKWYYYYCQESRAKRGCTKKPVKRDWLEREVVERTVAEVLQPEVIQHIAKKCYDLQMEYRQDNSDVLFYELKLKDVRKAIKNTMHAIESGVKTKTLPARLQELENEEEALEAELAIAKASDFVITTDQIEFLLTQFAEPWECESEEEYHRRIIKCFVHKVFLFDDKLLIYYNVSRDGKTREQSEAELLEEALGEGFDKRSSGSTMQKRHPIWDGVFAWLR

SEQ ID NO: 25677 - protein, 517 aa, synthetic construct
MTTNKKVQIIRGSKSYAEDILRVAAYCRVSTDSEDQVNSFIAQMHYYYSFIKQAENMELVDVYADEGITGTSVAKRDDFNRMIKDCKAGKIDRIYVKSVSRFARNALECLEYLRILKECEVSVFFENDGIDTGALNSELILYIKAAFAEAESTSNSKRVQTANRMRAENGEYVFVSAPFGYRIENNELVPIPEEIKVVERIFKEYLAGLGAGKIAAQLNAEADMIGKPWGKERIRYILSNEKYIGDSLFQKTFTPNVLPLKNRPNRGEVEMYYISNTHAPAIDRELFGAVQEMLKRNMQKKAKCAESGKYSLSGKLYCGDCGWRYKRKVQNGTAYWICSGDGIAGRHCKTKPLSEEVFFKIFVNFYNRLRVHENLILRNSVTRLSEIKKMITCMDSEISDLDKQLGLLTERHNLYVTLMQGCQMDEISFAEQCAKAEREINKLRSRRNKLLSEDEDEKSIDDIRMLRNKLSSAPKAILKFDFELFDAVVEKVIVDDDSKVSFVLCCGLKLREAIAWN

SEQ ID NO: 25678 - protein, 549 aa, synthetic construct
MNNTGVQVRTKTVTKIAANPALSKRNDPNRILRVAAYCRVSTDDEDQLNSYRTQKSYYTELIKKNPKWRFAGIYADEGITGTMVKKRDDFLRMIEDCEKGKIDLILIKSVSRYARNIVDCISYVRKLKALGIGIYFEEQNINSLTEDSEVYIGIYGVMAQSESENISANVKWGINKRMQNGTYACRFTLLGYRRNKDTKEIYIVPEEAETVKKIFQMYLQGRSLDQIKRYLEENNILTVRGNPIWDKGVIKSMLTNEKYVGDIMFQKTYREDCISKRTKINRGEMDRYLVTDNHPAIIDRETFRMAKKEMVKRSSKRRTSSNAVTELGKYSGKYALSELLFCDICGSPFRRKTWTRKGVKRVYWRCLNHVENGDKACPQSRGIEESVLHEAICRGMSKCIPETGDVKNLVRTMLAYATSEDQGLLECQTLENAIRELQEKANEAEEMCIRTEGNKEPYMEQIKKYYSSIAELRARITEITKQLEESDEFQTEMQQIDSWLENEEILFAEYDDDIVRYLIDSIRVTDDLKLIINVKGGVSVTEELYQKED

SEQ ID NO: 25679 - protein, 552 aa, synthetic construct
MKAVIYARFSSHNQREESIEGQVRACQRFAKEHDMTVIEIYADRGLSGLHADNRPEFQRMIADSDRHKFQALIMWNLDRFSRDKYDTAVYKSRLKKNGVTLYYSDQNIPDTPEGIILESLLEGFAQYYSANLSRNAKRGLQENARKCLWNGGGLPLGYTIDETKHFVIDPAGAACVRLIFQMYADNHSIKEIVSTLNEKGYRTVKGNKFRLGSIQGVLRNRKYIGEYHASGITVPNGVPAIVDVELFNAVQEKIGVVSTAKARNKAEIPYLLTTKVFCGHCGSPMIGESGTGKGGSTYRYYKCSCRKNRKGQCDKRTEQKEWLEETVVAQTVEKFLHPNVIEDVSNACAAVLEQDCQNNALLKALNAQLADVEKSSRNLIKAIEAGVFTASMRERLAELEQQKEDITVQIAREQLRKPQLSAEQIAFFLRSFLDGDAHDPNFQERIIESLVRRVDVYDEGSGNRKLTVFYNLKKNNHSSVSVKCSDSESVGLPKRSVAKAADFFALCRRTFFQFQFFQNAQLNSVAFLSFCAILYEKGRHAAWDKKKSSSKS

SEQ ID NO: 25680 - protein, 538 aa, synthetic construct
MQPVRTVTKIDANPLLSANKNDYKQINVAAYCRVSTDSDDQLQSYEAQVEYYTDHICKNPKWHFVGIYADEGITGTVVSKRERFKDMIRDCEKGKIDLILTKSVSRFARNTVDSLNYVRKLKAMNIGVYFEEQNIDTLTTDSEMFIGLYSVMAQSESENISANVKWGVRQRMKNGTFGFHYNTYGYRKDENGEPEVVPEEAYFVKKIFDLYLDGYSTKKIADYLNEYGAITRRGNEWNDRGVQRTLANEKYIGDLLMQKTYSVDCISKKKKKNNGELPMYLVSNNHTPIISREIFKLAQAETAKRNSKRKKSSLGSTELGKYNSKYALTDDLICGECGSSYRRAVKYDNGRKKVYWRCLNRTENGTKFCKKSSGVREEKLHSAICRALSKIAPSKDEVFNAMKASLEYGVTNDDSNLNKYNLKLSIQKLQDEAEDYMMKAATTEGNKEKYFEEVEKIFAKVKVLREQLDVLEATSSQEEESNSELDRVTETLKNMDFSLCEYDDLIVRRTIECIKVMSNKTIVIIFKGGFEVTESLEV

SEQ ID NO: 25681 - protein, 511 aa, synthetic construct
MKEVQVINPNLKQKTDDLLRVAAYCRVSTDSEDQINSFIVQVRYYNEFISRNKNMVLVDVYADEGITGTCAEKRDEFLRMVSDAKKGKIDRILVKSVSRFARNALECIENIRILKSYGTTVLFENDNIDTETMNSEMILYVKSAFAQSEAMAGSKRVSTAFRMKMERGEFKTTNAPYGYDLVDGNLIPNSEQAPIVQRIFKEYLSGNGMTKVAEIINEEEQTNRIWDKTAIKYVLKNEKYIGDSLWQKTYTPQILPFKKKRNKGQVEKFYVTNTHQGIIAKEVFDLVQEKISTSCVSKRNTGKIAETPFDRKIFCGDCGWSYGKIISSGELYWGCINDDLSAGKCSGPNIKHEILEKAFIRAYNKLRLYETEIVDKTLSQLISIRTSLASMNEEVSSLNREIAILSEQNSMYNELKTKNIIDDVSYYEKTMVIMNRLNALRDKRLKLVAADEDEMIIEKIRKLKSNLDKTPKAIFVFDEAIFNLLVEKVFVFPDNKVVFELLVGIKLGVDF

SEQ ID NO: 25682 - protein, 520 aa, synthetic construct
MKNVTKIDQVDLSIFKKLRVAAYCRVSTDSNEQELSLDTQKNHYESYIKANSEWEYAGIYYDDGISATKTVKRDGLLRLVEDCEKGLIDLVITKSISRFSRNTTDCLALVRKLLNYDVYIIFEKENIHTGSMESELMLAILASMAESESRSISENEKWSIKKRFQNGTYVISYPPYGYANVDGEMVIVPEQAEVVKEIFASCLAGKSTHIIAKELNEKGVPTKKGGKWTGGTINGILTNEKYIGDALFQKTITDAAFKRKRNYGEEEQYYCEDHHEAIIDKDTFEKAKEAIRQRGLEKGNCSEDTSKYQNRYVMSGKIKCGECGRSFKRRYHYTSHGRSYNAWCCGGHLEDSKSCSMKYIRDDDMKRVFLTMMNKLRFGNDLVLKPLLIAITTDNSKKNIHSVEEIEKEIAANEEQRKQLNTLLTRGYLERPVFAEAHNKLITEYEHLIARRDMLYRMDDAGYTMEQKLKELVDFLNGAEPFTEWDDSLFERFVEKVKVLSRDEVEFELKFGLRLKERID

SEQ ID NO: 25683 - protein, 526 aa, synthetic construct
MGKVRVIPSTINPLTHQSIVANVKRKVAAYARVSTDSDEQYTSYEAQVNYYTGYIQSRVDWEYINVYADEGISGTNTKKRVQFNKMIEDALEGKINLIITKSISRFARNTLDTISYIRKLKAAGVEVFFEKENLWTFDSKSEMVLSMLAAIAQEESRSISENVKIGKRWGFKEGKVSMPYKIFLGYDKVDGKIVINEEQAKVVRLIYRLYAREGYSRAAIADYLNEMKVPKPSNPEGKWSINNITAILTNEKYKGDALLQKGYVDNYLDHTVKKNKGVLPQYYVENSHPAIIDKDEWNMVQEELKKRDKFRYAYSKNNPFSSKLICGCCGHFYGLKVWHSNTQYRKEIMQCNKKYSTKDDKCDTPSVLREDVNKRFIEAYNAIMINKEEVIKSAKELIGLLTDTTKIDKRIEELNGNISDTKTLVENLIHDNALKAQDQDAYIKKCNSMTAQYDILKQQLDEAISERDSREIKSKSMNLFITDIKEAPIMINEFDLTLWNIMLDEAIVNKDGSITFKFKNGMEYKN

SEQ ID NO: 25684 - protein, 476 aa, synthetic construct
MKKKIIAISPEEQKKKAKITPIEKIKVAAYCRVSSETDEQLNSLSVQRKYFDELFAAHSDWTNEGIYYDEGISGLGMKRRAGFNKMVDDALAGKIDLIIVKSISRFARNTVDALKTIRDLKAKGIRIIFEKENIDTSDTKSEFILTIMSSLAQQESQSISENVKWGIRKSYVEGKVKIPGFFYGYKYCGKYSFQVDKEEAKIVCLIYKMFLERKARNQIGAYLDKNNVPTATGLENAKWSRNVVNSILTNEKYCGDAILQKRYVQDYITKKQVINDGKLTKYYVKNNHEAIIPRATWELTQEILKSKRYENRQNNLFSLMIKCSNCGGWYQSKTQTRDYFVRTFKFYQCENKLTKTKECKNSCDITQDQLEVLFHDATLELYDVFPEVLDDLCSITEKIIEGKRKQNRLKKAFKEKPNFIISEYEKTSWPVLVDYAEITQNTLTFHFLNKGLITENFVRWKPIEHFERKTKSPPKQ

SEQ ID NO: 25685 - protein, 491 aa, synthetic construct
MRFLNVALYVRVSTDIQVDGYSIDEQLERLEKYCDAKDWIIYNKYIDPGFTGSNINRPGLTKLLQDIHKGKIDLVLVYKLDRLSRSQKDTLYLIEEEFLPNNVDFISMTENFDTSTPFGKAMIGILSVFAQLERENIKTRLAMGHVGRAKAGYWRGGSNPPIGYDFINGKLIINEYEALQVRTIYKMFLDGETIHGITRYMSEHFTNRYSNYRTPGQTGVILRNRLYIGKIKYKGVEYDGVHEPIIDIDTFERVQKRYKEISGKWSDHYRSPFKAKHLLTGLLYCGNCGARYFACTQRRKDKTTGKYIKSTESYVYYKCYTRDGNKSMRKGDYCKNPTIRVDKLDKVILDEIKKLKLDPDRLERIINTESKEKVENTELTVLRNKLDNTQSKIDKLMDLYTIGTIPITEIGDRIKPLYEEKEKIELEINTRENELQEPHGLSISETRDILDQFADIDNLDHDLKRELVQSLIERIEVLPEPDSIKIYWKFV

SEQ ID NO: 25686 - protein, 502 aa, synthetic construct
MEIQIREGNREQKRKLRVCAYCRVSTDADEQENSLENQIRHYETVIKANPSYEYAGVYSDFAISGFKEKRPGLQKMLADAQKGKIDLILTKSVSRFARNTSIVLEATRKLKELNVGVFFELQNINTLSGEGELMLTILAAFAQAESESGSVGAKMVYQRKYEAGIPVQYLERSFGFKKDERGGYIADEEKAVWVRKIYDMAAQGYTLAAIKRYLNENNVKTVGGAKWLDSTVLRILENEIYKGDYIMHKYFVNEERKLVRNRGEVDAWYIEDDHEAIVSPELWQKAQDALEAKRDYLAEGSVIEEFTEENYPYMNKIFCARCGHPLYKRIYSNGNRLNWGCSGTKRYGKSFCEGINIPDGVLRGAWHFDENMYIGEKQTDKGKKEFTYLKEASWKRRHKKKEPEPIPENTETEYPYREKIFCGLCGSRLVRHVNTKNHKVIWVCNGRKRKGKDFCDGTRVPDTIIKGWGEIKKDIYIQRKDDKNGKKRYSYTSKKPKGADRA

SEQ ID NO: 25687 - protein, 548 aa, synthetic construct
MKFKYPAMGTTKNAVIYARYSSHSQREESIEGQLRICHEYAKAEGLAIVGEYIDRAISGTTDARPDFQRMIDDAKKKQFSYVIVYRLDRFARNRYDSVLYKHELKQCGVKVVSATEGIGTGDESILLEALIEASAEYYSMELSRKIKRGRQDSAMKGNFLGGAVPLGYKVVDSKFIIDDETAPIVRYIFERYAAGIGKKQIIDELTAKGYMRRTGKPFTYRAFDSVLRNRKYTGEFTQTGITVEGGCPAIVDTEMFEKVQARLEINRRAPAKAKAKTEYLLSGKMFCGYCGEPMIGISGTGRHEKTFYYYSCVGRRGKSGCKKQHEKKDFIEWYVCEQTVQYMQDPERLSHVAKRIIEINDAEFDGGKVKELERAVENCDNDIRKLVDALTTIPDAGRAALYDKIERIGAAKADMEIDLAKVRVLSEVRYKQEDVEAWIRSMCRGDLMDFEFRRQLIDVFINSVYLFDDRVVIVYNIKNGKQVSAIDVLNAVEELDGVELSSDSTEDGNAGGSGSFLVADAPPYMKNPNLFPIGNGFGFLIFIKDIID

SEQ ID NO: 25688 - protein, 464 aa, synthetic construct
MARSVTVIPARSQKVQTGHKAVQEKKIRVAAYCRVSTDQEDQLHSFEAQVEYYTKYINEHENYEMAGIYADEGISGTNTKKREQFKKMIADCEGGKIDLVITKSISRFARNTQDCLAYSRKLKNLGIGIIFEKENINTLDSTGELLFTILSSLAQDESRNISENCKWGIRTKFKNGEMHLNTFKFLGYDKDENGKLVINKEQAKTVRRIYRDFLIGINPAQIAKELTEEKVPGCLGQTKWYPSTVIGILKQEKHMGDALLQKTYTADFLTKRQVRNNGEIAQVYVKDSHKGIIDKQTWNAVQEEFDRREKFMESHGTDRYSYGADCMPFCEKVFCGECKSLFTRHSWRSRGIVQWQCKNHRKDGKVACTNAYVDNADLEKGFVKAFNRLVMDRDKHMERWQQMKSDGTPLEKIRAGQMMEAVENEPLTRFVPEITQLVLCEVTVLGAKKYEFFFLEGSRVKVSV

SEQ ID NO: 25689 - protein, 684 aa, synthetic construct
MSILQTIKTIIRVVLYLRLSDEDKNKLSKEELSQSIKNQEIMLRDYAEEQGWEVVGVYNDDDWSGSDATRPDFNRMIEECKNGNVDIVLCKTQARFARDMELVEKYVHNLFHEWNVRFITVVDRIDNARKETKKTSQILGLTDQWYLEDTSLNIRETLKSKRKDGQLTSSFATYGYMKDPENKNHLIIDPISAEVIKRIYDEYLSGTGLDKIARRLNEDKILSPYEYKLLNGCKLKIPVIKDYVNYGYIEKTGTYMLDVSFTNKEEYILKDLVSFNYITTDMKSFNNKCDIVLKKYTNNRTKIYYSENDNIDINNFNIDDCILLNENDVIPKTAKVIISYTKELDRTHTINYQFEITLKENREHEDYYISICGKAKDEIKKSDFIHNIRKKFKWSSSTIRTLLTDEVYIGNMVQFKSTTVSYKNHTVVWNDDETRIRKDNTHEPIIAKDIWYTVQERLENTARSCKCGTVHPLCNKVYCSNCNQIFTKTGNRRSDGTGYLCCKDKKTNWSNCDNKASIREDQLHQFILEKMNEMLKKFYEEDDLKEMQNEVIEQDLYKDKLNSLEKELQSINKELQGKSTYFQKLYEDRTNGILPEKEFLILMNKYKDDNEKLEERQKIVKKEISSTLAKKETVKTKKNIFKKYRHIEELSIEIVEDFIDKILIGSYDETTNSRDIKIIWNFTI

SEQ ID NO: 25690 - protein, 490 aa, synthetic construct
MKAVIYARYSSDNQREESIEGQLRECKEYAERNGILVLQSYIDRALSAKTDNRPEFQRMIRDSAKGLFDTVLVWKLDRFARNRYDSAHYKSQLRKNGVKVVSATESIADGPEGIILESMLEGMAEYYSAELAQKVNRGMRENALKARSNGGTIPLGYRLDEEHRLKIDPLTAPVVREVFQRYADGENLRTIIRSLNERGIRTSRNYPFRHSSFNTMLKNRKYIGEYHYKDVVIPDAVPPIIPKELFERVQERMKKNQHAPARAKAEEEYLLTTKLFCGHCGRLMIGESGKGRNGTIHRYYKCAGAKRRLGCHKKAAKKDWIERVAVQYTIQRVFQDDLIAQIADELVALQGTEDSALPLLRRQLADTERGIENMLNAIQQGIFTSSTRQRLEELENLRAELKSSILQAELERPQYSREDIIQWISRFKGGDPNDKAYQRQIIDIFLNSIYVFDDKLVFTYNYKNGSQTVSLADIFAAFGSDSRAGASPYV

SEQ ID NO: 25691 - protein, 567 aa, synthetic construct
MKEDNRIVALYVRVSTGYQVDKDSLPFQKKELKAYCEHVLHIDKKRIEIFEDAGKSGKNTKRPAFERMMEKVKLGQVSHVIVYKIDRISRNLVDFSLMYDDFKYNKVTFISLNEQFDTSSAIGEAILKIILVFAELERKLTSERVTDVMIGRAQSGLWNGARVPYGWDWDDEKKCPVHSKVEAKYVRQMYSDYLNGGSSVSIAKSYNANKIPTKRGGEWTSKTIADVIRNPMNKGDYRYNFRESARGRKKPQEEVVYIKGVFEPLVPINDWERANKLMDERGLKMNSSGQTIMNKRCNVFSGLIICGKCGENFNVRSKDCRKGIGFRPSSYICGKKAHKGTCDNPNVSDVIIAPLMINYIAAMVDVTKHKRQIKTTKELEQVILKRISFSDIAGIAEDSLQATLDLLYGKNGTQLWSANAVSKEQDSENKQKLTELQEKLKKTGRAIERLKKAFLFDDDGMDEKEFLEMKSSLEIDRVKIENEIKGMETESISVNVNQVEFIKTASQYLLMHELNKDEIIDYKELAVTDEESIKILFNEVLDHIAIIDRHVTEIVFKNGLTHKLLYK

SEQ ID NO: 25692 - protein, 503 aa, synthetic construct
MSKIHKIEAMIPKQIEKKKVAAYARVSALTEMTQYSFSAQVNYYSALIQKNPNWKYVGVYADKGITGRSIKKRKEFNRLIDDCNNGKIDLILTKSVSRFARDTVDTLNTIRHLKNIGVDVYFEKENIHSISQEGELLLTFLAAYAQAESENTSENIKWGIRKGFKVGKPNGYKAPYGYKWNGNSYSIVPEQGAIVKEIYKRYLDGEPAYSIAKALKKRGIKGQTGIPMDDSTIRYIVSNISYTGTLLLQKWFFTQNHVRKENKGELPMYAVENMFEPLISKEDFQKALQIKKERAEAMPNKNPRLTAFSGIVKCGNCGCSVCRRTTRYGKKWVCNAKDRKGMAACDFRDIYEIELEAAATKALAVNEFKEDLVRREVKLITIDNAYIVFNLKDGKKKQILRTYTKGYSGFSCRLFCGNCCKMLEADSRTLSINGQKKRYKIWCCRKCPGQREFDDVIRKATQSLFNEPQCEGLFAQNIEKAIIYNDRIDFYFKEGKVITWEKE

SEQ ID NO: 25693 - protein, 521 aa, synthetic construct
MIAIYARQSIEKKDSVSIEAQIEKCKYYCENQDYKIYKDAGYSGKNINRPQFSKLLEDIKSGLITKVIAYRLDRISRSIADFSQLLILFDEHNVDFVSATENFDTNTPMGRAMINIVMTFAQLERETIVERVTDNYYFRANNGYWAGGYAPYGYEIKHIIGNDGKRHSVLVENKDESKIVKEIYDMYINQNISMRKIAQQLNYQNIPTKKQSGNWGINAVNAILSRPIYTEATTKIYDYFNKRGTCITNNIEHFDGTKTANLYGNSKKNNNVKALRNYDEMFLSLINCVPLISNEDWFKVQNIKGTKKNLPPRTNSSKISFLCGLVKCGKCSSNMVTQGCKNRYGIQYYYLICSTKRNLGRIKCDNKMIDISKLEDIVINDIKKHFNSNEIETKIEKYMKNNKKENINLLKQKEEFENKIIKIDIQIQNLINSIAEGNITISKYINQKIEVLEKEKQNISSQLSTIIEKNNITQDNYLIEYVKNINEKINTKDFEQLKLLCHTIIDKIVITDKNIDIHYKI

SEQ ID NO: 25694 - protein, 433 aa, synthetic construct
MPRAITIVPKPPKLEQKKRVAAYARVSSGKDAMLHSLSAQVSYYSDLIQNHDDWLYVGVYADEAKTGTKESRADFQRLIADCRAGKIDMVITKSISRFARNTVTLLQTVRDFKAWGVDIFFEEQNIHTMSGDGELMMTILASYAQEESRSASENQKWRIKRNFEEGMPWNGAMLGYRLKNGRYEIIPEEADLVRRIYDEYLSGDGYLTIAKRLNEDGIPSRFGKQWGQSVISKILSNYTYTGNLILQKTFRENHITKKTIINNGELPKYHAEDAHDAIIDMETFQAVQAEKTRRAARFLKKPAPKKAYPFTSLLVCDGCGKNYRRKVTKTGPVWVCGTFNSRGKAACASKQIPEETLQAATAEVLGQVDFSEELLRRLIKSILVCNGNVLIFRFFDGSEVTRIWKDRSRRQSWTDEMKATARQKALERRNQNA

SEQ ID NO: 25695 - protein, 526 aa, synthetic construct
MPKVTMIPATINPLTHLPSVAARKRRVAGYARVSTDSDEQFTSYEAQVDYYTKFIQSKPEWEFVKVYTDEGISGTNTKRREGFKEMITDALDGKIDLIVTKSVSRFARNTVDSLVTIRKLKENGVECYFEKEGIYTFDGKGELLITIMSSLAQEESRSISENITWGQRKSFSDGKVHLPYKRFLGYEKGEDGRPAVVESEARVVKLIYGLFLEGKTQAGICKYLEELGIPSPGGKAKWSKTTVTSILQNEKYKGDALLQKKFTVDFLEKKMKPNEGEVPQYYVTGSHPAIIEPDEWEQVQAEFARRKTLGKAYSGKSVLSAKLVCEDCGAFFGPKVWHSTDQYRRTIWQCNGKFASEEHCHTPALDTETIQRLFIKAYNLMMQDRVQIIKEIEAWRQKLMDFGTLDADIERQLEETQVVAELVKAAVKENASTAQSQEAYLKKYEALTERYEKAAAELERLQSLRTSRSQQDKKMALYIRTLKKQPEVMHDWNDTIWTVMIERAIVHRNGEVTFAFANGTEIKVGA

SEQ ID NO: 25696 - protein, 573 aa, synthetic construct
MAYNAQNKTGARVAIYVRVSTLHQIDRDSLPMQKQDLLAYAKLMLNTDDCVIFEDAGYSGKNTDRPKFQEMMSQMRAGAFTHLLVWKIDRISRNLLDFATMYNELKALGVTFVSKNEQFDTSTAMGEAMLKIILVFAELERNMTSERVTATMISRANNGLWNGGRIPYGYDYDYETHEFSVNEEESKVVILMHDMYEQERSLVRVVRELNERGYRSRAGNLWSPVSLLIILRNVFYCGDYRYNMLKEGDRQKVKDESEWVTVENHHVAIIPKDQKERIMATLDSNSKLCKQRNIYKSSKHTHVFGGLIYCGSCGKPLGSTPGNLTRDGWHYSKYTCPTRRKSVTLCTGKSTSDPIIGEFVFNYILNMLNVQNDFDKISSPEELEKLLLIGDTFAYIDHIESNGLNDLFNVLSSGTVKGAVFGKGASLPTKKATVEPEVARLRNEKQKTERALDRLRSLYLYADEAMSEAEYMIQKNKLEETLEDINDQIGMMNTDSWQQSVSDEEFIQRASEFIIAQKLSGRKYVNYKRLAMSVDSEVLKNFVVSIIDSITIQDGLVSNIVFKNGLCHTFIFR

SEQ ID NO: 25697 - protein, 488 aa, synthetic construct
MEKARAVAYIRVSTERDAQLHSYEFQEHYWQSAFEDDPDTELIGIYADKGISGHSVQKRPKFLVMMQDAREHKFDKIYTKSVSRFARNTTQLLEAVRELRDLGIEVVFENENIHTFQPTSEIFLTIAATIAENDLEVDSARQRWSIQHRCENGWISVGSGLFGLKLTADNELEIVPEEAAVIRYIYESYVDGGIGSKRIADALNAAGVQSRNGYPWDAKHIIGLLRNEKYKGDVIMGKSVRHFGEYHKNPNAEYAPRYYMEGTHEAIVDKDMWEAAQRILEERSRNHCRTRIAHSFTGMIECGCCGKNYLHKVNNSQCKWQTDIWACRTYLRDGKKACGNSRIKDTVLKEKFISAYNEFIERRPQGDSMVALQEVLEDLRQQEQELAELMMQRLITKAAYEEERKSVKMQITDISEKISERRAKRVPESEYVPITEFSEEKTKRFLSKVVVTMFTVTFVFYNGAKITRTYDNGQPGNKVGWNKKKEEA

SEQ ID NO: 25698 - protein, 540 aa, synthetic construct
MATATRRVVRTMPQMFIDVADNQSERLQVAAYARVSTEKEEQEDSFERQVEHYKQLIYSKPDWQFVDVYADPGISGTRAEKRPDFLRMIEDCRAGKIKKVLVKSISRFARNTVDALQYIRELKDLGISVYFESENIDTLTPGGEVLLTILAAMAEQESRTISSNIKWAWQRKFQKGDIILNTGLMLGYRKIGKDDEGHDVYEINEEEAEIVRRIYREFIAGYSITQIAKRLQADGVKTKLGRESWRHNVIESILTNEKYTGNALLGKTFKPDVLTKYRQKNDGKKAPIYYVEGSHPAIIEKGLFDLAQQEMQRRRDANDNKVGGCRYSSRYPFSGMLVCGICGSKLRRQVRTMGSGKRTASWGCCNRISNGRAVCDSHHVNEDVLEAAYLTAMRRLVDSAEEVVEAVRDGAELALEPENKAAMDRIVEETIQLQEAALALHKAKQRMEIGSVEYASRVKEYSERMKELEAERNELQGTAAKYAEVRLWLDTFIEQTMQSDTLTTVDGTTMKMLVDRIHVRNDGIVVEFKCGVAIEQEYVK

SEQ ID NO: 25699 - protein, 449 aa, synthetic construct
MKKAGLYCRVSTDIQMEGYSIDAQKDFLKSYCKMHEIDNYEFYIDGGYSGSNINRPDMQRLIEDVEDHKIDIVVVFKLDRLSRSQKDTLYLIEEVFNPNDCGFVSIKENFDTNTPFGKAMVGILSVFAQLERETILERTRIGRKKRAEEGLWYGTGNLPFAYDYDEKKGILVPNKEKVEIVNKMVELYLQGMPMTQVGALFGLQDQTVRSIFTSPVGLGKIPYKDEIFEGQHEPIMTQETYDKLQQKMKERAVTYKHANYLLAGKIVCGKCGAKYRYQKAGTSSIRLYCYSQQTSKKNLIKDANCDNRRYYDYEIEDHVIKDLISMSLDESKFRHNMNMNDINVSQARIDRIAQIDKQVVNLLDYISEGIAVEETKEKIRKLQEEKEKIQKELSDEKAKERKSENLKVVISDLNTAWKTMTFEEQRNIVLEVIDKVVVNDNEIQIYYNI

SEQ ID NO: 25700 - protein, 515 aa, synthetic construct
MDQVGVIYARFSSHAQREESIEDQLRECHAFAERNGIRIVEEYCDQALTGKTDARPAFQRMVRDSAKGRFSIVITYKVDRFARNRYDSATYKARLKKNGVRVLYAKETIPDGPEGIILESVLEGYAEYYSANLAQNITRGLEGNALNCRTNGVVVLGYKNSDDDHYEIDETTAPIVREIFEKYAAGVKQMEICEELNARGLRTTRGGPFNKNSLVRILKNRKYIGEYHYMDVTVPGGMPAIISVELFEDVQQKLKRGRRAPSKDWSCADFLLTGKLFCGECGEPMVGTSGHGRSGRKYNYYICGAKKRRQGCKKENVAQDWIEEVVLTYTMEVVLQDDTIQEIADGVMDFLAREAADDGVLVSLEARLAEVKTSVKNLMKAIEAGIITKATTERMMELENERVELEDAIAIEKIKEPEIERDQVVFFLEKFRDGDLNDPAFRLRLVEAFVSSVYLWDDGRIDINYNYTGQGSKVSLDQAADIVSKIAGGDGSDLDSSGPLELNKITLCLLEFLII

SEQ ID NO: 25701 - protein, 479 aa, synthetic construct
MKTAACYIRVSTDDQTEYSPDSQLKIIRDYAFKHDISLIEKYIFAEDGGKSGKNMTNRTEFMRLISLTKKKPKLFDAILVWKFSRFARNQEESIVLKSMLHKNGIDVISVSEALPEGPFGSLVERIIEWSDEYYLINLAQEVKRGMKERASRGQPVCPPPIGYSMDNGKYVPNSDAQFVKNVFADYLAGLGLRAIAIKYGNLGLKTTRGNAPDNRFIEYMLRNPVYIGKIRWSVDGRAASRRVYDDPNIMISDGNHEPIISEEVFNEVQKRIGETKRLYKKYQRPEQPVEYMLKGLVRCSACGSTLTRVITGSAPGLQCHNYSRGSCHVSHSIRISKANDAIIAGLESSIETGSFNIVPPKINKAESTIDYDKLLANEQLRLERVKAAYQNGIDTLEEYKRNKEQIYAFMEKIKAEMEANGTRAAAADNAGFRQKAANVLKIIKDPSQPESAKNIALRSIVERIVFKKPENEFDIFFYV

SEQ ID NO: 25702 - protein, 495 aa, synthetic construct
MDAAQYLRKSRMEEGMDTEEVLAKHRKALAEFAERNNIHIIETYYEVVSGESLYARPEMLRLLKDVEDGCYDAVLCMDLDRLSRGRMRDQGVILDTFKDSGTLIITPEKTYDLSDELDDEMAEFKTFISRREYKIINKRLRRGLDQSIQDGCYVANAPYGYRKTTIDKKPTLEIYEPEANFVRMMYRMYADGYGCVSIARQVNLLGARPHRSAEFSRNSVATILRNPTYIGKVVWNQKSHVKKGAHGNAKHITIYNPREKWTITDGLHPAIVDKELYDQVQEIMAGRYRPSKQDGTVKSALAGLVRCSHCGRNMQKLNMKSGPYMICMKPGCCASTKYGLVEARILRHLQEILDELTSSKGAAIPRMSQEGYKQQLAAVRREQKAVEGQKSRLYDLLELGEYDLPTFRERMPVVKEKLSRLEAKEAELLAAMERDLHRDPAAQAKKIAAVLDAYGDADIPQRNALLHSVIDYVTYTKEKKTKPTDFVLELTLKPY

SEQ ID NO: 25703 - protein, 602 aa, synthetic construct
MYITVTLDPNGIYDAYLRKSRADMELEKLKKFDTLKQHEKFLKDRANQLGIKIRKIYREVVSGESIQERPEMQEVLKNVEAGTIDGILVVEVERLTRGDAKDQGTVTQAFKYSNTKIITLNKIYDPNSDEDEEYFEFGLFMSRREYKTINRRMQRARIANVLDGKYCASEPPFGYKKVRVKYGKGYTLEPVSEEAEIVKEMYQKRADGMGYDIICNWLNTLDFKPKKSDVWTPATIKGMLSNPIYIGKIRWNSNKQKKILINGQIIKKRKKGNSEDLILVEGLHPAIISNELFDIVQGIKPNKASTKHNTELQNPLATLVKCADCGRSMQRRPYYDNKKQEPKLRRKYDIDKEKLRLCLREHKGEYSLRDIATALKVRKHCVDHWFASNQSKFTMPYADKWEELKKLLNINTTEFDKAITTYESNLIEPHEDTLICPKAHCTNIGSNLALVEQETIKALQEYISSQKELLATYNPAEEDDNVMFVSLSKELDKYNKQLDKAYELVEQGIYTPQEFTKRTKTIKDKITNTEKELNKYQIKLNKDRIEKLLPKIEKVIDSYYKVTSAEKKNKLLKSVISYIEYKKEKGGRGYESNFSIVIHPKF

SEQ ID NO: 25704 - protein, 562 aa, synthetic construct
MKRKNCYIYTRVSTSMQVDGFSLDAQKEKLRRYAEFQDFMIAGEYSDEGKSGKNIEGRPEFQTMLNDISEGKDNVQYVLVFKLSRFGRNAADVLNSLQLMQDYGVNLICVEDGIDSSKDSGKLMISVLSAVAEIERENILVQTMEGRKQKAREGKWNGGFAPYGYELVDGELKIAEDEAEIIRIIYDKFIHTTMGASTVAKYLNRQGYIKKKRQNGTLDAFTAHFVKLVLDNPIYCGKIAFGRRKTEKIQGSRNEYHVVKQEEYPVYDGIHDAIISEEDWLLAQDKRKKTGIKNEKIYSTEHQHLLTGIIKCPICGAGLYGSVNRKRKKDGSFYRDYWYYACKHRLEYDGHKCTFKKQIHQEKINEAVVEVIRNIVKNSKFDSAIKEKLDASVDLSKYEKEEAYLMTQIRQLTAAKERLGSQIDRLDCSDRHYEQKYTDMQNRIDSLYDEIAEATENLETVQTQIKAIKEQKISQKRIFEFLELFDIIYNEFTEFEKKEFLHSFIKKIEIYPEQLENGQILKSIQFRFPVYYQGNEADMFIPNFENTVETVVLMSKVGVEYA

SEQ ID NO: 25705 - protein, 513 aa, synthetic construct
MARKKNIAAGQNAVIYARYSSHNQREVSIEQQVRECMKHAAELGLHVVGTYEDRAISGKTDKRPNFQRMMRDAEKGKFQAVVAWKSNRIGRNMLQAMVNEAKLEDCGVKVFYAEEDFDDTAAGRFALRNMMNVNQFYSENMAEDITRGLYDNASKCMANGRQPLGYKRGEDGRVVLDEANAAVVREIFTRVAAGDLFVDIARDLNAQGIKTSKGANWNKGSFQSICQNERYRGIYIYGDVRVADGIPRIVSDDLWYRVQEAMRMKKNPVGTRHRVGAEDYLLTGKLRCGHCGSYMTGVSGTSRNGELHYYYTCQKRRTEHACDKKNIRRDVIEPAVAQAIKMYCLTDDVIAWIADRTVEYWEKHDNDLQIEALEQQLEENKKATSNMLKAIEMGIITEATRTRMVELETEQSRLSVQLNVAKEDVVKIDREQIISYLELLQQGDIHDRDFQMELFKNFLVAVYVYDDNRMKLVFSCMGDQNSVEIPLETGEDPPDGGLSPDAKMFVLTPDSSI

SEQ ID NO: 25706 - protein, 503 aa, synthetic construct
MPEALNAVIYARYSSDRQTEQSIEGQLRECYAFAKANDIAVIDTYIDRAISGKTDNRPAFQKMIEDSAKRQFQAVIVYRLDRFTRNRYDSAIYKARLKKNGVKVLSAMENLNGSPESIIMESLLEGMAEYYSVELSQKITRGMRENALKGKALGGQRVLGYKVNSDCYFEIDETTAPVVVDIFKLYSSGKTVKEICDILNARGVKTARGGAFNKNSLHTILTNKKYIGIYKTKYGEIVGGIPAIIDKELFEMVALRMEQNKKAPARAKAEINYLLSTKLFCGKCRSAMVGESGTSKTGKKYYYYACVKKKREKACDKSNVKKDWIEDLVIQRTVTDILKDDVIDKIADRLVELQKAEAAESGTMLYLENSLAEIQVSIKNIMTAIEKGIITESTKTRLTELEDEKRNVEIEIAKESIARRIISREQIIYWISSFKDGNITSEKYRQQLIDTFVHAVFVYDDKIVITYNYSGENNTATISDLDLSSPPMQDNPNLRPIGQGFGF

SEQ ID NO: 25707 - protein, 572 aa, synthetic construct
MASRIAEKLAAKKAAIYIRVSTHWQVDKDSLKVQRRELIAYVTLVLGITDYVVFEDPGYSAKNTDRPEYQAMMDRIRTGEFTHLVVWKIDRISRNLIDFAAMHDELQSLGVTFVSKNEQFDTSSAIGEAMMRIILIFAELERKTTAERVTAVMLSRASDGQWNGGRVPFGYSWSKEAKTFSIVPEEAKAIRRMAELYEQYQSLLYVAKYLNDAGIVTKTGGQWTPTTVRTILTNPWYIGQYVYNVHSDGKGIEKRDSDEWITVENHHEPILNEDVFCRMKFLLTRNKRGGVPSHKTYVRKNIHIFAGLLRCGQCGSNMTANLDRRRANGFRPSQYACGSRRRKGTSCTNKYISDTTLGPFVLNYVANIIRASKNSSEATTPEVLERKLLRGEAFEDVASVSTDALGQLLDAFRSAGDAVEYRPQIAFSGDDNSIREIDTLRARRRKLDNALARLNALYLYDDEAMPEKDFVMQRGQITKQLEEVNARIEELQNQESSEELGDGFIGKASYYIMANKLIEDRYIDYEKYIRAIDPSIPHSFLQQIIDHIVVNDGRVISITFKNGSTHTFTYKT

SEQ ID NO: 25708 - protein, 542 aa, synthetic construct
MQVDGYSLDAQRDKLRKYAEYEDMIVAGEYSDEGFSGKNIQGRHEFQRMLQDIQDCKDGVEYVLVFKLSRFGRNAADVLNSLQLMQDFGVNLICVEDGIDSSKDSGKLMISVLSAVAEIERENIRTQTMAGREQKAREGKWNGGFAPYGYRLEKGELLIAEDEVDVIRTIFDRYIHTNDGVSGVAKYLNRQGFVKKLRQNGTIPGFSASFVKSIIDNPVYMGKIAYGRRRTEKKIGTRNEMHVVEQSEFPMYEGKHEAIISEEDWNLAQEKRKVNAYRREKVNDPTHAHILSGILKCPCCGKSLYGNIAKAHSKDKKTRYYYYCKNTVTPTGHECTFRLNIEQTEMNRMVASIISAMVSDSWFADAIKAKIGSAVDTNDLEKQLEALQAQLRQTLGTKARLERQMDGLDVNDPYYDRKISDLQRRYDEQYGAIDEIEVQIDDVQSQIRSIRQEKISGDNIYRLLLAFDQVYEAASEVERKEFMRAFIERIELFPEKQPDGNWIRKIIFNFPVPVNGAEVKELPLENETMVETVYLLSKLNTK

SEQ ID NO: 25709 - protein, 510 aa, synthetic construct
MDTDIFAIYLRKSRKDLENQDYDVLKRHRKILLDFAKSKRITIHEEDIYEEVVSGETIQDRPIIQNLLKKIEAGYYKAVLVMEIERLARGNTIDQGIIAQAFQLTNTLIITPNKTYDTNNEYDNEFLEFGLFMSRREYKAISRRIQTGRIQSCKEGNYVGSITPYGYDKEKLKGEKGYKLIPNNEAANVKLIFELFLDGLGTSSLSYKLNELKIKSKTGKQWTPAMVRNILINKVYIGILTWGKRANVKKLDNSVISKSRPINNNCIESKGKHEPIIDELTFYRTQELLKANSSKKVHKDKSLQNPLAGIIVCKKCGTNMIRRPIKNIPDTLLCKNHYCDNVSSYIYLVEKRLLDSLRNILNKYYHYLENYEEEHIKQKKDYNSQIKRLEQEIEKLKKQHIKTCELLETGVYSLELFKDRSSSIKEQIDGINKQKEELIKLNENNKIDKIIQAIPKIENCLKIYDTLTTEEKNKLLKTIINKAYYLKNKAGNRWDKDTQDKFTLELELFL

SEQ ID NO: 25710 - protein, 484 aa, synthetic construct
MNAVIYARYSCDRQTEQSIEGQLRECKAFAASEGIHIIGEYIDRAISGTTANRPEFQRMIADSRYKTFQAVIVYKLDRFARNRYDSAMYKSKLKANGVRVLSAKEHITDSPEGIILEGLLEAMNEYYSAELSQKIKRGMRENAIKGKTTGGNVALGYRIGADKQMEIDPAGAALVRRIFTSYDNGRTFTEICDDLNHAGYTTSRGKQFRIDTISRILANQRYTGTFQCAGEDAHCPPIIEPELFRSVQERLTESRHKHRHTQSPHEYVLTGKAICGTCGRRLTGRAGTSKTDKRYYYYCCPNKCCGWLPAAELEHAVLDAIAQYTTPEACEQIANATYALYQQSTHENADLTAAQRRLQETEKKLENAVNAVLNGITSAALQATMQQLEQQKAALETEVRLLQTDAPELKLEHFQYFAHRLLEVQAEGTEKILQLLVNQVIVYKEQITVLVNLTDKTKTPPLEQVTAALRESSCSVACGGGDEN

SEQ ID NO: 25711 - protein, 463 aa, synthetic construct
MTTKVERCAIYIRVSTTEQMMHGKSLEAQKEYLTNYAREHNMAVVGVYADEGKTARKELKKRKAIHSLLQDVEAGKIDVIIFWRIDRWFRNLSDFYKVQDILDSHNVRWISTSEPGINMETRDGRLQLNVVLSIGQNEVDTTSERIKFVNESSIRSGKLIFGDANMGYGYKSGIVDGQKRMVKDPDREHVVDAFYKYFFKHQNKCATLRYIQETYDPDFSFGIMRTLLSSEFYKGTYRGFPYCPAYLSEDEWSTLQKIQKRNVKATPSGRIYLFAGMIRCPVCGQLLCGTGCSSIINRKTGAKRTYCYYRCNRAMIDHICSYRHRLSQNLVENYLLDNLEDEYKNYKVKCEKIEKEKEKQKKKQSPEKLRKELDRLNFLFQKGRIEWDYYNEEYSRVESELNDLQNSLPEPAPNYSYLEELLNTDFRTMYSQLSQENRRAFWRSIIQEIHINEDSTITSVDFL

SEQ ID NO: 25712 - protein, 550 aa, synthetic construct
MYYQPKIDFTPDEVIDYLRKSRSDDPTLTVEEVLAKHEAILDEWSEKNLGGIVPEENKYREVVSGETLKERPEINKVIKRIESPKIKAIQIVEPQRLTRGDLEDIGRIMKLLKHTNTLVITPNRIYNLHDDYDWDALERELKRGNEFLEYTKKILNRGRLLSVSQGNYIGNTPPYGYRKEFVMEGKKKCPILVPNKDEAEVVRMMFDLYVNEDMGCWNICKKFDEMGIKPPKGDHWSANAMTKMLENIHYIGKVKWNHRKTITIVEDGEFVQTRPVAKIGEYLIYDGKHKAIVSEELFNAAQAKKGKNARLKPNTKIRNPLAGLLWCKCGRAMSLRTYKAHNAQPRLLCDGQTYCKTGSCTYDEMIVRVEEILKNCISDFEVRLKSDEGDSAKLHARLIKNLEKKKKELEAKELAQWETQSHPDPAQRMPQHIFQQLNEKLLKEKEEVQQALCKAYESMPEPVDYEEKIKMFQDALDALQNPDASAAEKNKLLKACIERIEYHRDKPERIKSQQVRFYDPVLKKTRNKSPLKTGGNWTTPNIELDVKLKV

SEQ ID NO: 25713 - protein, 483 aa, synthetic construct
MNAVIYARYSCDRQTEQSIEGQLRECKAFAASEGINIIGEYIDRAISGTTANRPEFQRMIADSRYKTFQAVIVYKLDCFARNRYDSAMYKSKLKANGVRVLSAKEHITDSPEGIILEGLLEAMNEYYSAELSQKIKRGMRENAIKGKTTGGNVALGYRIGADKQMEIEPAGASLVRRIFTSYDNGRTFTEICDDLNHAGYTTSRGKQFRIDTISRILANQRYTGTFQCAGEDAHCPPIIEPELFRSVQERLTESRHKHRHTQSPHEYVLTGKAICGTCGRRLTGRAGTSKTDKRYYYYCCPNKCCGWLPAAELERAVLDAIAQYTTPEACEQIANATYALYQRSTHENADLTAAQRRLQETEKKLENAVNAVLNGITSAALQATMQQLEQQKAALETEVRLLQTDAPELKLEHFQYFAHRLLEVQAEGTEKILQLLVNQVIVYKDRITVLVNLTDKTKTPPLEQVTAALRESSCSVACGGGDA

SEQ ID NO: 25714 - protein, 510 aa, synthetic construct
MIEIKRVALYARFSSDHQRTESIDAQIRAMKEFCDHNKWKIVETYIDEAYSATNDRRPSFQRMITDSGKGLFDIVLVHKLDRFSRNRYDSAVYKNKLKHNGVRLCSVLERLDDSPESIILEAMLESIGEYYSSNIAREVMKGLKENAFHCKHTGGLPPLGYDVGPDKKLVINEREAEAVRIIYDMYINGYGNRDIAERLNAAGYVTKKGNPFAPNHAAFYEILNNLKYTGTYVYNRSAAKDYNHRRNSHRHKPEEEIIRIANGCPAIISQETFQKAAERRKSASAIGKLGAKHFYLCSGMVRCGECGKKMSGGKRYGKYHFHTYCCTAHRSDCCNFREIDSEKLDHYVITLLERELFCEASMKKQIRHLNQCISRHNRKLPAWRKALDEQLDKLNLEYIQLQSSKEKTIEICEQINTLESQRIAFESSRNNLQELETVGYADFCGLIDSFFVLQEEPFRFRTFIRDYIKSITVYRESVVFSLDCGFGLLDGVVREFTAKRIDFKTPSQRM

SEQ ID NO: 25715 - protein, 485 aa, synthetic construct
MPTSDLKIAAAYIRVSTDDQEEYSPDSQVRLIREYARKNGYLLPEEYVFQDDGFSAATARKRPAFNRMIALAKEKERPFDAILVLMFSRFARNREESVLYKGLLRKQGISVISVKEPAVDGPFGTLIESIIEWFDEYYLINLSAEVKRGMSEKFLRGEAMGTAPFGYRIDSANKTFTVDPERAEIVCDVFRSYADGAGLRDIAVQLGDAGITTRRGNRPDNRFVEYMLRNPVYIGKIRWTPGHKTRYSRVHIADGVEVVDGKHPPIVSMDLWEAVQRRMDQRKAAHGRYQRQAPAAWMMRGLVRCSACGATLIMAGRSSSCPFLQCHSYAKGACHTSHSLSLRRANAAVLAGLRRSVGTLIFHMVPHLTSAPSRTADYGRLLEQERRRLARCKDAYQAGVDTLEEYRDNKARLEERIRRIEEQAASAAAAPESFDKAAYGKKSADILRFLETSADEGAKNEVLRSVVDHITYEKASRHLAIYFYT

SEQ ID NO: 25716 - protein, 547 aa, synthetic construct
MAKRVCCLYRVSTLKQVEKDDIPMQKQRCHEFAAQMGWDIVREFSEKGVSGFKVSAKQRDAIQEIQREAALNTFDILLVFMFDRLGRRDDETPFIVEWFVNNGIEVWSAEEGQQRFDNHVDKLLNYIRYWQASGESIKTSIRTKTRLGQIVMEGRFRGGYAPYGYQLVKKGRIGKKNRELFDIEVNPMEAAAVRRIFDLADQYGYGGRKTSTTLKEEGFLNLRTGEPFHYSTIQNILINIAYTGVLRSGESISEIFPDLQIITPEQFQRVQKGREQRSADYLAKCAAAYGTETITLKDGSEAEVSRPFRSYPRKNTGSALLSGNVYCGHCGGRIFASTARKTHHPTDGGTGRVAIYKCYNRTQHKENCGGPTTYRAEKVDAVVSKLIRDILQKAGAVSEYDIVQNQIGATASDLQQQIRQAKLELSKKHIEQGRWEGLMLDSLDGKCPFTPEQVKSRLDSVKEAMTSLTASIESLETRVADSDRLTQELKEQHQQLLSWAEMFDTASPAERKLIASHLIKAVTLTRGYGIQIDFNISEAQYLNGMEL

SEQ ID NO: 25717 - protein, 549 aa, synthetic construct
MQTIPIDLSALTPEERQQFADNPSVLSSDCEAVCCLYMRYSSDRQTEQSIEGQLRELIAYCKHHSYRVAAIYVDRAISAHASMDKRPAFQQMLADSARSSWKTVLVYKLDRFARNREDSAIARMRLRKNGCNVESAKEGISKNPEGVILEALLEGMAEYYSLELSQKVRRGMSETARKGNSTGGTTPLGYTVVDKRLQIDPMTAHLVEEAFRRYADGDTVAAICDDFNARGYRTTRGTKFNKSSFKNVFRNEKYIGVYKFDDVRADNAVPRIISDELWRAVQSRLKTSEQAPARGKAKVPYLLSGKIFCGHCGAPMVGECGRGKGGKTYNYYSCANRKKAHLCDKKPVPKDWLEDVVAQDALDVLTDEIIEFVAEIAAQQSEEDIQKNTQIPVIRKKISEIENKIRNLTKALECASVAPDAIVERLAELEAQKKGLSTQLSDEERGVIPLTKESVVVYLKAVREKAVPLETQKAMLIEMLVNSVTVYDDEPGFLKFVTAYRLTQIPSKTYRVPTPAVSPCSDIGRVGSPEKARFGVLFRLFQKTKGLLK

SEQ ID NO: 25718 - protein, 524 aa, synthetic construct
MDEKRLVDGTTALAEKQPRVIKIEPTERPQNVRLRVAAYTRVSSDSEDQLNSFAAQNRYYTELISSKAEWRMVDIYADEGITGTSVAKRDDFQRMMADCRRGLIDQILVKSISRFARNTKDCLQNIRELKELGVNVRFEREGIDTVNVSSELITAIYAAFAQKESESISGNMQWSYQRRMESGEFNTCKAPWGFRLDGRKLKICEPEADIVQRIFREYLSGKNPQEIADDLNASCLTERVWNYKAVDYILQNERYAGNALLQKRYTPDMLSRQQKTNHGEREMYFVPGSNDAIISPEIFKRAQGLRQKRSLGKAPVHSEIISQIRCICGARMRFKNVNSKWYLCCTSHDTKGDCLITPIRETQIHASFCRLYYKLKHQSIPILEQMLTSLQLIRNRRMLWSPDIVALNKRISDISSQNQTLAFLKQQGLVDPDIFIAKTNELTKQLRQAKLEKEKLMDAESDMTALQTQDLIDLLEGGPEFLDSFDAELFGELVEKIITESNDSVRFCLKNGLELRESIERTVR

SEQ ID NO: 25719 - protein, 539 aa, synthetic construct
MKEDAPRVIKIPAKPEATRQAEARRQLRVAAYCRVSTKEEDQANSYEVQKEYYADKIMSNTAWTMAGIFADKGITGTSAKKREDFMRMIRHCRQKKIDVILTKSVSRFSRNTVDCLYYIRALKQLGIAVIFEKENINSLEEDSELRITLSGAFAQSESESISANVTWGKRRAMEAGKVSIQYKKLYGYRKGEDGQPEIIPEQAEVVRWLYERYLTGASLRMIKDELEQQGVKCFEDSPEWTISRIRSILQNEKYCGDVLMQKTFRQDFINRKAIKNTGQLPMYLIENHHEGIVSREKYDAVQAEMARRNAAKSPSKNAVTGMASYASKYALSERLVCGECGTLYRRCTWTRNGEKRVVWRCVSRLDYGKKYCHNSPTLDEAPLQQAILAVLNTAMADKNSLIRQITDAMETEIIPFPGGTMSLGDIERRLRELEQQFQTLLEKATDDPAAYGGQFKEILDEQTLLKEKRSGILADNKEQAKANQRIMDAAQTLENASPHITEWDESAIRQLVETVKVLSKDEIAVTLKGGIEICQKIMY

SEQ ID NO: 25720 - protein, 570 aa, synthetic construct
MEVFNLEKNLKCALYIRVSTFHQIDKDSLPLQREDLINYAKYILGIDDYVIFEDAGYSGKDTDRPSYQNMMTRIRMGEFSHLLVWKIDRISRNLRDFSDMYDELKKYNVTFISKNEQFDTSTAMGEAMLKIILVFAELERKLTAERVFAVMMSRAEKGLWNGATVPLGFIWDEEIKFPKIYEPEAKIVQYIFDLYEKKRSTTKVAEQLNQENVKTKRDGTWTPRTVGAILTNPFYIGTYRYNTKTQKTRRWKDKSEWIVIEDHHPAIISKEQFERVSKILKDNYRGDYNRQRASKNVHILSSIIKCFKCGSNMNAGNDRARKNGFTPSRYTCYQIHKTYTCNNYASDLTVLPFIINYIGNYMTLQDRITKNHSYRDMESILLRGKYFTDIEHINKDDIKCTYKLLVNNLPVINYKLQENQEDKKTTFKDRYDIYKNEKEKQENALKRLDDLFLYAEDSMPKKDFILKRQEITNKIEEINSKIQELRAEENNFVDNKEFSLNAKASFYLITQLIGNSKNIDVRYLLENVDKSIIKDFLSTILNEVSVDHQKVQYITFKNGLTHHFEYKENQ

SEQ ID NO: 25721 - protein, 556 aa, synthetic construct
MDILKTREQLRSCSIYDLPLRVTFYARVSTEKDAQLNSLDNQISFYSNMIKKNPNWEYVEGYIDEGLSAITTEKRENFHRMVTDGENGEFDMIITKEISRFARNTLDSIRFTRELLHFGVAVFFQNDNINTLDEDSELRLTIMSSIAQDELRKLSSRIKFGHQQAIKDHVVLGNSRIFGYSKDNKRLVIDEDEAKMVRELFELYATNEYSMKQIENIFWEKGYRNHNGNKIAHTTMSGMISNPKYKGYYVGNKVKVVDMFTKKQKFLPPEDWVMFKDETGEIVPAIVSEELWDKANDVLERRSKDVKNRQGKCNHGNLLTGKLFCTDCGATYYRRDAKDRQGNKNSKWICSGKIKNGAESCKSFPIYESDVVPILLEVFKETSCDVEELINQYIEMYKSLSQPEEVGRRLDELKKKMDLEQKKKSKLLGYNVSGQISDRDFISLTKQCSNEIALCEKEISALENEMQTRNDFKKRIEEMRRTLKRASEDANSGVINHSFVEKYIDKIYVTPIDETHMEMKIKLFTNETTTKYLENLRVRTGHTFKKMIESYENSMK

SEQ ID NO: 25722 - protein, 531 aa, synthetic construct
MSENYAASPRITVFPATLNRFTATPIAEKRKRRVAAYARVSTNSDEQKTSYEAQVSYYTDYISAKPDWRFVQVYADKGITGTSTKRRERFNDMIADALAGKIDLIITKSVSRFARNTVDSLTTIRLLKEHGVEVYFEEQNIYTLDSKGELLLTIMSSLAQEESRSISENVTWGQRKRFADGKVSMPYKQFLGYRKGENGEPEIVPEEAETVRRIYRLFLDGMTPYKIKLTLESEGILSPSGRSTWQPRTILSILTNEKYKGDALLQKTFCTDFLTKKMKVNEGEVPQYYVENSHPAIVSDEVYEEVQLELERRRKLGRQHNSQHCFSSRIYCGCCGSVYGSKVWHSNDKYRRTVWQCNARFVKGTGCQTPHLSEPMIEQKFLAAFNQLLVQKDFIAEDMQAILQQLTDTAALDAGKEALQVEMGIVSELIRQAVGQNASAALDQVEYNRKYNSLTDRFHKAADRVKGIEAECARRKGQRREIETFRDAILANDKPVVVFSTEIWNATIDRMTVNLDGSVKVAFRNGIEMTV

SEQ ID NO: 25723 - protein, 446 aa, synthetic construct
MPAAKEVSRVAKIIYQTMPGGRKKAGKKRVAAYARISCVKDAMLHSLSAQVSYFSDLIQRNPDWIFAGIYADEVTGTTKERKDFQRLLADCRNGQIDMIIVKSLSRFARNTVTLLETVRELKALGVDVFFEEQNIHSMNGDGELMLSILASFAQEESRSVSENCKWRIRNDFQRGKPSFFRIYGYKMKNGRLEIVPEEAEVVRMIFRDYLDGMGRELISKKLNEAHIPPMNSDQWWPSVITAMLKNECYVGDLRLQKTFVADHLQKKQLPNRGELPQYLVHDAHEPIIDRETFDAVQRLTAIRIAHYHPNRDSSGRYPFSGLLRCDQCGSYYRRKIASAGTPYSKPVWICTTYNMKGKKYCASKQIPERILLQTTANVLGLEEFDEEAFAAAVECIHVTGPNSLRYIFRNRQEQEVVWQDHSRRDSWTDDMRVQAAAHARRRYDHE

SEQ ID NO: 25724 - protein, 546 aa, synthetic construct
MPEALNAVIYARYSSDRQTEQSIEGQLRECYAFAKANDIAVIDTYIDRAISGKTDNRPAFQKMIEDSAKRQFQAVIVYRLDRFTRNRYDSAIYKARLKKNGVKVLSAMENLNGSPESIIMESLLEGMAEYYSVELSQKITRGMRENALKGKALGGQRVLGYKVNSDCYFEIDETTAPVVVDIFKLYSSGKTVKEICDILNARGVKTARGGAFNKNSLHTILTNKKYIGIYKTKYGEIVGGIPAIIDKELFEMVALRMEQNKKAPARAKAEINYLLSTKLFCGKCRSAMVGESGTSKTGKKYYYYACVKKKREKACDKSNVKKDWIEDLVIQRTVTDILKDDVIDKIADRLVELQKAEAAESGTMLYLENSLAEIQVSIKNIMTAIEKGIITESTKTRLTELEDEKRNVEIEIAKESIARRIISREQIIYWISSFKDGNITSEKYRQQLIDTFVHAVFVYDDKIVITYNYSGENNTATISDLDLSSPPKEEASNSSFTRMSLRLCIGWGTPDGVPFPFSLPRNAVFCVLRRFKPVGVLVYPSGFFVP

SEQ ID NO: 25725 - protein, 587 aa, synthetic construct
MKTTDQPQVKQYVIYSRKSKFTGKGESIENQIELCRQYIAMHFGEDEAEHALVYEDEGFSGGNLERPQFKQMMKDSQKIEFAAIVVYRLDRISRNIGDFAKLIEDLGDRHIDFISIREQFDTSSPMGRAMMYIASVFSQLERETIAERIRDNMHELSKTGRWLGGTTPTGYASESLSSVTVDGKVKKACKLKPIPEEIQLVKTIFSVFTESGSLSKTDQYLLEHRCVTKRGKQFTRFAIRGILTNPVYMIADDTAYQYLKENNVDLFAEPSEFDGEHGIMAYNRTLQRPGKATQIRPMEDWIVAVGKHPGIISGANWVRVQSMLDVNKSKSYRKPRSNVALLSGLLRCGECGDYMRPKLTGRTNANGELIYTYMCSTKERSHGTVCSMKNCNGNTLDAKIVEEIRKVATDKKDFGQLLSKTKKVINDNKASYEAELTLLVKNHAETEARIKRLVESLSVASETSAKYVMEQIDELHRQSEQEQTRIAELEKLARQSNALSQNLFFYRDMIESFADTVDSTTIEERRRLLRTIVKKVVWDGKNVYVYLFAEDGELNLPPIGQLMCPSGEDSECYTIAAEQSAVEAEKP

SEQ ID NO: 25726 - protein, 585 aa, synthetic construct
MVKKLSLSAVNLDAAVNSIKVAIYIRVSTHWQIDKDSLPLQRSDLINYCKIILGTENYVVFEDAGYSAKNFERPDFQKMMSRVRTGEFSHILVWKIDRISRNLLDFATMYQELKNLGVTFVSKNEQFDTSTAIGEAMLKIILVFAELERNMTSERVTATMLSRASDGKWNGGKVPYGYSYDRETRTFSIVENEGKVVRLMYDLYAEMRSLLMVSKELNRRGYRARSGKEWSPVTVGNILRNPFYVGTFRYNYRIESGPSFTFRPESEWIMCEDHHPQLVTHDQWNETLDTLRSQRRGQPGHGKSFNRGNVHIFSGLITCGYCGSIMRASQDRPRKDGWRPSIYNCSRKRVSNDCPNKYISDITVGPFVLNFIANMIRARKSFGASTSIETLQKKLLRGETFRDVAGIGQQGLRELYQHFKGTQDQEQNFMASPGSTATTEQEEREVLLTEKRRKERALNRLKALYLYGEEGEAISETDYIVERKRLLDSLATIDARLAEIDTALAERATLSDEEFIQKASYFIMAQQLSDKRYIDYERFMRKVDPKIVKDFVNLVCSNFCIKNGRVVSIRFKNGIELQFFYNDEE

SEQ ID NO: 25727 - protein, 581 aa, synthetic construct
MAYAMKVPAASADDRIVAIYVRVSTGYQVDKDSLPFQKKELKAYCKHILHVDMSRVEIFEDAGRSGKNTKRPAYERMMQKVRAGLVSYVLVYKIDRISRNLVDFSLMYDDFKYNRVTFVSLNEQFDTSSAIGEAVLKIILVFAELERKLTSERVKDIMIGRANEGKWNGARVPYGWDWDSSAGWPVHSEKEAPFGRAMYEMYLEVKSTGKIRDYNNAHNIPTKRGGEWTSKTVGDFLRNPMNKGDYRYNYRESARGRKKPVDEVVYLEGVFEPLVDPEIWEKVNKIMDINRDQRNMGGSHPVEKNCNVFAGLIQCGSCGSGYLVGKKDRRRKNGFTPSMYYCGAKTRAIHCQNLNVSDVKIGPFVINYISAMVRVSNERRKIKTPEDLEEMLLSDKTVFADIMGLSSDSLNNTFELLTGKSATGGALWRADLVDQEGVAADPAEIESLKDQIRKYERAKERLEDAYYFSDDGMSEKEYLEKKNRFDSGRVAAENKLKELTETHIASGVDESAFMKSASAFLLTHKIRAGSHIVYSDLAGMVEEESIKEFFNLVLDHITVKDRRVTEIVFANGLSHKFIYRD

SEQ ID NO: 25728 - protein, 580 aa, synthetic construct
MAKCILLVRVSTDSKKQELSLREQESELFELALSKGYVEEDIIAICKQESALKRRYAKTSEEKDAIEIKQQGLQEMEDMIKNDSSINCVFAWEISRISRREKVLFDELEFLTDRKIQLIIAKPFIELLNSDGSLNPSSKMQFSMFAALADAEMRNKLDRFKRTKESRRKEGRYVGGWLPFGYTVEPSTKKIIINEEEAAIVKYMFNEYLKGKTSIYKLADELQERGIIDYDNRHSAFTFAYTILKNYAYAGLQSTVRQKGRKASTNLYPAIVTKEMVDKAVEMSEQAKTKPKTNVKNIYYCKSLLKCADCERVYVARLNKAVYQCTNDNEKCNNAEISINLADTILWNFAMTLKISQMLHQTEEDKTAYQTQIEVLKQKIKKINIDIENNNKAYTLLNKRIIMQKISEEDGEIIEKELDTTKKELEKKLNDYTNKVAEIEQILFNMNTSIAFNHINIDDIADIEDDNLRYEIIHEMIDYCLIEKVADSIIKLELYAKHIDTAYTYYVTTRNRKIYNKDFRIEEAYTSDNTHLVDFKILQRYKRQAKANKEYQKQYYEKNREKLIKQNVEAKRRRKSKSEN

SEQ ID NO: 25729 - protein, 513 aa, synthetic construct
MPQVKLISPITRQEIRKIRVAAYCRVSSNSADQQNSYANQIRVYTSLIQRKKEWELVEIFADEGLSGMNAQNRTEFQRMIKMCEQHQIDLIVTKSVSRFARNAKESLEYVRKLKLLGVGVQFEKEGIYTLALGDEMLLNTFSAIAQEESKAISQNQRLSIVKRMQSGEYVDSNAPYGFRLVDKALVVYEPEAAIVRMMFENYLSGQSTSEIARDLNSRGIKTKTGKSTWRSTKVAYILGNERYCGDCKYQKTYRDTTVPFKQFRNRGQEDMFYASMTHAPLIDRDTFDKVQLLLKKRQDVFGKSTTQNIYPLTSRIQCSECGSYFRRRQVSGTVKWGCSKHIQDRTQCSSNYYSEERIYDAFIAMVNKLRFSEYDILGQTLLRLESAELKRKQKNTAAREISRSIADLNAKLVMVEQLHAKGYLKDEVHKAQVQEINDQLRQLKRERQCEFSSGITQMIEELTRLKKLLEELEEPLDRFDEKLFAEIVQAISISRRDEMTVTLIGGLRFTEML

SEQ ID NO: 25730 - protein, 547 aa, synthetic construct
MNVTKIPKKTISVIEPKRSLIVNREQYHQRRVAAYCRVSTDSEEQLTSYTNQKKVYTEMIAAKSEWEFAGLYADEGISGTRADKRPQFQKMINDCLSGKIDYIITKSVSRFARNTVDCLDHVRMLRARGIGIYFEEQNIDTLQIDSELYLVIYAGFAQSESESISKNVTWTFRKRFQEGKPIFNYKCLLGYRKGADGEPEIVPEEASIVERIFNMYLSGETINRISTKLREENLQIPGKRFSFSASMIKGILRNERYCGDSILQKTVTIDCIGKVRRKNTGEAPMYYVQNSHVGIISRELFHKTQEELARRMSREPNSTKTATTATGKYSRYALSNVMICAECGSRYKRVTWTSRGKKRVVWRCISRLDYGKRYCKTSLTVDETALHAAIVRAINRFNEEDESTYMALMRATIGEAIGLTGGTDEIDLLRRKIDGLNRKMVSLINESVESGEGIESHEAEFKELSDTIELLQGRIQKLEEALASDQVNDSRILQLQQIIADRASKKMEYDDTIVHQMIECVKVYPDGRLDIIFGGGYFIEERLEKES

SEQ ID NO: 25731 - protein, 578 aa, synthetic construct
MNTLSALNITPSPPRMCRVAIYIRVSTLQQVDKDSLPMQRKDLIAYSKLILNTDDYVIFEDAGYSGKNTIRPRYQDMMDQIRTGAFTHLLVWKIDRISRNLLDFAQMYQELKELNVTFVSKNEQFNTSTAMGEAMLKIILVFAELERNMTSERVTATMISRANTGKWNGGRVPYGYKYDPEEEDFLVIANESNTVKLIHDKYEELQSLVYLARYMNEHGYRTRSGNEWSPPSLAIILKSWWYCGCYEYNKRKAGNRQKLKDKSEWIMIEDHHIAIISYDQKERVLAILKGNKRYATDHNLYVKGIHVHVFGGLCWCRNCGKKMTSTSSNKNRSWQYSKYLCSTRRRSLTKCRGRSTSDPVLGEFIFNYILNMLNAQKGFDSIHSPADLQDALLTGDAFSDIKSIDQEELNDLYNILSSSVVGNIYGRSFNVNKAKKNDEVQSSLTILKAEKKKLDRALDRLTNLYLYDDMAISEKDYMTKKTEIETKIAEIDEKIGIVNKNSVDNSITDEEFVDKASTFIITQKLTNRNYISYKRLATSVDPKILYMFTHDVIDYIDIYNGKVQRIVFRNGLSQTFIR

SEQ ID NO: 25732 - protein, 700 aa, synthetic construct
MDSNAFLNDLMSKMKLPETKGKKKAEQSESVAQILAAMQKVKTEKKKPPVTSYAPTKEMPVNELESMEEFSQLASDVMQECRPAIPAVKTSISEKTVRVAAYIRVSSTNPAQEDSYEMQERYFMSLLAGNAGWTSAGIYSDHGISATSREGRTGFNRLLRHCKQGKIDRVICKSISRFARNTQDFLVALRTLKENNVTILFEREAMDTADAYSEFILTTLAAIAQEESRSISANIAWSNQKRFPAGNVCNKDIYGYEFRKGEYTVNENGYRYRAVFIIPEEAEIVRMVFRFFTKEELSFTQIAQKLDALHIPPPNSGCRQRQKRKPTVLPAGALKEEDKRGWTATDVRYMIANVRYCGSVLCQKTYTDHRNGHKQKVNKGEKPKYLIRNHHPAIISEELWQEAQEVWKAYTAKYRGIEKERNERNYSKLLLCGECGRYFQGHSTTRTTIWRCATKLAQQGQKRCRMEPIYEEQIQTLLCKAFAEKFKLGEKMDAEVHEVMQMISKAPIDNARNQALKNLTEKLREIHDFDHMEQEGDFLKRQLSAVNYSIRDVHQHIRDIQAEKEALKVRCEVLGEPRDKEAVTELENRLLNEEEQLEKLEHEAQQQAEQVRYMEDYWKKLEQTHEIREKTLQWLDSLAGGTQMFLDEAVGTYVKAFVLSVTIFSPKHFRIHWFDDTCTEVECDSVFEGYQQPGMIRRKY

SEQ ID NO: 25733 - protein, 534 aa, synthetic construct
MRKKSNLNAATRAVIYARYSSANQRDCSIEQQVAKCRELAARLGLTVIDVYEDRAISGKTDRRPNFQRMMKDADLRQFDVVLAWKSNRMGRNMLQAMTNEERLRDNGIRTVYAEEDFDDTAAGRFALRNMMNVNQFYSENMAEDITRGLMDNAAKCLSNGSLPLGYKPGDDRHVVLDEAEAAIVQEIFTRVSCYEPFIDIARDLNRRGIKTKKGSEWGRSSFHTICRNERYRGIYIYRDVRIEGGMPRIVSDELFYKVQEVLKVKKNPQGRRKRSGYEEYLLTGKLFCGHCGSPMTGIAGTSKTGAMHYYYTCQKRRTDHSCDKKAVRRDQIERAVGVAIQQQLLTDENIQMMADKLMEYNARTETKYRLQGLQDQLNANKTATANILKAIEMGIITDATKARLLELEKEQGQLLVKIDEAKAEMVPISRNDFVKLLYIYKEGEPTDKKYLAALFDNFLVRVDLYDDHLKITFDPTGGRQPIDIPIGAEESPESPGDSSESSDFEASSQDAEKFVLALHNCTKILERLFGDFLF

SEQ ID NO: 25734 - protein, 529 aa, synthetic construct
MSNARIIEIPATRQIRSGKNNTMRKMRVAAYCRVSTEEEEQQGSFETQKLYYTEKINSTSEWELAGIYADDGISGIHTKKRDGFNQMIQDCKKKKIDLILTKSISRFARNTLDSIQYVRMLKAIGIAVIFEKENINTSTMNSEMILTVLSAFAQAESESISQNVARGKRMGFRQGKFPFPYGQILGYRKGLDGKPEVIPEEAEVIRMIFNSYLQGASLLTIKKKLEAGGVLTARGNKKWSSESVQRILQNEKYCGDVLLQKTFIEDVLTGVSKKNTGQLPQYYIENNHEGIVTKQMFREVQAEIARRNSKSAANQRKRHQGRYNSKYALSERLVCGDCGSPYKRVTWNIHGRKQIVWRCVNRLEYGTKFCSHSPSIPEEELHQAILKAVQNLAANFTDEVAAQLDGILRQMKAGENLKAQLQKQLEKAQQEFDRLLEMSLELDESTPFLDDKLRKLSGKIKILKANIAESTDGKGEDEEATKQLTAQDLLIKEYDDILTARIIEKVIVHSRQEIEIYFIGGYTQKIDLI

SEQ ID NO: 25735 - protein, 509 aa, synthetic construct
MPQVQVIQPIQQQPKRLRVAAYARVSSDSEDQLNSLAVQVDYYTHLIQENPNWEFAGIYTDEGITGTSTKRREQFNRLMDDCRAGLIDRVLVKSASRFARNTADALSSVRELKSLGVTVAFEKEGFDTETSNGEMLLSIICAVAQEESLSISQNMKWGIHKRMRTGNYITNATPFGYTQINHQLVPEKNNAMIVNDIFKSYLSGMSINEIAEHLNTIYPKENSKWNPRTIHAILRNEKYIGDSLYQKTYTTDSLPLKRYLNTGQRSKYYAMETHEGIISKTDYEKVQNLLAKKSITGEIDRTCVFSKKIYCSICGAICSRKGPPTQGFVWCCRTHLQSKALCLLKSIREDELQQAFLSIYNRLQCNQKTILEPLVDDLLGLRHLQEQKYKKRLALGEDIQHLAKQKHNLTRIHTLGYIEEPQFIERSAAIEQQIRERKQQLSRNDMSNTSEKILQKTRLIQKKLSSTPPLELFDESVFKELVKKVLISNTAIQFELINGMKLSESRAAT

SEQ ID NO: 25736 - protein, 468 aa, synthetic construct
MDKKINNNMNDFTKKVEEVALYIRVSTEEQAINGDSLRTQREALTKFALANHYHIYGIYEDDGFSATNLNRPALQRLLEDVRKNKINRILLTKLDRLSRGVRNYYKVLDVLDAHCVFWQTIFEKYDSSTASGRLHINIMLSVAENESAQTSERIRSVFNNKIHQKEIISGKIPIGYKKEEKKLVVDEDKKALVIDAFNFYLKSGSVYKTFEYLALFDPSINYPRTARLLANPLYIGTKVCKYGSIENYCEPIISKETFDEVQNLLKKNQRKRDNSDHEFLFSGLLRCNECGYKMSGKYCKNFPTNCTFYYLCSNARLKKKCNMLKQLNETKIEKKLLEQIVPEINKYIDKNNILEQEKAQIRDISKERDKVNKQLEKLRDLYVNDLIQIDHYEKQYKELTSKLDSLKEEEKPVEEKKTVNYDEFKSFLSRDFVSLYNNLSRTEKRLIWASVIDTIYIDDNYNLRIVFI

SEQ ID NO: 25737 - protein, 602 aa, synthetic construct
MYITVTLDPNGIYDAYLRKSRADMELEKLKKFDTLKQHEKFLKDRANQLGIKIRKIYREVVSGESIQERPEMQEVLKNVETGTIDGILVVEVERLTRGDAKDQGTVTQAFKYSNTKIITLNKIYDPNSDEDEEYFEFGLFMSRREYKTINRRMQRARIANVLDGKYCASEPPFGYKKVRVKYGKGYTLEPVSEEAEIVKEMYQKRADGMGYDIICNWLNTLDFKPKKSDVWTPATIKGMLSNPIYIGKIRWNSNKQKKILINGQIIKKRKKGNNEDLILVEGLHPAIISNELFDIVQGIKPNKASTKHNTELQNPLATLVKCADCGRSMQRRPYYDNKKQEPKLRRKYDIDKEKLRLCLREHKGEYSLRDIATALKVRKHCVDHWFASNQSKFTMPYADKWEELKKLLNINTTEFDKAITTYESNLIEPHEDTLICPKAHCTNIGSNLALVEQETIKALQEYISSQKELLATYNPAEEDDNVMFVSLSKELDKYNKQLDKAYELVEQGIYTPQEFTKRTKTIKDKITNTEKELNKYQLKLNKDRIEKLLPKIEKVIDSYYKVTSVEKKNKLLKSVISYIEYKKEKGGRGYESNFSIIIHPKF

SEQ ID NO: 25738 - protein, 514 aa, synthetic construct
MAVTKIDARPQPKTPKKKVAAYARVSTDNLDQKESLDAQKKHYEMYIKAHSTWEFAGLYFDEGVSGTKSETRNGLQNMLRDCNAGKINYILTKSVSRFARNTVDCLQIARNLKDKGIFIYFEKEHIDTGNMDSELMLSIFSSFAAEESISISENEKWAIRKRFQDGTYKQSYLPYGYVKNENGEMIPDKQEAEIVRWIFNLAINGHSTHSICKLLRERNVPTRKGGKWSSSTVRDMLKNEKYTGDALFQKTYTDGSFRRHETKNSSKQIFIENHHEAIISREIFETANRLLEQRAAEKGIVKGHSKYQVRYPFSGIITCGECGGTFKRRIHDHGSEIAWACTTHIDDIQKCSMKYIRDDALKAAVTTMINKLIFGRKIILVPYIAGLKKCNANSEEIQKLKVELAKESEKIDVLRHLLADKIIKPAMFIQDQNASNKRSEELRRQITQLSQIDTGNSEMVAETEKLLHFLDSAEMQTEFKDFFATDFIEKIIVYDRHSIGIQLKCGLTLKEALL

SEQ ID NO: 25739 - protein, 518 aa, synthetic construct
MVRTIPPKPQIGNNAARHTETVKKLRVAAYVRVSTENEEQQTSFEAQYEHYYDYITNHPAWEFAGIYADDGISAVSTKYREQFNKMIQDCMDGKIDYVVTKSISRFARNTVDCLNFVRKLKDKNIPVFFEKEGIESTDQRGEIMLTILASLAQQESESLSQNVKIGMQYRFQQGKVMVNCACFLGYDKDADGKLVINPEQAEVVKRIFREYLEGASCIKIAKGLERDGMLTGRGKTRWYDSTVKKILENEKYMGDALLQKTYTTDFLQKKRVKNTGIMPQYYVDDDHPAIIPKELFLAVQEEMARRGSVEDCKGRKRSFSANHCFTRLIVCGECGDQFNRIHWNNRGKKSIVWRCATRLGKKGECNARTVNEETLKDAFVEALNQILAEKQEFLQQLKKNIECVLTGANPDDTAEIDAKLADLERQLVAKAEEHEDYTDIASEIYALRKQRDKLTMSENARNDYLKRIEELESFIDEQPTKINNFEESLVKRMLKKVTVFGDKLEFEFLSGVIVEVNM

SEQ ID NO: 25740 - protein, 516 aa, synthetic construct
MARKKKVSPGNRLVAYYRYSGGSQQTEQSIEGQRRDCEAYARQHGLTIVHEYIDRHISGRGVESRLAFQQMIADSSKHLFDLVICWKTDRFARNRYDSAVYKKKLRDNGVRILYAAESSVEGPEGIILEGLMESLAEYYSAELAQKMRRGMRESALKGRAINPSRPLGLTTDEHKRFIIDEKNAPTIRFIFEHYAAGESSASIVEQLNAAGLRTSKGNAFNKCSIPRIIQNEAYHGVYICKAYDVRIDGAIPAIIDDDLWKRAQKMLTLNKQHRAPHSSHADYLLSGKLFCGCCHSLMRGISGHNCRNDVYYYYACGNKADGGTCKKKNIPKDVAENLVVNAICENILRPDTLEDLADAIAAAQQADVNQPDPERAMLEQGLADVRRKINNIIESIENGTASSRLSARLADLEQQESTLNYQLESLKEIHPPVLDRERILFLLEQFLISPNERTEDYNRRIIDTFVNRIEITDTEMLIYFNLSEASASEKQKNSQPNSCSTGNHLVRVARIELTAS

SEQ ID NO: 25741 - protein, 524 aa, synthetic construct
MNTTNAVIYARYSSDKQTEQSIEGQLRYCTEYAKRCGYTIVDSYIDRAASGTTDRRPQFQQMIEDSKKGQFNFILVWKLDRFARNRYDSAIYKTKLKKNGVRVVSATETLGNGDESIILEAMLEAMAEVYSRQISQNASRGMRESALKGQTTGGNIPLGYKIDNKFLVEDTKTSAVVKFIFNQFAAGKSQTEICKMCNEKGYRTKNGKLFYTNCLPSILRNKMYIGDYTYKGEIERSCPALIDIDTFKRCQARLEQSRRTRGQKKSEDIDFLLTGKLFCGRCGTTMVGDSGTSRNGSKHYYYTCRNKRKRKGCKKKSEKKDFIEWYIVEQTVNYVLTNERRRYIAEKIVAQYNSDFSAEQVAELERRLVNIDIEINNCAEALINARSAAVIDKINNKADCLQLQKEDTEIELAKLKIACDISLTVEEVELWLQSFCDGDLMDLDFRKKIIDVFINSIYLYDDKVVIYYNVKDSRQISYMEMLADLDQLDDSLKCSDSSVQGEPMKQSSFYYSVFCFSKLSSLLL

SEQ ID NO: 25742 - protein, 500 aa, synthetic construct
MRMCGYARVSTDEERQLDSLEHQMEFFSDFAKQNGHHLVNVYTDEGITGRQLKKRDAFNKMLSDSKLGLFDLLVVKDVSRFARNTVDLLTSIRQLKSRGIDVIFVNNSQKVLGESEFIITLLGAVAQEESSNLSKRVKFGKNITSKKGRVPPRIFGYDRIDNFTMEINEREAEVVREIYHLYIDEGLGCRLIAITLAEKQMKTKFGNDWNQRNIRRILENPIYSGHYINHRYTVVDFLEGTTKALPKEQYYHHDRPEWAIITPERFQQAQEILEQRRKQYATEYTHFTGRYSNRHLFSTLIRCKECGRAFSRRVTHYPNSDYIYWRCPTNNQYTAKRCSNNTIVREDDLIETLSTYLREVVSNKESIAQEIARKFKEANAVEGSKPDAQTLEAKKVKLKAKLEKYMEMYANDVITMEALKSKTAEINESINVIDDQLILLEGQRTQERTIESITNEAMTEIERFLSLHSATNMDLRRIIDSIIVDDKKQVKINLKITGNL

SEQ ID NO: 25743 - protein, 525 aa, synthetic construct
MYLEISNPMDYCVGLYIRLSKEDENEGPSESVNNQKSLLRTFVEQQRLFVYDTYIDDGWSGTNFERPGFKRLISDIEAKKVNMVITKDLSRLGRDYILTGHYMERYFPEHHVRYISLLDGIDTGVDSTANDITPFRAIMNDMYAKDISKKIKSVKHDKQRKGLFIGGKPMYGYKMHPTEKNKIVVDEEAAIIVRRIFSMALEGISGRQIAAALNAEKIPPPAVYAGLNQGRTGPYAGLWSSERIAEMLQNQTYIGNMVQGRTKKVSYKSKMCVRLERKDWVIVENTHEPLVSKDTFEKVQLLIQSRRYTRSRTYDFLLKGLIFCHECGYPLAVVNRKKPSGGDCLYFLCRTYQRFTKSGVCTAHAIKEEKVTRAVLERVKEVCQRYVSLSDMTILAEQEIQSMGGSQQREQEMARLKAKTQSLSSQLDKIYFDKLSGLLAEGDFERIYQRVKEERTSAEQKLASLMREAQTPVDRKALAKTLAERFLSSADQNRELLVSLVERVEFSEDKQLYIHFRFPSLEAIL

SEQ ID NO: 25744 - protein, 570 aa, synthetic construct
MEVFNLEKNLKCALYIRVSTFHQIDKDSLPLQREDLINYAKYILGIDDYVIFEDAGYSGKDTDRPSYQNMMTRIRMGEFSHLLVWKIDRISRNLRDFSDMYDELKKYNVTFISKNEQFDTSTAMGEAMLKIILVFAELERKLTAERVFAVMMSRAEKGLWNGATVPLGFIWDEEIKFPKIYEPEAKIVQYIFDLYEKKRSTTKVAEQLNQENVKTKRDGTWTPRTVGAILTNPFYIGTYRYNTKTQKTRRWKDKSEWIVIEDHHPAIISKEQFERVAKILKDNYRGDYNRQRASKNVHILSSIIKCFKCGSNMNAGNDRARKNGFTPSRYTCYQIHKTYTCNNYASDLTVLPFIINYIGNYMTLQDRITKNHSYRDMESILLRGKYFTDIEHINKDDIKCTYKLLVNNLPVINYKLQENQEDKKTTFKDRYDIYKNEKEKQENALKRLDDLFLYAEDSMPKKDFILKRQEITNKIEEINSKIQELRAEENNFVDNKEFSLNAKASFYLITQLIGNSKNIDVRYLLENVDKSIIKDFLSTILNEVSVDHQKVQYITFKNGLTHHFEYKENQ

SEQ ID NO: 25745 - protein, 534 aa, synthetic construct
MRVSVNLNAQKPDTTTNAVIYARYSSHGQTEQSIEGQLAKGHEYAAAQGYTVVHEYIDRAMTGRNDNREAFQKMLSDTGKHQFQVVIVWKVDRFGRNREEIAFNKHTCKKNGVRVEYVAESLPNSPEAVILESVLEGMAEYYSIQLSQNIRRGQLESAKKCQCVGGSVPLGYTLDSDKHFVIDPQTAPVVKKIFDLYAEGATISEITGQLNEQGIRTIRKQLFTKNSLTKLLKNEKYIGVYTYKDIVRVEGGVPAIVDKSTFDRVQELLKINRRAPSHTWTKVEYLLTDKLFCGHCGSPMVGESGFSHTGAKYSYYGCIKRRREKACDKKPVRQDWIEALVLDETVKLLHDDELMEYIIDRTWEYYQVTDKVQEEKAVLEAQLAEVDKAINNLVRAIEAGIFNAATKSRMDELDAQKAALTTSLADLELTSGIRITRDHIEYFLLRLRDLDVKDRECQKRLVQTFVNAVFVYDDGRVKITYNYSGQSSTITLNQIASAEKGKGFVCCLPCSTSSPRFPRGVAALFLFWGKNGCK

SEQ ID NO: 25746 - protein, 488 aa, synthetic construct
MEKTRAVAYIRVSTERDAQLHSYEFQEHYWQSAFEDDPNTDLIGIYADKGISGHSVQKRPKFLVMMQEAREHKFDKIYTKSVSRFARNTTQLLEAVRELRDLGIEVVFENENIHTFQPTSEIFLTIAATIAENDLEVDSARQRWSIQHRCENGWISVGSGLFGLKLTADNELEIVPEEAAVIRYIYESYVDGGIGSKKIADALNAAGVQSRNGYPWDAKHIIGLLRNEKYKGDVIMGKSVRHFGEYHKNPNAEYAPRYYMEGTHEAIVDRDMWEAAQRILEERSRNHCRTRIAHSFTGMIECGCCGKNYLHKVNNSQCKWQTDIWACRTYLRDGKKACGNSRIKDTVLKEKFISAYNEFIERRPQGDSMVALQEVLEDLRQQEQELAELMMQRLIPKAAYEEERKSVKMQITDISDKISERRAKRVPESEYVPITEFSEEKAKRFLSKVVVTMFTVTFVFYNGAKITRTYDNGQPGNKVGWNKKKEES

SEQ ID NO: 25747 - protein, 540 aa, synthetic construct
MATATRRVVRTMPQMFIDVTDNQSERLQVAAYARVSTEKEEQEDSFERQVEHYKQLIYSKPEWQFVDVYADPGISGTRAEKRPDFLRMIEDCRTGKIQKVLVKSISRFARNTVDALQYIRELKDLGISVYFESENIDTLTPGGEVLLTILAAMAEQESRTISSNIKWAWQRKFQKGDVILNTGLMLGYRKVGKDDEGHDVYEINEEEAEIVRRIYREFIAGYSITQIAKRLQADGVKTKLGKENWRHNVIESILTNEKYTGNALLGKTFKPDVLTKYRQKNDGKKAPIYYVEGSHPAIIEKGLFDLAQQEMQRRRDANDNKVGGGRYSSRYPFSGMLVCGICGSKLRRQVRTMGSGKRTASWGCCNRINNGRAECDSHHVNEDVLEATYLTAMRRLVDSAEEVVEVVRDGTELALEPENKAAMDRIDEETIQLQEAALALHKAKQRMEIGAVEYASRVKEYSERMKELEAERNELQGTAAKYAEVRMWLDTFIEQTMQSDTLTTVDGTTMKMLVDRIHVRNDGIVVEFKCGVAIEQEYVK

SEQ ID NO: 25748 - protein, 621 aa, synthetic construct
MQEIRLLSNHNQYWGDGGVCICMKMYMQAPFVCSFIFSFFSMLGMKDKPSTGLRRRIFMAEVEVIKAVEGPILRKRDYEGKPLVITRQRVAAYVRVSTDGDEQLESFQSQKQYYQDKISENRDWVMVGIYADEAITGTKVDKREQFQRMIQDCMDGKIDVIMTKSVSRFSRNTVDILQYVRLLKERGIAVIFEKENINTLTEQGEMMLTLMGTLAQNEVESTSKNVKLGIKMKMKRGELMGFNGCLGYDYHPEDKTITVNEAEAETVRLIFELYLQGYGTYTIAKRLEALGKLNKKGVAKWTDSGVRGIIKNEKYKGDLLLQKTITTDPISKRRIENFGEEEQYYVRDHHEPIVSREVWEQAKEIRLSRNHQSDKKADGKREKYTKKYAFSSMCECGFCGTKLTRRTLHSSSKYETPAWYCRNAANRGKHNCPNSKSVHESILENAFLEAYKLLAGSFDDVIDSVIGTIESIGANNDDIARLKKEQKTLDNLEQRRKKLTDIYLDDGLTKEAYDEKYEELTVKIQKSKDSIELLQNNVSNQKDVGKRMASLKKALADGDILDEFDRVVFESIVEKVIVGETNEDGTVDPYKLTFVMKGNGNSVVPNAKEWFKAEKSAIQPA

SEQ ID NO: 25749 - protein, 548 aa, synthetic construct
MPKKTAKHPAKPKRGKKLEIEEPGVLYGRYSSHNQKDISVEQQFEKGYELAAEYGIRIIDTYADRAVSGRTDKRKDFQRMMSEAAKGKFRYVIAWKSNRMGRNMLEALINEARLQELGVRVLYVEEDFDDTAAGRFAARSMMNVNQFYSENMAEDIKRGLYDNASNCMVANGHLPYGYKRDETLHYVIDEPKAAVIREIFTRVAAGEPFVDIMNSLNARGIKTSYNRPWGRSSFQKILSNERYRGIYIYGDVRKEDGIPRIISDELFFKVQEVITTKKNPQGRHRVNGDYLLTGKLFCGKCKSPMVGISGTGRSGKLHYYYVCQKHRTEKTCDKKNVRRDEIELQVAQAIKDYALKDDVIEWIADSTVAYNERKEAESKVGILEDQLAGTERGIKNIMSAIEQGIITETTKSRLVELESERATIKAKIAAARADIVTVSRDDIISGLEMFRDGDVYDKKYQARLFDTFLVAVYVYDDDLRLVFSFSGNKNTIQIPIESAVNAVENNAAECSFKLCSAPPKNLRTKVRRFFTYYLLLFHCYLVRAAVFW

SEQ ID NO: 25750 - protein, 525 aa, synthetic construct
MSEARAYMPKVTVVPATLNRFTAAPIHSTRKRRVAAYARVSTNDEEQANSYEAQVSHYTRHIQENPEWEFVSVYADKGITGTSTKKREQFNDMVQDALAGKIDLIITKSVSRFARNTVDTLTTIRLLKEHGVEVYFEEQNIYSLDSKGELLLTIMSSLAQEESRNISENVTWGMRKRFADGKVALPYKQFLGYKKGADGIPEIVPEEAATIKLIYRLFMEGKSPAYIARFLSSCNIPSPAGRPQWRPETVKSILSNEKYKGDAILQKTFCTDFLTKKMKVNEGEVPQYYVENSHPAIISPEMFEAVQAEFAKRKRSNHRNYTPHCFSGRIFCDECGALYGSKVWHSKTVWQCNARHKEKTACQTPALRNETLQDAFVMAINRTLRKKDEIIRICEATMEKRCDIQPLKEEQKKLQAELEVTRGLMERLIMLNATTVVDQDEYNRQFAEYEARYNEIRQRIADVESEQKQRVGKRGKLAEYLETLKNQGLLSSFNETLWYGTVEQVRVLKDGKLRFIFKDGSMVNC

SEQ ID NO: 25751 - protein, 432 aa, synthetic construct
MNRIIHKITPAKPKAPKLVNVAAYARVSMEKETMLHSFSAQVSYYSEKIQKHPGWSYAGVYADRALTGTKSERPEFQRLLADCRAGKIDLVLTKSISRFARNTVTLLETVRELKALGIDVFFEEQNIHSMSGDGELMLTILASYAQEESRSVSENCTWRIRKKFEQGIPTTSQMNGLKFDHGKVEVIPQEAAIIKMIFHFRLAGMGKNAISRELNELGIPAKNGGIWHESVIDTILRNEKYQGDLVLQKYFRTDHLRKIDCKNKGELPKYVVRDNHEAIIPREEFAAVQRIIQKKAAEFPEGYGVHNEFPFTRKLVCAHCGRNYQRRLNNGKLAWQCYTYMVRGKKYCPAKQIHESILENVSAQVLGLLKFDNAVFQKEIRCIHVYPENRLVYEFYDGYTKEAYWKDPSRRDSWTPEMKARAAEQMRRRHAK

SEQ ID NO: 25752 - protein, 537 aa, synthetic construct
MIRQTTQLAPVTALYARLSKDDELQGESNSISNQKRILETYARDNGFLNYRFFVDDGWSGANFQRPGFMEMMDCVENGEVKCVITKDLSRIGRNYLQVGMFTEITFPKKGVRFIAINDGVDSAQGDNDLTPLKNLFNEWMVRDTSRKIKAVFRSKGMSGKPITSQPVYGYLKGEDGRFIIDEEAAPVVKQIFSLCLAGNGPTKIARMLTEQEIPTPGTLEYRRTGSTRRYYPDYPYRWATNTVVHILERKEYLGHTVNFKTEKISYKVKSSVENPEEKQAVFENTHEPIIDLATWERVQELRKQRKRPNRYDEVGLFSGLLFCADCGSVLYQQRYENKTRRQDCYICGNYKKRVKDCTAHFIRTDLLTAGVTANLRKVTDYAARHEKQFMKLLIEQNEDGGKRRNAAKKKELDAAEKRIAELSAIFKRLYEDSVTGRISDERFAELSADYEAEQRQLKERAAELQGELAKAQEATVNAEKFMNIVRKYTSFEELTPTLLREFIEKIVVHECSYDENKNRRQEIEIYYSFVGKVDLPE

SEQ ID NO: 25753 - protein, 531 aa, synthetic construct
MSALEEYLIYLRKSRKDRELELQTGDYDTLERHRRTLLDLAKRRGYLIAHIYEEVVSGDTIADRPEMQKLLAAVETGRYAGVLVMEIPRLARGNTRDQGTVSEVFQYSGTKIITPEKIYDPCDESDEEYFEFGLFMSRREYKMIRRRLQRGRMASLSEGKYIAGAAPYGYRKVKLPHQRGYTLEPDGGTADIVRDIFRLYAEGEPNADGTLVPVGGYRIAQELNARGIPSPGGGQWSSGSVRDIIKNPTYAGMLRWGWRPETKKLVDGVIVKQNRVKTDYQPVPGMHEPLVSRDLWNSAQALMQSRAHVPLREDRQITSSLSGLLVCSVCGKRMVRNPGSGRRKPFLYCSTPGCSCVSSRFDTVEEAVLSSLRDWLSAYEVEVSSRTAQQDAKSIQAAERTIEQARKNLKALTEQKSRLYDLLEQGLYSQELFLERSHTLAQRISDAELTISTTQKQLAALRSAQDARLALIPNIQHVLDTFPQLDSPAEKNALLRTVLDHAVYQKSVGGRYAESDLKLYLYPKVTSAKDF

SEQ ID NO: 25754 - protein, 520 aa, synthetic construct
MPRKKSTAADAPRLVAYYRYSGGSRQTEQSIEGQRRDCEAYARAHGMTILREYVDRHISGKTDDRPAFQQLVADSAAHTFDAVICWKTDRLARNRYDSAVYKKKLRDNGVEILYAAESNISGAEGIIIEGLMEALAEYYSAELAEKARRGMRESALKGKALGSSRPLGLTVDADKHYIIEPTGAEAVRYIFEQYAAGLSSSSIVERLNAMGLRTSHGGPFNKSSINRIIQNEMYRGVYVSKKFDVRIEGAIPAIIDNDLWERAQKMFERNRQSRTPHASRADYILSGKLYCGECGCLMKGVCGRSSGNGQMYHYYACPGRSIGRACTRKNIPQDELEAMVVNAVADLLLEPALLEQIADAIVELQQAEAARPDPEKQALEKSLSDVRNKIQNILSAIENGTSSAALSARLADLEQQESTLSYQLSSLDAKKPLTFTRDQILFLLQQFRVSPSERTKAYCRRLVDTFVDHIELTNTELILYFNLSDETIDKNKKAPRSNPSEESSTEKRLVRVARIELTAS

SEQ ID NO: 25755 - protein, 541 aa, synthetic construct
MTQFMTAAPPEAVRVMPDGRKVTAIPARAQACAAVPLQPVRKPRVAAYARVSTDQEEQETSFEAQCDYYGSLIRNNPEWEYAGLYTDDGISATSTARREGFNRLIADALAGKIDRIITKSVSRFARNTVDSLTTIRKLKEKGIGVTFEKENIDTLDSKGELMITIMSSLAQEESRSISENVTWGWRRRIADGKVSMAYGRFLGYDRGEDGTPVVNEKEAETVRQIYGLFLDGQTPSGIAELLTKQRIPTPGGKERWAGSTVKSILTNEKYKGDALLQKTFTVDFLTKTAKVNEGEAPQFFVENSHPGIISREVFDLVQLEMKRRKGRSRHTSARSLFSDRLVCSCCGGTFGSKVWHSNDPYRKVIWRCNRKYARKGTACPNRHLEEKEIRKAFVEAVNRLISRREEILSVADEFSAALAETSGLEQQLDRLTAEKDVLLRKLTVMVHENAVKEQDQEEYQRQYQEVEGELSRLDAEMEKMKTKKADRLLRRNKLQAFMGRMRASEQLEAFDEGMFLGLTETVRVYPDKLVFVFRDGTEIPV

SEQ ID NO: 25756 - protein, 435 aa, synthetic construct
MEKVIHPLAAPAPRPRLLRVAAYARVSSGKDAMLHSLSRQISYYSQMIQKHPGWTYAGCYADADYTGTRGERPEFQRLLADCRVGKIDRILTKSVSRFARNTVTLLETARELKELGIAVFFEKERLDTLSGDGELMLSFLASFAQEESRSVSENCKWRVRKDFSEGRPMNLMLLYGYRSEKGRIVIDPEEAAVVRRVFHDYTHGLGSNLIAEALQREQIPSRLGGRWSSGLIRTMLANEKYMGDALLQKTFCADHLTKKKVVNRGQLPQYYVQDSHPAIIDRETYALARQTLQANREKTNVQKPTTARYPFSGRIVCGCCGQHYRRRTNVSRITWQCRTYLQRGKAFCPAKQIPEETLYRITEEALGVKVITEEALTVLKEIRIPKDNHLVFVFQDGREEKRVWKDRSRSESWTEEMREQARLHNLKRKKEGNQG

SEQ ID NO: 25757 - protein, 507 aa, synthetic construct
MPEALNAVIYARYSSDRQTEQSIEGQLRECYAFAKANDIAVIDTYIDRAISGKTDNRPAFQKMIEDSAKRQFQAVIVYRLDRFTRNRYDSAIYKARLKKNGVKVLSAMENLNGSPESIIMESLLEGMAEYYSVELSQKITRGMRENALKGKALGGQRVLGYKVNSDCYFEIDETTAPVVVDIFKLYSSGKTVKEICDILNARGVKTARGGAFNKNSLHTILTNKKYIGIYKTKYGEIVGGIPAIIDKELFEMVALRMEQNKKAPARAKAEINYLLSTKLFCGKCRSAMVGESGTSKTGKKYYYYACVKKKREKACDKSNVKKDWIEDLVIQRTVTDILKDDVIEKIADRLVELQKAEAAESGTMLYLENSLAEIQVSIKNIMTAIEKGIITESTKTRLTELEDEKRNVEIEIAKESIARRIISREQIIYWISSFKDGDITSEKYRQQLIDTFVHAVFVYDDKIVITYNYSGENNTATISDLDLSSPPNRYWTNTYFFSGGFAVKCSL

SEQ ID NO: 25758 - protein, 441 aa, synthetic construct
MEALLYTRVSKEDQVKFGMSLDAQLESLKKYCSENNLKIRNIYSDEGISGGSITKRKAFQNMIEESKPGDIILFTKLDRFSRNLLDANIVVKELTKKDVSIKAINEDDIDTSTADGKFIFNLKLSLAQREREKVSERINDVFEYKIKQGEVCTGNVPVGYMIKDKHLVLDPVKSVWIREMFDYFLKHQSVVGTCKWWNLKHPEYTMEYKAIKMSRLKNTFYCGKHPSGLNDNYCEPIISEEEFDKIQEILKRNVKSNRTNNVYIFTGLLTCSHCGRRMGGFYRNWKGNKTNYYRCYQYCSFRKCDMSHTVSERKIEEFVLQNMIEKCNEIVSASLKPENTDEVKLQNKKANTESKISRLKDLYVDGVLTKEEFDTKYKQLQDEIKAIKQEMKPKSNKLLELHDVDVKELYSKLNPENKRAFWRKYIDRIYFDGHDFKVVYQ

SEQ ID NO: 25759 - protein, 541 aa, synthetic construct
MPEALNAVIYARYSSDRQTEQSIEGQLRECYAFAKANDIAVIDTYIDRAISGKTDNRPAFQKMIEDSAKRQFQAVIVYRLDRFTRNRYDSAIYKARLKKNGVKVLSAMENLNGSPESIIMESLLEGMAEYYSVELSQKITRGMRENALKGKALGGQRVLGYKVNSDCYFEIDETTAPVVVDIFKLYSSGKTVKEICDILNARGVKTARGGAFNKNSLHTILTNKKYIGIYKTKYGEIVGGIPAIIDKELFEMVALRMEQNKKAPARAKAEINYLLSTKLFCGKCRSAMVGESGTSKTGKKYYYYACVKKKREKACDKSNVKKDWIEDLVIQRTVTDILKDDVIEKIADRLVELQKAEAAQSGTMLYLENSLAEIQVSIKNIMTAIEKGIITESTKTRLTELEDEKRNVEIEIAKESIARRIISREQIIYWISSFKDGDITSEKYRQQLIDTFVHAVFVYDDKIVITYNYSGENNTATISDLDLSSPPKQKPPDGWLLFWWSCTFAAQKWSPAGGRLNARGGKPAKVPPSHSPFLAMYRSCG

SEQ ID NO: 25760 - protein, 509 aa, synthetic construct
MPEALNAVIYARYSSDRQTEQSIEGQLRECYAFAKANDIAVIDTYIDRAISGKTDNRPAFQKMIEDSAKRQFQAVIVYRLDRFTRNRYDSAIYKARLKKNGVKVLSAMENLNGSPESIIMESLLEGMAEYYSVELSQKITRGMRENALKGKALGGQRVLGYKVNSDCYFEIDETTAPVVVDIFKLYSSGKTVKEICDILNARGVKTARGGAFNKNSLHTILTNKKYIGIYKTKYGEIVGGIPAIIDKELFEMVALRMEQNKKAPARAKAEINYLLSTKLFCGKCRSAMVGESGTSKTGKKYYYYACVKKKREKACDKSNVKKDWIEDLVIQRTVTDILKDDVIEKIADRLVELQKAEAAQSGTMLYLENSLAEIQVSIKNIMTAIEKGIITESTKTRLTELEDEKRNVEIEIAKESIARRIISREQIIYWISSFKDGDITSEKYRQQLIDTFVHAVFVYDDKIVITYNYSGENNTATISDLDLSSPPLQSNPNIFVTLDVFGLVVQIER

SEQ ID NO: 25761 - protein, 611 aa, synthetic construct
MQNIVARHNPYIFLDRNRERKVVYYGRVSTEHEAQLAALENQLQWYDDQTERHSNWNVLQKYIDEGITGTQAKKRPAFLRMLEDARAGKFDLIVTREVCRFARNTVDTLVTTRELKNLGIEVYFVEDNIWTMDGDGELRLTIMATLAQEESRKVSERVRAGQKISRENGVLYGNGNIIGYDRVGNTYVINEEQAETVRIIFDLYLKGAGQTKIAKELCRLGRKDGHGQVSWSASKIGRILHNATYKGYIGYLKSFSNNYLEQKRIKNLDEETYMYVKGDFEPIISEEVWDKCSEIRKARTTKMIVNQGERTYGKKSTQDVWLKKLRCSCGSTFRKNKWRTNKRGDEVFGYQCYNQVNNGSKAFREKNGLDTEGYCDIRMVGDWKLEIMAKKVFEGIWKEQDRKDAIIEVYRLLNEYYQSDTKNSQAIVSALEGKIERLRNKIDNLISMRADGEITKEEFKSLKDTMETELNKYIEEKSKMKEKVDGEGGVEFDIEKIKAVLEETLDFSTHKLDDSIIDKFVSQIIPVDNCRYRWDLNFLPNETQSLVCRIEGRKNHADAIIEEENESEDASPHTYVLSVDYSNINVIAKNAYQSYVQHRLLSQTSNPHRMY

SEQ ID NO: 25762 - protein, 617 aa, synthetic construct
MKWFEKELKESYNTNWKDTVGLEEPLQVKVIKKVDGRIDRKTGNVYNERLRVCAYCRVSTDSEEQKNSYDSQLKYYKEKITTNSNWSFAGIYADEAISGTLDYKRDDFMRMITDALEGKFDLIMTKSISRFARNTVDTLKYVRKLKEKNIAIIFEEENINTLEMAGELLLTILSSIAQQESENISTHVKLGLKMKMERGELVGFNNCLGYRYDYKTNTMSINEEEAEIVKYVFRRYCEGAGSTVIARELAELGHKSPKGEDAWAESTVRGIIKNEKYIGNVLMGKTYTIDPISHKRVTNMGEEDKYYIEEHHEPIIPLEVYEKAQYILNSRRVSRETGRKGSNYSRMYPFSSMLYCGFCGEHYVRKNLYPHTNYSHRAWQCMKYVKKGKKFCPDSKILKEEIIENCFVEAYRILTNDNKEIIKNFIDKIDDILEQNNAKSIIEKLELEKQNLEDKQNKLLNLVLDGTIDKEMYASRKDELNKKIKKIDKQQEELSREVEDDAIMNSGRNKIKAFFEKEDLRLEEFDEEIFETLVHKAIIGEVKDNGEKNPYVINFVFKSGFEYDKIKTKTDSLISSEEVLILQFDSFQNFVSFEKQPDGSLQKKLKTKIKVKVTLNN

SEQ ID NO: 25763 - protein, 543 aa, synthetic construct
MTGQPKYNTALYLRLSKDNGTMNESSSIQTQKEMLTRYCRENGFAISQIYIDDGWSGTNTNRPSFQRMLSDIEDGKINCVITKDLSRLGRNYLETGSFTEIYFPEHNVRYIAVTDGVDTAKGSTMDITPFKNLLNDMYAQDISKKIKSSLLTRQKQGKFIGTKAPYGYIKDPADKNHLLIDERFAPIIRYIFKLAKDGIGITQIARQLRSEKVPRPVAAAAEELECYDRYLTTEESIYKWSMGSVREILRNPVYKGAVRGQKRPKISLKSEKRKPVQSAGTFVVEGMHEPIIDPEEWELVQRLITSRKKTRKVEKKYDNIFSGLVKCADCGFAMTFTKAHRNWNSENIYANYDYQCNNYRMEGKSVCTHHRITALNLYNAVLADIKRLAREALGDDKQMISAIAARLGKSEKENVRQAERELKRANKRLSELDRLFAKLYEEHVNGKVNERNYNSLSATYEAEQNELESRIAELNAAIKTERENDENAVNFVDLIKQYVDIDELTQALLNTLIDRIEVHEPEDLDGELIQKLDVYYKFVGRLD

SEQ ID NO: 25764 - protein, 524 aa, synthetic construct
MATITKIPATVSRFTAAPIAVKQKRKVAAYARVSTDHEDQLNSYEAQCDYYERFIREHDEWEYAGLYSDEGISGTSTKRRNGFNQMVEDALAGKIGLILTKSVSRFARNTVDSLTTIRKLKEHGTEVYFEKENIWTFDSKGELLISIMSSLAQEESRSISLNVTWGQRKRFADGKATAPFSVFMGYDRGENGEFVLNLEQAKVVKLIYAEFIKGFSFVAIARKLTEMGIKSPKGLKFWNPSTIKSILTNEKYKGCALLQKRYTADYLTKKVVVNNGAVPQYYVEDHHPAIIEAETFDRVQDLIAQRSREKHFSGSTIFSTKIRCGECGGWFGSKVWHSKDQYRRVIWRCNAKYADRKSKCGTPHVTEDEVKAAFIRAVNKMSGDRKALMADLREVQQAFSGSEELESRLRELDERLNAEADEVQEMIATNARVAQNQDEYSTAYDAAVGRYESTKAERDSVAAEIRQKGIRRREFERFITELEKLPDAVTEFDESLWGSMVEYVTVRKDKTMGFTLIGGTEIEA

SEQ ID NO: 25765 - protein, 464 aa, synthetic construct
MARSVTVIPARNQKVRTGHKAVQEKKIRVAAYCRVSTDQEDQLHSFEAQVEYYTKYINEHENYEMAGIYADEGISGTNTKKREQFKKMIADCEGGKIDLVITKSISRFARNTQDCLAYSRKLKNLGIGIIFEKENINTLDSTGELLFTILSSLAQDESRNISENCKWGIRTKFKNGEMHLNTFKFLGYDKDENGKLVINKEQAKTVRRIYRDFLIGINPAQIAKELTEEKVPGCLGQTKWYPSTVTGILKQEKHMGDALLQKTYTADFLTKRQVRNNGEIAQVYVKDSHKGIIDKQTWNAVQEEFDRREKFMELHGTDRYSYGADCMPFCEKVFCGECKSLFTRHSWRLRGIVQWQCKNHRKDGKVACTNAYVDNADLEKGFVKAFNRLVTDRDKNMERWQQMKSDGTPLEKIRAGQMMEAVGNEPLTRFVPEIAQLVLCEVTVLGAKKYEFFFLEGSRVKVSV

SEQ ID NO: 25766 - protein, 502 aa, synthetic construct
MEIQIREGNSRQKQKLKVCAYCRVSTDADEQENSLENQIRHYKEVITSNPDYEYAGVYSDFAISGFKEKRPGLQKMLADARKGKIDLILTKSVSRFARNTSIVLEATRKLKELNVGVFFELQNINTLSGEGELMLTILAAFAQAESESGSVGAKMVYQRKYEAGIPVQYLERSFGFKKDERGVYIADEEEAAWVRKIYEMAADGYTPAAIKRYLNENGVKTVGGAEWIDSTVFRLIENEIYKGDYIMHKHFVNEERKLVRNRGEVDAWYIEDDHEAIVSPELWQKAQDALEAKRDYLAEGSVIEEFTEENYPYMNKIFCARCGHPLYKRIYSNGNRLNWGCSGTKRYGKSFCEGINIPDGVLRGAWHFDEKIYIGEKPTEKGKKEFTYLKEASWKRRHKKKEPEPIPENTETEYPYREKIFCGLCGSRLVRHVNTKSHKAIWVCNGRKRKGKDFCDGTRVPDTIIKGWGEIKKDIYIQRKDDKNGKKRYSYTSKKPKGTDRA

SEQ ID NO: 25767 - protein, 535 aa, synthetic construct
MRVSVNLNAQKPDTTTNAVIYARYSSHGQTEQSIEGQLAKGHEYAAAQGYTVVHEYIDRAMTGRNDNREAFQKMLSDTGKHQFQVVIVWKVDRFGRNREEIAFNKHTCKKNGVRVEYVAESLPNSPEAVILESVLEGMAEYYSIQLSQNIRRGQLESAKKCQCVGGSVPLGYTLDSDKHFVIDPQTAPVVKKIFDLYAEGATISEITGQLNEQGIRTARKQLFTKNSLTKLLKNEKYIGVYTYKDIVRVEGGVPAIVDESTFDRVQELLKINRRAPSHTWTKVEYLLTDKLFCGHCGSPMVGESGFSHTGAKYSYYGCIKRRREKACDKKPVRQDWIEALVLDETVKLLHDDELMEYIIDRTWEYYQVTDKVQEEKAVLEAQLAEVDKAINNLVRAIEAGIFNAATKSRMDELDAQKAALTASLADLELTSGIRITRDHIEYFLLRLRDLDVKDRECQKRLVQTFVNAVFIYDDGRVKITYNYSGQSSTITLNQIASAEKGKGFVCCLPCSTSSPRFPRGVAALFLFWCFGENRV

SEQ ID NO: 25768 - protein, 523 aa, synthetic construct
MRFFSYGRKSVFSDKSDSIDNQFRMNREYCESKFSGQVDSWQQFSDEDFTGANTSRPDLQRMLSFIKGGFCDVLVVYQLDRLSRDVRDFANIYALLEEHGVMFISIKENIDTTTPIGRAMMYVTVVFAQMERETIAARVTDNMLGLAKKGYWTGGNPPVGYVRKHIVVNGKKHCSIEVDPDGARYVTQIFDTFLAYNCSLQGMETRFKNQGIRTQSGKFFSTTQLHKMLTMPYCVEATPEVYDFYAAKGCIMDPGSPREMWDGSVGVIIYGRSTEKNKKHQAQPPEKWTVCLGKHKPFMPAEKWLAVQSRFTQNKCIKDAKWPVPLLKGVLRCKCGNLMQVSRKKKVDGTCSSWYYCRKRMRQGVDACDMGQIKCNLLDEKVLELFRGITADPALIQKFVKAEAPTDVPDLKAAQARVSACERKIGRLAASLALAEDSAASKYIIAEMERLDVELGALKREASLAEMESHRAAASAKDAKATAAEIAKLIHGLDGFDDKEKNAIARAVIQECIWDGERLFITL

SEQ ID NO: 25769 - protein, 456 aa, synthetic construct
MRNKEIAPALVRVALYIRVSGEEQKIKGLSLEAQQERLEAYARERGWVIVGIYIDAAKTARKNIHKRTEFQRMMDSVKRDEVDILLFARLDRWFRSVADYYKVMEILQAHNCDWKTTDEEYDTTTANGRLYINVKLSIAQNEADIDGERIDVVFDSKIAHGTVVSGSAPFGFRVNEEKRLEVVPEDAAIVQDAFNYFENTVSQRATVRYVREIYGVNWCDATFRRMLKEKLYTGVYDRGGRYNDQFCPAIISRQQFDRVQALLTRNVRSAPSGKVYIFTSILTCAECGHKLVGYKSSDYFYYRCNQHFQRGRCSHNHSAREDVVEQWLFEHLGEELDRCQLEWDVEAAKKKASVARTDKAALKRKLTKLKELYVNDLIDIEDYKKDYQIYVSALNQIPEPAQEAPPDFAAVRRLLDNSFRTIYDTLTREEKRTLWRSVIKEIRIDNDQNITGVVFG

SEQ ID NO: 25770 - protein, 522 aa, synthetic construct
MSNAVIYARYSSGHQREESIEGQIRECTNFAKRNGLTIVEHYIDRAISAKTDDRPSFQQMVADSSKKTFDTIIVYTLDRFARNRYDSAVYKAKLKRNGVRVLSAKENITSDPSGIILESVLEGMAEYYSVELAQKVKRGMTENALACRWASGRIPFGYTIDADKHLHPDPALVPIVQEAFEMYAAGAKIVDIARKINSYHVVTGMGNKFGRSSFDRMIRSETYIGVFKWNDIRKENAIPPIITPELFYKCQARYNARNRKNVARPSAIYLLSGKLRCGCCGGSMCGMSGKSRNGTMHYYYSCYSTRRRTSHCDIGNIRRDEIEHIIAAHAASILKKPINLDIIANQALKTNNSVKNYRLESLIQQEKDLTQKLENCMKAIDQGLVSITLMDRIKQYEADLQSVKNDISLEKIKSNPIQVTKEHIIFFLEKFALLEGEKFKDRIISTMVRDIVIKKEKDGNYLVTVQYNYANSKELPNEESYSVPESIGSQDVELVDNSGVVTNRLRFYPYYFEETFIFTQAS

SEQ ID NO: 25771 - protein, 578 aa, synthetic construct
MAYPTKNTAADNRIIAIYVRVSTGYQVDKDSLPFQKKELKAYCKHILHVDLSQVEIFEDAGRSGKNTKRPAYERMMEKVRAGLVSHVLVYKIDRISRNLVDFSLMYDDFKYNRVTFISLNEQFDTSSAIGEAVLKIILVFAELERKLTSERVKDIMIGRATEGKWNGARVPYGWDWDPDAEQPVHSKVEAPYARGMYEMYLEVQSTGKIRDYNNSHNIPTKRGGEWTSKTVSDFLRNPMNKGDYRYNYRESARGRKKPEDEVIYQEGVFEPLVDPEVWERVNRIMDDNARKRNTGGLHPIMKNCNVFAGLIQCEDCGSGFQVVKKDRRRKNGFAPSMYGCTSRYRKIHCPAPNVSEVQIGPFVINYISAMVHATNERFKIHSPAALEAMLLSDPIFANIAGIGSQGLNETFALLTGISVSGSALWRTDLVKQSCTAVSPEDIAALKKQIQKYNRAKERLEDVYYFSDDSMSEKEYLEKKNKFDAARVAAENKLKELTEVRIASHVDDSGFMKSASAFLLAHQLHAGVHIEYRDFAVTVEEESLKEFMNLVLDHISVKDRRVVEIVFSNGLSHRFIYRE

SEQ ID NO: 25772 - protein, 559 aa, synthetic construct
MAYRKITDIRDTIGMRAVFYARVSTAEEEQLNAIELQIEENRGCIKDHGWKLVGEYIDRSKSGTMVKGRDDYQRLYEDLYEDLFDIVVIKDQERLQRNTLDWYLFINRVVQTGKLLFMYMDGKFYSPDDALITGVRAIIAEEFSRNLSKKLHNYHDHRIEKARQGQEIALQGSGNVYGWDKKDGKYYINPEQAKVRRLMCEGIMARKGSTLIAKELNDAGYRNTVGKPWKPMDIPKFVYDCKNVGTMIINKERHDFESKQTIKLPKEEWVYVENALPPIVTQEEWDLICKIHEERVIATGSDRRGKKTSGYSFSGKLVCGICGAPYWRKQRVSKDEYWVCSTKQTKGRKTRKRDSTMGKAGEINPLGCDNENISYNSLMEIMGVVSERLQANTDTIKQDMINWLTKLRKQLLEANGGHTEADLQRELSRKSKLLDAYLDGILNKQEYQKKAEELDERIIQLKTETEKNKANSGDIAEIDKVLANIDEEVARYVDGNEKLKVEYLLEHLEQVQIFPDKVIVIVPILSEGIVVEKTQYVSREKWNRKDNAFADDHGGRGDR

SEQ ID NO: 25773 - protein, 684 aa, synthetic construct
MSILQTIKTIIRVVLYLRLSDEDKNKLSKEELSQSIKNQEIMLRDYAEEQGWEVVGVYNDDDWSGSDATRPDFNRMIEECKNGNVDIVLCKTQARFARDMELVEKYVHNLFHEWNVRFITVVDRIDNARKETKKTSQILGLTDQWYLEDTSLNIRETLKSKRKDGQLTSSFATYGYMKDPENKNHLIIDPISAEVIKRIYDEYLSGTGLDKIARRLNEDKILSPYEYKLLNGSKLKIPVIKDYVNYGYIEKTGTYMLDVSFTNKEEYILKDLVSFNYITTDMKSFNNKCDIVLKKYTNNRTKIYYSENDNIDINNFNIDDCILLNENDVIPKTAKVIISYTKELDRTHTINYQFEITLKENREHEDYYINICGKATDEIKKSDFIHNIRKKFKWSSSTIRTLLTDEVYIGNMVQFKSTTVSYKNHTVVWNDDETRIRKDNTHEPIIAKDIWYTVQERLENTARSCKGGTVHPLCNKVYCSNCNQIFTKTGNRRSDGTGYLCCKDKKTNWSNCDNKASIREDELHQFILEKMNEMLKKFYEEDDLKEMQNEVIEQDLYKDKLNSLEKELQSINKELQGKSTYFQKLYEDRTNGILPEKEFLILMNKYKDDNEKLEERQKIVKKEISSTLAKKETVKTKKNIFKKYRHIEELSIEIVEDFIDKILIGSYDETTNSRDIKIIWNFTI

SEQ ID NO: 25774 - protein, 456 aa, synthetic construct
MEKKLTVIPPSQTNGNAKSANSSQCRVAAYCRVSTEQEEQLGSFVNQIAYYTDYINEKEEYQLAGIFSDEGISGTGTRKRAGFRSMIAACEAGKVDLVITKSISRFARNTRDCLHYARYLKSLGIPVIFEKEGINTMESSGELLFTILSSLAQEESRNISENTRWGIRSRFQQGIPHINAACFLGYDKDEAGHLVINEGQAKVVRRIFREFLEGWQPSEIARMLNTENVSGVHGESRWAAVSVVRILQNEKYKGDLLMQKYYIRDFLTKELEKNDGKLTQYYVENDHEAIIEREIWDAAQLEINRIKEFKRNHQIRELGSSSLEPFYGKIFCGCCGGRMVKKSRKSVWRCINSGKEKGGFCKAKPVEGYKMEEYVSAAWAQLVSQRENLLPGWEKDIAQGNALERLRAAQMKKLTEKYPAWFQAAKKTRMVIGEIIIGGDKRCEILFMDGVRLVTD

SEQ ID NO: 25775 - protein, 451 aa, synthetic construct
MSEIQKTSLLSHYENLLSISTAENPLSIPAAATLSSIPTAIYCRVSTLHPHQQDSLENQIRHYQEFMKKTPNYILTEIYYDFGISGYKETRPGFCKMLEDARKGCFRQIITKSITRFARNTDTVLKTTRQLKELGIDIYFELQKIHTLSQEGELLLTLFAAFAQAESENSRWLTKMAIQQKYRKGHPMRQLHRCLGYQKDQAGNLVPDKNAELVRQIFQMAADGWSISQITKYLNENKITTQNDRTFSRSTVSRILHNHAYKGDYICQRYYVNNQRKLVRNKGEKQMYYIRHDHPAIVSEEMWETAQEKLAKKSERNRQELPSDEIAVTKKAQDPDTLEKINQKKTISQKEESGFIPDKPPLTLANYPYKDRIFCKYCGSRLRRIIARNHSVWWICNGLSRKGKAFCKGVRIPDEKLSPLRNVSFSAYIGKELIDGKETYGYSSKPDEWKR

SEQ ID NO: 25776 - protein, 490 aa, synthetic construct
MKAALYTRVSTDEQAEHGFSLEAQKKRLIEYCNKNNIEIYKLYSDEGISGHSIVKRKALQEMLQDAKEHKFNYVIAYKTDRISRNLLDLLTIKNQLDEADVELLLSDEAIDTKDDAGMTMFSIMGAFAELERKKITERMMSGKRQKLMNEHIKLKNGRVPYGYLYDDENKKYIIDESRRSIVELIYKLASQGWSYNKITRHIAEETAANSSDSKKKWYISDIRAILTNPMYKGYSGISYYYNFNDRAKKPKNSAILYKATNVEPYFTEEYWDTLYSQLEKKTQYFKRKHPIDSYIFSDVLFCATCGLKIGTRQHHANYLYYVCNSKHKMYDNDHICDYAININKFNNWFIEFIRGIDENNIKLSVSKPKDLDKELQAVRSQISLKEKNREVLLDKLMNGVIDDTEYRLASNMVIASLNSLKSQEKELSDKMDSLKEKEQTKRYNRLKIKALKVLVNDWDNLTDQAKKTLINSSINKIMITKDGIQEIEFN

SEQ ID NO: 25777 - protein, 523 aa, synthetic construct
MRFFSYGRKSVFSDKSDSIDNQFRMNREYCESKFSGQVDSWQQFSDEDFTGANTSRPDLQRMLSFIKGGFCDVLVVYQLDRLSRDVRDFANIYALLEEHGVMFISIKENIDTTTPIGRAMMYVTVVFAQMERETIAARVTDNMLGLAKKGYWTGGNPPVGYVRKHIVVNGKKHCSIEVDPDGARYVTQIFDTFLAYNCSLQGMETRFKNQGIRTQSGKFFSTTQLHKMLTMPYCVEATPEVYDFYAAKGCIMDPGSPREMWDGSVGVIIYGRSTEKNKKHQAQPPEKWTVCLGKHKPFMPAEKWLAVQSRFTQNKCIKDAKWPVPLLKGVLRCKCGNLMQVSRKKKVDGTCSSWYYCRKRMRQGVDACDMGQIKCDLLDEEVLELFRGITADPALIQKFVKAETPADVSDLKAAQARVSACERKIGRLAASLALAEDSAASKYIIAEMERLDVELGALKREASLAEMESHRAAASAKDAKATAAEIAKLIHGLDGFDDKEKNAIARAVIQECTWDGERLFIKL

SEQ ID NO: 25778 - protein, 492 aa, synthetic construct
MKEKAVGYRRVSSDEQKDKYSLPAQAEQQEKYAAEKDFELVRCWSVSESAKEPGRKGFNEMLSFAKKHKINHILFKKADRSARNETDAATIIRLARTTDMSFHFIEEGMTLNKNSKNHEFSIYMINCVMAALMPRDLSNNVTIAFEKKAKMGHYPMVAPYGYVNFRKNKGEMSRLLIDKEKAPFVKRMYELYASGLYSYRSLAKKMSEEGFRMSASVKCNKKNVEMILNNPIYKGDFVFKDVYYKGKHEPIVSKELFQEVQKVIRSQTSTRANKRQFLFAGLFKCSHCGCALVGELHKGKYIYYHCTGNKGGECKRKYIPEHKLEEALLVILDDLKMSDETAKIVLNAIKNELKSNTEYSQSQAKEIKKQIETLQKRLSKLLDLYTDGEIDKNAYNMKSKQWQFELDELIINQSKINQSYVNYIERARDVFELCKNASQWYLEQSIEKKRELLKLLHSNFLFDGESPHFELNSVFKCVYDLSKNEKNVDGGT

SEQ ID NO: 25779 - protein, 502 aa, synthetic construct
MPEALNAVIYARYSSDRQTEQSIEGQLRECYAFAKANDIAVIDTYIDRAISGKTDNRPAFQKMIEDSAKRQFQAVIVYRLDRFTRNRYDSAIYKARLKKNGVKVLSAMENLNGSPESIIMESLLEGMAEYYSVELSQKITRGMRENALKGKALGGQRVLGYKVNSDCYFEIDETTAPVVVDIFKLYSSGKTVKEICDILNARGVKTARGGAFNKNSLHTILTNKKYIGIYKTKYGEIVGGIPAIIDKELFEMVALRMEQNKKAPARAKAEINYLLSTKLFCGKCRSAMVGESGTSKTGKKYYYYACVKKKREKACDKSNVKKDWIEDLVIQRTVTDILKGDVIEKIADRLVELQKAEAAESGTMLYLENSLAEIQVSIKNIMTAIEKGIITESTKTRLTELEDEKRNVEIEIAKESIARRIISREQIIYWISSFKDGDITSEKYRQQLIDTFVHAVFVYDDKIVITYNYSGENNTATISDLDLSSPPKINHPQGWIYFCRGP

SEQ ID NO: 25780 - protein, 628 aa, synthetic construct
MKAAFLIRCSTKNQDLNRQTRDLTRLAKSMGFEYDLENLVYGEKITGKDDVTKKNRDSIDRLLRAAKEQRFDVVLVSEVSRMSRDPASGRIYVRLLINMNIPVYFKDIDLWTINPETGKKVRDAELVIGAAFDAAWKYLKSMKTQIASARRNELDNNRISIGQPYFGYKRYEGIDKSKKNQIVVNETEAEVVLAVYNEYLKEGATLKSTALAITDKYGEKLNRKFSLGTIEHILTYENYATGIKKVNLKDPDTDEVEVFDVSTPIIIDKELYEAATNKRKKNRVKDEPYPNQQVYLLSKLIKCPDCGYTLTPRRKAGEFGQTYRLVNGKPAVSWLCMSGINNASDCTSRTAIANEKLEPIIWELVKKELIGYANMNDEKREEQIRECEEKIEYQNYSIQNFTKEIEKLKKRLSTAYQFSINAAEMAVDDEDMRTMAMEEFNRTAKGVRQEMKNFEKSIEQAKGELEKLRDLKTFYSQPTLPKDYLERIEGNFTEKRNLVKQLITQIVPYRINTFKKKERESGAKTCNKMITVKNGAVLLEVYTIGGVYNVFYNANSKFQVKTAYYVHGEYATFQNGIRKYPAYDEGEYFVISNANMVMETDDIDEVVTVNEFVDIAIANNWVIEYQYQ

SEQ ID NO: 25781 - protein, 498 aa, synthetic construct
MQTAVIYARYSSDKQTEQSIEGQLYDCYNYAKQHGITVVQEYIDRAMTGRNDDRPDFQRMIADSAKHTFELVLVWKLDRFARSTEDSAYNRGKLKRNGVRLLSVKEDFGDSSAGDLMMHVMESFNEFYSADLREKTVRGMHQSALKCQSTGGQIPIGYKIEGKKYAIDEATRFIPETVFRMYAEGKRLAEIARYLNERGYRTRMGRKFTTGSFYTMLSNEKYIGVYKYGDVRIEGGYEAMIDPVLFDAVQKKLVENKKRAPKISERENFYLTGKLFCGHCGEPMNGMSGNSTKGKHLYYRCNGVRKHTGCDKRTERKEELENEIIGAIQRAFANADPEELTRKVIENYEKNSRPADQVKVMKAELQKITNKVDNVVNAIAEMGGNETLYTQLRQLTEQKEQKETEIRIAEHKADDMPTVELVKKILDLIQNADTMTDEGRQLLIDGAVSRIYVYDDSLDIYFKGGKNTEIPLNPANKDDVSDNSFACCKEWGAKVVLT

SEQ ID NO: 25782 - protein, 550 aa, synthetic construct
MYYQPKIDFTPDEVIDYLRKSRSDDPTLTVEEVLAKHEAILDEWSEKNLGGIVPEENKYREVVSGETLKERPEINKVIKRIESPKIKAIQIVEPQRLTRGDLEDIGRIMKLLKHTNTLVITPNRIYNLHDDYDWDALERELKRGNEFLEYTKKILNRGRLLSVSQGNYIGNTPPYGYRKEFVMEGKKKCPILVPNKDEAEVVRMMFDLYVNEDMGCWNICKKFDEMGIKPPKGDHWSANAMTKMLENIHYIGKVKWNHRKTITIVEDGEFVQTRPVAKIGEYLIYDGKHKAIVSEELFNAAQAKKGKNARLKPNTKIRNPLAGLLWCKCGRAMSLRTYKAHNAQPRLLCDGQTYCKTGSCTYDEMIVRVEEILKNCISDFEVRLKSDEGDSAKLHARLIKNLEKKKKELEAKELAQWETQSHPDPAQRMPQHIFQQLNEKLLKEKEEVQQALCKAYESMPEPVDYEEKIKMFQDALDALQNPDASAAEKNKLLKACIERIEYHRDKPERIKSQQVRFYDPVLKKTRNRSPLKTGGNWTTPNIELDVKLKV

SEQ ID NO: 25783 - protein, 478 aa, synthetic construct
MTNQAEKTSYIENVAAYIRVSTQEQKLHGISIEAQEEKLTEYADSHGMKIVKFYKDEGVSGRKLIRKRPALQAMIQDAEKGNFRRIIFIKLDRFFRSVAEYHECMKRLAAGGVIWTATEEKYDLSTPSGEAFVNMKLTMAQFEADQVGERIRMINEYKVKSGQPLYGSQALPFCYQVKQSGDGDRRKYIAKRDEIIMEDLIDHFCKNRSVRAALHYINAKYSRAFSYSTIKNALTSELICGTYRGNPAYCEGYMTPAAFETMQKYIQHNPRTSQREHSYIFGGLIRCPCCGNMLVGSPTVLNRIGKSGQKLSYKYYGYRCYRGNLEKKCDFRTMAFEHRLEAIMLSEVEAVMRGKQMYLLRLQNAPQRVAQHDLAELQQELARLNYAWQKGRIKTAADYDRQYDDLMTRIDAANAERQELAANPDYRKISRILSDGWKQLYISLDNDHKRAFWRAFIEEIQLEWTKGVKRIRDITFFT

SEQ ID NO: 25784 - protein, 556 aa, synthetic construct
MRQKFKIDLSMLTPEEQQQFRDDPTTLTKGEVDVALYLRFSSERQKEQSIEGQLRDCIAYCKRKGFRIVAIYVDRATTARKDVEKRVHFQEMISDSIHHLWNFVVVWKLDRFARNREDSAVFKMRLRKNGVRVKSATETISENPEGIILESVLEGIAEYYSADLSQKITRGLRESAMKGHSVGGHVPLGYKIEDHKLVINPATAHIVQEAFQLYANGESMAEICRIFNSKGYRTAKNSEFNRSSFKSMFKNVRYIGTYIYKDIEKENAIPAIIDKDLFETVQRRLSLTADAPARGKAKVDYLLSGKLFCGHCGSSMNGDSGTGRHGEIHNYYKCFSRKKHKNCNKKSLRKEYIERIVAQDAMDLLTDEVIEELADMAMTQADRDLKENTRIPELTVKLTEIEQGIANITKAIEKGIASDALLNRLTELEKEKKDLTSQLREEEKYIYRIDRDQVVFWLTKFQGGDIEDEDCRRRIIDLLVNSVTVWDEPDGYKITTAYNLTSCKTRTFRVSEKADSPSGEGFGFGDLSSTKKIRDTLSRVSYFFGSLISFVHPKGN

SEQ ID NO: 25785 - protein, 525 aa, synthetic construct
MQTAENRSKYHQLRVAAYCRVSTEQEEQQNSYQVQIAYYTDLINRKKEWTLAGIFADEGISGTQTKKRTEFNRMIRMCRNKKIDLVITKSISRFARNTVDCLEYVRQLKDLGIGVIFEKENINTMTMTSEFMIALYGSFAQAESESISKNVSWGKEKAYREGKVQFQYKYLLGYKKGADGKPEIVPEEAETVKLIFNMYLDGYTLLNIADTLMAQGRRTATGKNIWSKGEVQRILKNEKYVGDALLQKSFTVDCITHKVVKNNGERPMYLVTDHHTPIVDRDTFNRVQQELARRTSKRKISDKTKTEQGKYSGKYALSELLICGHCGTPYRRRVWSRNGKKQVVWRCISRLEHGKKYCPDSPTIKEEQLHKAIIRAINNYYSCRNDIARILKANIGSVLECQGQEEILAAGKRLREIDQARNDLVNLIASGGCDEDKLDSEFEKLYAEEQQLSERLENLKLQNKTSEGTQAKLDEIMDMIEHEKFELETFDNVLIRKLIECIKVLSKTEILVIFKGGYEVRTEIE

SEQ ID NO: 25786 - protein, 513 aa, synthetic construct
MPTVTVIQPTISEEQNTKIRCAAYCRVSSDSEDQLNSFMAQMRYYSQVFDNSETEELIDIYADEGITGTREDKRDEFQRLMKDCRKGKIDRIYTKSISRFARNTRDCLKNVRELKSLGITIYFEKENIDTANMTDEMMITIMGGLAQEESTSISQNLRWGIKKRMENGTIKMCTPVFGYELVDGNLILKSDEAEIVRQIFDWYLNGYGLAAIAQMLNALKIERFGRTSHWTASTVGVMLRNEKYIGDQLFQKKYTTDTLPFRQVVNKGERDQYYYSDRHKPIISRDDFDKVQNILAEHKKSFKGLKQDHIFAKKIYCGECGSTFKFKCRKNKNYWVCRLHDAESDKCSNKQILEANAISAFIMLCNKLWYNYKQILLPCQAALQDLKLKKFSGKTQVMDIHKEIAKLREQAHVLARLKTKGFLDEAKYLEQTTELTAKINKLQTELKKLTRSDDEDEMLEQIEMLIDFFEKRENIMIDFDESAFENIVEKIVVIDQYELEFHLIGGLKFKENI

SEQ ID NO: 25787 - protein, 525 aa, synthetic construct
MYLEISNPKDYHAALYIRLSKEDENEGPSGSVTNQQSLLHAFVREHRLDVYDTYIDDGWSGTSFDRPGFQRMLRDIEAGKVNMVITKDLSRLGRDYIMTGHYMERYFPEKRVRYISLLDGVDTGIESSANDITPFRAIMNDMYAKDISKKIKSVKHDKQRKGEFIGGKPMYGYRMHPSEKNRIVIDEDAAPVVRRIFAMALAGTSCRQIAVRLNEEGVLSPAAYAGLTLSCHGPYSGQWSSERITAMLKNETYIGNMVQGRTARISYKTKKCLRRQPQQWVVVEHTHEPLIDPETFRKVQLMVNSRRNTRSRTYDFLLKGLIFCHECGYPLAVMNRRNAAGEDRLFFVCRTYQRFTKAGVCSCHSIKEQTVTEAVIERTRKVCEAYLNPERLRPIAAAAVAASGRVDGREEELSALHARIDSMTAHLDRMYMDRLNGLLADVDFERLYRRIKAERTALEEKLRELEAQKKTPVPIEDRARELVQQFLHCAFTSRELLVSLIERIELTESKEIIIRFRFREPEAIF

SEQ ID NO: 25788 - protein, 491 aa, synthetic construct
MYLRKSRAEEGQSTEEVLAKHRAALEELADRLGLPVDGVYEEVASGEKLYARPEMLKLLERIRAGEVEAVLCMDIDRLGRGGMADQGTILDAFRESGTLIITPEKTYDLTNDVDIEMTEFKAFFARAEWRAIRKRMRRGLMQTIEAGGYTANAPYGYRRCRIGKLPSLEVIPEEARFVRYIYERYLAGIGAQTIAQELNAMGSTPRRGAEWNRNTVRHVLRNPTFAGKVAWNRVKHYRPGAHGKDKHHVVYTPEGEWLMVDGVHEAIIPWDTWLEAQERRKQRYIPPSNTGQRANPFAGIIRCSKCGNNMQRMGTNKGEPYLLCTTKGCAAGAKFEYVEERMVELLYDELARLRLLIDSGAAPNIDALEAALAAAQREQERVQARIPRLYEFLEDGTYDRSTFRSRLDAAEKELAELASKRAGLERQIDERRRIDPRKAAAALENLVQLYPTMSPADKNSALKALGAEVTYTKEKKTKPRDFTLELQLRDF

SEQ ID NO: 25789 - protein, 548 aa, synthetic construct
MKKFPIDLSCLTEEEISQFQEDPYTLYNGDQNVAIYLRYSSTGQSDQSIEGQLRDCRAFCKANHYRIVAIYVDRATTARKDVEKRVHLMEMVADSAKQNWEYVIVWKLDRFARNRNDSAIMKMRLRKNGVKVLSATEHLTDSPESIILESVLEGMAEFFSAELSQKVTRGMRESALKCHSVGGHIPLGYKVENHKLVVDPDTAHIVQEAFSLYANGESVADICRKFNSAGYKTAKNTEFNRSSFKAMFRNTRYIGTYTYKDIVIENGIPAIIDKELFETVQRRLSKTATAPARGKAKVDYLLSGKLFCGHCGASMNGESGAGRHGKVYHYYSCYTKKRKLGCDKRPLKKDYIEGIVARDALNLLTDQLIDEIADMAIRQSEQDLINDTHIPQLTAQLTEVEKSITNITAAIEKGIASETLMNRLVQLEHEKKTLNKEIKAEEKFVYRIDRDQIVFWLSQFKYGNIEDEDFRRRLIDLLVNSVTVWDEPDGYKITTAYNLTSCKTKTFRVEKNPAAEEATGFDFGESECTKKPAKFARIWQVFCIFRSN

SEQ ID NO: 25790 - protein, 497 aa, synthetic construct
MNAIYARQSVDRADSISIESQIEFCQYEMRGEQYKVYTDRGYSGKNTDRPAFAEMMNDIESGVIGKVVVYKLDRISRSILDFSNMMEQFGTHKVEFVSTTEKFDTSSPMGRAMLNICIVFAQLERETIQKRVADAYYSRSQKSFYMGGRVPYGFRLIPTTIDGVKTSMYEINTEEAEQVRLIYELYSKPECSYGDIIRYFQSHGILKNGKPWGRTRLADVLRNPIYVRSDLSVYEFYRDQGAIMANDPGDFIGTNGCYYYKGKDSTGRKQMNLEGNHLVLAPHEGIIPADLWLKCRAKCLEAQQIKPYQKAKNTWLAGKIKCGVCGYALVDKHYSTTRSRYLLCSNKMNAKACEGPGTIYTDEFEQIIYDEMRKKLAQFRKLRQCKGNRINPELTALSIQLTQAESEIAALMERLSAADDTMFRYISGRIKELDGKKQELMKRISERKLHKEADYTEINNHLTMWDELSFDDKRQTVDQLIRVIYATSDSIKIEWRI

SEQ ID NO: 25791 - protein, 508 aa, synthetic construct
MYGMYLRKSRADDPNETMDETLAKHEKLLFDLAESMHIDRSEIIVLKEVVSGESIANRPEIQRGLKLIMDGVIDQGMFAVDSQRLARGDTLDQGTILRVFSLTKVKIITPLKIINPADEFDEDYFEFDLFMGRREYKMINRRMQRGRHISVQEGYYVGSVAPYGYNRCRYNKSYSLEINQEEYYIFTLMKDMAIEGMGTTNIANKLNEMGFKPRKGDRWTTATVRGILINKTNLGLIKWNSRKEVKKFDNNEIVKTRPINKEAEYYPGLHPAIITQEEYDMIIEQMKARNNAPIKKNMKIRNPLAGLIVCADCGRNMVRRPYKKNQDSLICPTSNCKNVASYVSVVEERIIESLKAILNQYKIFVDDYDHSNKDKYVSSKKTRIETLDKEIEKLHGQINKACEMLELGAYSVALFKERKKNLDDKIRSLEKEKATIEKESEDEKVEQYRKAIPKIEKAVSLYFDASIEERNKLLKSVIEKCYYKKEVPGSRWKSDAMKEFKLEIHMKV

SEQ ID NO: 25792 - protein, 516 aa, synthetic construct
MKAVIYARFSSHNQREESIEGQVRACQRFAKEHDMTVIEIYADRGLSGLHADNRPEFQRMIADSDRHKFQALIMWNLDRFSRDKYDTAVYKSRLKKNGVTLYYSDQNIPDTPEGIILESLLEGFAQYYSANLSRNAKRGLQENARKCLWNGGGLPLGYTIDETKHFVIDPAGAACVRQIFQMYADNHSIKEIVSTLNEKGYRTVKGNKFRLGSIQGVLRNRKYIGEYHASGITVPNGVPAIVDVELFNAVQEKIGVVSAAKARNKAEIPYLLTTKVFCGHCGSPMIGESGTGKGGSTYRYYKCSCRKNRKGQCDKRTEQKEWLEETVVAQTVEKFLHPDVIEDVSNACVAVLEQDCQNNALLKALNAQLADVEKSSRNIIKAIEAGVFTASMRERLAELEQQKEDITVQIAREQLRKPQLSAEQIAFFLRSFLDGDAHDPNFQERIIESLVRRVDVYDEGPGNRKLTVFYNLKKNNHSSVSVKCSDSESVGLPKGRLQKQPIFLFASCRRTRIGRQ

SEQ ID NO: 25793 - protein, 520 aa, synthetic construct
MAEKNITVIPARKRVGSTAAKEIIKKLRVAAYCRVSTETEEQNSSYEVQVAHYTEFIKKNTEWEFAGIFADDGISGTNTKKREEFNRMIDECMEGKIDLVISKSISRFARNTLDCLKYIRQLKEKNISVFFEKENINTMDAKGEVLLTIMASLAQQESQSLSQNVKLGLQYRYQQGKVQVNHKRFMGYTKDEDGNLIIVPGEAKIIKRIYREYLEGKSLAGIGRDLEKDGILTAAGKPKWRPETLKKILTNEKYIGDALLQKTTTVDFLTKKRVKNEGHLPQYYVENNHDAIIPKELFLQAQEELHRRNNIYTGEDKNKRIYSSKYALSSITFCGDCGDIYRRVYWNIHGRKEIVWRCVTRIEQGPEVCKSRTVKEGDLYDAVMTAINRLLAGGDNMIKTLEENIHAVIGDATDYQISEINTLLEEKQKELISLANKGKDYEPLADEIDNLREKRQNLLVEDASLSGENERINELIEFIRNNKYRTQRYDDALVRKLIQNVTVYNDHFVICFKSGIEVEV

SEQ ID NO: 25794 - protein, 531 aa, synthetic construct
MPKKTAKHPAKPKRGKKLEIEEPGVLYGRYSSHNQKDISVEQQFEKGYELAAEYGIRIIDTYADRAVSGRTDKRKDFQRMMSEAAKGKFRYVIAWKSNRMGRNMLEALINEARLQELGVRVLYVEEDFDDTAAGRFAARSMMNVNQFYSENMAEDIKRGLYDNASNCMVANGHLPYGYKRDETLHYVIDEPKAAVIREIFTRVAAGEPFVDIMNSLNARGIKTSYNRPWGRSSFQKILSNERYRGIYIYGDVRKEDGIPRIISDELFFKVQEVITTKKNPQGRHRVNGDYLLTGKLFCGKCKSPMVGISGTGRSGKLHYYYVCQKHRTEKTCDKKNVRRDEIELQVAQAIKDYALKDDVIEWIADSTVAYNERKEAESKVGILEDQLAGTERGIKNIMSAIEQGIITETTKSRLVELESERATIKAKIAAARADIVTVSRDDIISGLEMFRDGDVYDKKYQARLFDTFLVAVYVYDDDLRLVFSFSGNKNTIQIPIESAVNAVENNAAECSFKLCSAPPSRSKLIACSDFF

SEQ ID NO: 25795 - protein, 498 aa, synthetic construct
MEIQIREGNSRQKRKLKVCAYCRVSTDADEQENSLENQIRHYETVIKANPSYEYAGVYSDFAISGFKEKRPGLQKMLADAQKGKIDLILTKSVSRFARNTSIVLEATRKLKELNVGVFFELQNINTLSGEGELMLTILAAFAQAESESGSAGAKMVYQRKYEAGIPVQYLERSFGYTKDERGVYIADEYEAVWVRKIYEMAADGYTPAAIKRYLNENGVKTVGGTKWIDSTVFRLIENEIYKGDYIMHKHFVNEERKLVRNRGEVDAWYIEDDHEAIVSPELWQKAQDAIEAKRDYLAEGSVIEEFTEDNYPYMNRIFCAKCGHPLYKRIYSNGNRLNWGCSGTKRYGKSFCEGINIPDGVLRKAWHFDGNMYIDEKPSVKGTKEFTYLKESSWKRRHKKKVPEAIPENTEEAYPYRKKIFCGRCGSRLVRHVNPKSHKVIWICNGAKRKGVAFCKGTRIPDSVIRGWGEIKKDIYIQRKDDKNGKKRYSYTSKKPTA

SEQ ID NO: 25796 - protein, 464 aa, synthetic construct
MARSVTVIPARNRQRETGHRAVQEKKIRVAAYCRVSTDQEDQLHSFEAQVDYYTKYINDHENYEMAGIYADEGISGTNTKKREQFKRMIADCEGGKIDLVITKSISRFARNTQDCLAYSRKLKNLGIGIIFEKENINTLDSTGELLFTILSSLAQDESRNISENCKWGIRTKFKNGEMHLNTFKFLGYDKDENGKLVINKEQAKTVRRIYRDFLIGINPPQIAKELTEEKVPGCNGQTKWYPSTIVGILKQEKHMGDALLQKTYTADFLTKRQVKNNGEIAQVYVKDSHKGIIDKETWNAVQEEFERRERFMKDHGTDRYSYGADCIPFCEKVFCGECKSLFTRHSWKSRGIVQWQCKNHRKDGKVACTNAYVDNADLEKGFVKAFNRLVTDRDKHMERWQQMKSDGTPLEKIRAGQMMEAVGNEPLTRFVPEIAQLVLAEVTVFGAKKYEFFFLEGSRIKVSV

SEQ ID NO: 25797 - protein, 437 aa, synthetic construct
MNDIERVIERVDFQIPMQPKALRVCAYARVSSGKDAMLHSLSAQVSYYNNLIQSHAGWLYCGVYSDEAITGTKSQRDGFQRMLASCRAGEIDLIITKSISRFARNTVTLLETVRELKSLGVDVFFEEQNIHTMSADGELMLTILASYAQEESLSASENQKWRIRKAFENGELVNLRFLFGYNITASGIQVNEKEAAIVREIFTRFNGGESLSAISRDLNDRGCERVFGGTWCADRIRNLLSNEKYTGNALLQKQYRKNHIDKKLVPNRGELPMYYVTGSHEPIIDQAAFDKAQVRLNKLARQAENRRKPTRSTFSGLIRCGLCGSAYKRVTCRSKHFWNCTTFQTKGKSECAAKRIPEETLEALTCEVLGTVSFDPDMVRSKITAIRAEKNNVVVFCMDDGSEIVKRWTDRSRTESWTPEMKEKARQRALRARREKE

SEQ ID NO: 25798 - protein, 463 aa, synthetic construct
MAQPQTALQRVALYIRVSSDEQAERGDSIRDQKERGTKYIDDHQNMILQDTYIDDGVSGQKLDRDDFTRLIGNVKAGLVDLIIFTKLDRWFRSLRHYLNTQVILDKYNVAWTAIDQPYFDTSTPYGRAFVAQSMTWAELEAQNGGLRVADVFRSKVEHGEVITGKVPRGYMIQNKHLVFSDEAPAMLDSIQYFHREQGLAKTVNYMRETHGINMSIQNLKNSILRNEKYTGRYRGNENYCPRLISDEMYQDIQRVLDNNSTIRSSQKYPYIFSGILICDECGHKMSGCHINVVSRRTSGKVYRYKYPAYECLQYRAYKKCSNGGEIREIRIEEYLLEHVREELSGYLVDFETGEAKRIDNRAKKNKIRRKLDRLKDLYLNEVINLEEYKKDRAEYEEQLAALPDMEQPIKNLKPLKQVLDCNFEIIYNNLNNEEKRAFWRSIIKEIRVSKSIGRNRKYQIIFL

SEQ ID NO: 25799 - protein, 493 aa, synthetic construct
MVLLDTYCIYLRKSRADAEAEARGEGETLARHEHALLDLAKRGNLTISHIYREIVSGDSIAARPQMQQMLQDVTDKAYTGVLVMEIERLARGDTIDQGVVAQAFRESGTKIVTPLKTYDPSNEFDEEYFEFSLFMSRREYKTIKRRMQAGRIASIKEGNYLGTNPPYGYKKVQPEPKVKTLEIVSEEAEAVKMMFNMYLSGDGARAIAARLNQLQIPPRKASMWEPVSVRKILRNPVYAGKIEWHTKKDGTILSDGVHPAIISWEQFQQSVERRKRTAPQVPTGYTTQNYYHGLLFCGNCGHQMKRRPVPNGTPHMLCRRYECRGKVVSSTTEKIDEAVLEAIKYRISELTLFKDQSGEEKRAKEKQKEFQRDQLKKALEKLKSQKEKLHTLLETDVYTVEVFLERSKALEAKKEELEKALHSITDSLQEKEHLAPEQAVIWLRYVLDHFSTADACQKSKMLQRIIKRIEYKKTEKMCYRKQSSDMSLHIDFL

SEQ ID NO: 25800 - protein, 537 aa, synthetic construct
MQIKVIQPSAERELERKKVCAYVRVSTDSDEQEDSYDNQMRYYKDKIESNPDWNFVGIYSDLGISGYKEKRPGFLNMIQEARNGGIDLILVKSVSRFARNTETVLKYSRELKRLGVGIYFELQKINTLSGEGELLLTILAAFAQAESESNSGNVSMSIRRKFEKGELNFPISKIYGYTEDADGNPIIDEEKAKIVRLIFDLAEKGIWVTKISDYLNKKQIPGIAAEKWNYGQVAKMLRQEAYMGDRILQKTYRDSHRRTRKNKGQVDQWYVKDTHPAIVTREQWYRVQDILLERNKELYDATPISEEKNLSTHSTYPLSGMLYCPYCGRVLMHRWEGKKRYENWVCGLHRKVSKDACPGICIPNRIASSWGELKEPMTVLKYTDEYGMERFTAIPKVEYEASEDCPYEVIKPEPKPERPKKPSYKKAPKPETPRYTRTVYPLSGKLFCPNCGKVLTHKWNKGVEYWVCSTNRNKHRAENFVRCKGMYFPAEAAKDWGEITEPVTVIAYKNEYGHRLYTAMPKEEYERSQDCPYRKED

SEQ ID NO: 25801 - protein, 465 aa, synthetic construct
MAREVVHIPARPQVVGTRTMPEKKIRLAAYCRVSSEQDEQLNSFENQVSYYKEYISSHPDYELAGIYADEGISGTSTKRRDEFNRMIADCEAGLIDMVITKSISRFARNTQDCLMYSRRLKDLGIGIRFEKENINTMDSTGELLFTILSSLAQDESRSISENCQWGIRSLFKRGIHHLNTNRFYGYDSDENGKLVINPEQAKVVKWIYESFMEGINPDVMVKSLNEKEVPTCMGKSKWTCNQIKSILRNEKHMGDAVLQKTYTPDYLTHKSVKNEGQLPQYYIKEDHPPIVSQQLWEAVQLELDRREAFMKKHFLTSMGQYTDENPLSHRIICGICGHTFSRRTITRLEGRIKVWQCGQHYAKKGEHLCDGRTIREEDLYKAFQLAWNHLVEERDNKGKDWKKKMAEGNALEAYRAEQFLRLTADGGRIKEGKPLVSAVLDHIVFEKNGDLTIYFLDGSQVCVEP

SEQ ID NO: 25802 - protein, 545 aa, synthetic construct
MAVTKIPKKTITLIEPKKSFIVDKAQHRQKRVAAYCRVSTDSEEQLTSYTNQMKVYTEMIASNKEWEFAGLYADEGISGTRADKRPQFQKMIDDCHKGKIDMIITKSVSRFARNTVDCLDYVRSLKEIGVGIYFEEQNIDTLKSDSELYLVIYAGFAQSESESISKNITWTHRKNFEEGRPIFMYNRMLGYKKGKDGNPEIVPSEAAIVQRVFDMYLSGKSTDEISEILQGENIEIPGKKLNFSKSMIIRMLKNEKYCGDAILQKTVTLDPISKKRKANEGEAPMWLVENSHPAIVSREIFNKAQEESARRKAKAPQSEKVALTASGKYSKYALTEVMMCGECGSRYKRVTWNIRGKQRIVWRCMSRLDYGKKYCADSITVDEQALQRAIVRALNRFNIEDESTYLMLMKSTIGEAIGINGSSDEIDLLERRIDALNKRMLDLVTLSVQEDSDAEDYEDEFKNISMQIEQLSGRITAIRESESEDGELQARIKEIQDTIDKRKENKDTYDDSIVRQMIECIKVYHDGRLQIILGGGYELEEYLEK

SEQ ID NO: 25803 - protein, 510 aa, synthetic construct
MLISPISRQGIKLLRVAAYCRVSSSSADQLNSYATQIDYYTRLAKKKKNEWNMVEIFADEGISGMKAKNRPEFQRMIRMCELHQLDLIITKSVSRFARNVKEALEYVRKLKLLGVGIIFEKEGINTQSLGDEMLLNTFTAIAQEESKVISQNQRLSIVKRMELGIYVDSNAPYGFRLENKQLVEYSPEADIVRWIFHSYLNGMSTTEIAKVLTERGIPTKNGKEKWKSTKISYMLSNERYIGDCHYQKTYRDTTVPFKQSKNRGEEDMYYATGTHASIIEKGTFDKAQVLLQKRKEQFTKSITFNTYPITSRIRCSECGSFYRRKVRSGGVKWVCAKHEENTKSCNSNYYSEERIYDGFLSVVNKLRFGQENILGQVIAKLESATQKYKRNNKTAMQISQKIAEINATILKLNELRSKGYLAPEIHQSQVREMQKQLCTLKEDRQDQFESRILTMLQDVRKLKSLIDEIEEPLDEFDEKLFEEIIVEMTLNNSDELTVTLLGGLKFTELI

SEQ ID NO: 25804 - protein, 499 aa, synthetic construct
MIAIYARQSLDKKDSISIETQIELCKKEIGDEPYKEYVDRGYSGKNTNRPQFKAMMQDVENGVISKIIVYKLDRLSRSTLDFGELMDALSRHNVEFSSTREKFDTSTPIGKAMLNIIMVFAQLERETIQVRVQDNFRMRSSRGAYDAKAPYGYAKTKVMVQGKAVSTLKPDKAYSLMVKKIFEQYAYTSTSLGYLARTLNQQGIKSANGAAWDSCKLSKLLCNPIYVKADAEVYKYYRAKGMEITNDIDDFRGQYGCVTYGQWDRAKNKFAQLSGLTLSIGLHEGIIDAKTFLACQYKLADNTQINNTGRGKHSWLTGLLKCGCCGKAMKVMTYKDMATFRCSGAMNTGLCSDSPSVGVREIEEAVEREIFAHVARHQELVVQKRKEEDNKAHNYKIAIAKLDDQIANLITALADGTELTMKYINGRISELQKQRDILAAELQQHKNATKQQDDIKQFHDIINLWPGMTIQQKHEIAMMLIKRVEIQEDTTRIYWKYDL

SEQ ID NO: 25805 - protein, 500 aa, synthetic construct
MRMCGYARVSTDEERQLDSLEHQMEFFSDFAKQNGHHLVNVYTDEGITGRQLKKRDAFNKMLSDSKLGLFDLLVVKDVSRFARNTVDLLTSIRQLKSRGIDVIFVNNSQKVLGESEFIITLLGAVAQEESSNLSKRVKFGKNITSKKGRVPPRIFGYDRIDNFTMEINEREAEVVREIYHLYIDEGLGCRLIAITLAEKQMKTKFGNDWNQRNIRRILENPIYSGHYINHRYTVVDFLEGTTKALPKEQYYHHDRPEWAIITPERFQQAQEILEQRRKQYATEYTHFTGRYSNRHLFSTLIRCKECGRAFSRRVTHYPNSDYIYWRCPTNNQYTAKRCSNNTIVREDDLIETLSTYLREVVSNKESIAQEIARKFKEANAVEGSKPDAQTLEAKKVKLKAKLEKYMEMYANDVITMEALKSKTAEINESINVIDDQLILLEGQRTQERTIESITNEAMTEIERFLSLQSATNMDLRRIIDSIIVDDKKQVKINLKITGNL

SEQ ID NO: 25806 - protein, 502 aa, synthetic construct
MEIQIREGSREQKRKLKVCAYCRVSTDADEQENSLENQIRHYETVIKANPDYEYAGVYSDFAISGFKEKRPGLQKMLADAEKGKIDLILTKSVSRFARNTSIVLEATRKLKELNVGVFFELQNINTLSGEGELMLTILAAFAQAESESGSAGAKMVYQRKYEAGIPVQYLERSFGYTKDERGVFVADEAEAVWVRKIYEMAADGYTPASIKRYLNENGVKTVGGVQWVDSTVFRLLENEIYKGDYIMHKHFVNEERKLVRNRGEVDAWYIEDDHEAIVSPELWQKAQDALVAKRDYLAEGSVIEEFTEENYPYMNKIYCAKCGYPLYKRIYSKGNRLNWGCSGTKRYGKTFCDGINIPDGVLRSAWHFKENTYIAEKASDKGVKEFTYLKEQSWKRRHKKKQPPAIPENTEVEYPYREKIFCALCGSRLVRYVNPKSHKVTWVCSRRKRKGKDACDGTRVPDTIIKGWGEIKKDIYIQRKDDKNGKKRYSYTSKKPKGADRA

SEQ ID NO: 25807 - protein, 464 aa, synthetic construct
MARSVTVIPARSQKVRTGHKAVQEKKIRVAAYCRVSTDQEDQLHSFEAQVEYYTKYINEHENYEMAGIYADEGISGTNTKKREQFKKMIADCEGGKIDLVITKSISRFARNTQDCLAYSRKLKNLGIGIIFEKENINTLDSTGELLFTILSSLAQDESRNISENCKWGIRTKFKNGEMHLNTFKFLGYDKDENGKLVINKEQAKTVRRIYRDFLIGINPAQIAKELTEEKVPGCLGQTKWYPSTVIGILKQEKHMGDALLQKTYTADFLTKRQVKNNGEIAQVYVKDSHKGIIDKETWNAVQEEFERREKFMQKHGTDRYSYGSECYPFCEKIFCGECGSLFTRHSWKSRGIIQWQCKNHRKDGKVACTNAYVDNADLEKGFVKAFNRLVGEREKHIERWNSMKLDGTPLEKIRAGQMMEATESGQLQQYVPEAAQLVLEEITIFGAKKYEFAFLEGSRVKVSV

SEQ ID NO: 25808 - protein, 498 aa, synthetic construct
MQIEVRKAEMGKEKKRLKVCAYARVSTEASEQENSLENQVSHYTEMIQANPAYEFAGVYADFGISGFKESRPQFLKMMQDAKNGKIDLIITKSVSRFARNTAIVLKASRELKERNVGIFFELQNINTLTEAGELLLTILAAFAQAESESASESSKMAYLHRIENGEVVAYLERSYGYEKDENGEYRAKEPEASVIREIYDLVIQGVNCTNIAKVLNARNIQTVQGAEWTASTVFRIVENEIYKGDVLMQKTFIDGKRHQVQNRGEKAMYYAKDNHPPIVSEKIWEKAQRKLEDMRAERAEHSVIQEFTEENYPYMNHIFCAKCGWPLKPRVYSHGHRLSWDCSGQKRGTKKFCTGIHILDNDLRKMKIEGNRYFSETVDKYGEVHLKHVGERTWKNKHKKKKFNHKDLYPELNEENYPYYKRLYCARCGSRLGRYISHGTVRWICSSYKRKGQAKCPGVRIPDEIIKGWNLPDGKIYIMGKEDKNGEKHYSYTSESAL

SEQ ID NO: 25809 - protein, 537 aa, synthetic construct
MAKKVTTIPPTICRFTAAPINSTAKRKVAGYARVSTDHEDQLSSYEAQVDYYTNYIKSHDDWEFVDIYTDEGITATSTKKRAGFKQMIEDALAGKIDLIITKSVSRFARNTVDSLTNIRKLKENGIEVFFEKENIWTLDAKGELLLTIMSSLAQEEARNISENTTWGQRKRFADGRYSLNYRYFLGYDRKPGPDGGLVINEEQAKIVRDIYAAFLSGMSFYAIAKDLQARGIKPLRSETWHANTIQGILTNEKYRGDVLLQKYYTDDYLTKKLKRNHGEVQQYYIEDDHEAIIEPKVFDLVQAEIARRTKSGSRYSGVDIFASKIRCGQCGGWYGAKVWHSNDKYRRVVYRCNHKYGNGKTCDTPTFTEDEIKAMFVRAYNARIADLDRTAADIEVLIEIVNDTAALETERDGLAGELEIVTGMINDMIAENAHRAQDQDEYQRRYNAMVERYNAAEKRYTEVCADIENRHARYKLISHELDVLKENAEPLTEFDADIWGATVAEAVVYGPDDVRFIFKHEMDYTVNNANKKNEQTS

SEQ ID NO: 25810 - protein, 426 aa, synthetic construct
MGTIRKLEPGKPMLPRRKRVAAYCRVSRETERLLHSLSAQVSYYSALIQKNPEWEYAGVYVDEGISGTGTAARSEFQRLLADCEAGCVDIILTKSVSRFARNTVDLLETVRRLKTIGVEVRFEEQNISTLGNDGELMLTILASFAQEESVSQSRNIRWSKQKTAEKGEMTNTSVPYGYRYDEEDGGPVIIPEQAEVVRMIFRDYTVDGLTVYDITEKLNASNVPAQRGEHWQACTVRRMLRNINYTGNMLLGKYYSQDALNHRRIKNAGEQPMYFVEDSHQAIIDRETYDKAQAELDRCSALGRLANPNITCNHYTGKIICRGCGRPFGRCVNKMRGGTRIPVWSCKKPGGKCMTPGILESELDGMLAEQLGLAAFDPDRFSEQIDRIEVGLDDIITFFFRDGRVTTRQFIRRKKSPLMTRRKADG

SEQ ID NO: 25811 - protein, 602 aa, synthetic construct
MRTIKKLEPELPQIRKRRRVAAYARVSMESERLMHSLSAQVSYYSTLIQKNPEWEYAGVYADEGITGTKVSARPEFQRLVADCEAGLIDLVLVKSISRFARNTVDLLQIIRHLKEIGVEVRFEEQNISTFSNDGELMLTILASFAQEECVSISENVKWGTRKRFEQGIPNGQFRIFGYRWENDRLVIVPEEAAVVRRIFANFLAGKSRLETERELVAEGITTREGKRWVDSNIKVVLTNITYTGNMLFQKEFIEDPITKHRKKNRGELPQYYVENTHEAIIDKETFDYVQAEIARRKKLGALANKSLNITAFTGMVKCPHCGCSYMHSTRSDRGNFQEFWTCGNKKKKGSTCPVKGSVPERILEQETAAVLGLDAFDGKELRDRVDHISVPERRALVFHLKNGSEIIRHWVSTAKKDCWTDEYKDRQREWVHNFMARDDTKFSAFTTRMRCGVCGGPLRKATQTSATTLDGKQKYWRCVTAAKCGVRGIREEVLEEISAGLLGIADFDGDAFRELVDHIDVFPGGRLEFFFTDGSRQNAAYSTKRKGKPWTDEQRAKFSESVKKIYTPERRKAMSEHMKQVRSEKYWISTGKERRHGDDQKT

SEQ ID NO: 25812 - protein, 490 aa, synthetic construct
MTDKNLLVITPHRKEPGKQRIAAYCRVSSRSDEQLNSLANQIDFYRSRFENDDTVVFVGIYAEEGLSGTQAESRPQFMKMIEDCWSGLIDCIWTKSVSRFGRNTVDTLIYTRELRSLGIDVFFEKENIHSTDSSGKLMLTLMAAFAESESETMSENIKWGKRRRYEQGITGSITLNGMYGFRQNKGVVTVVEDEADLVRRIYKDFIDGYSYGEITDRLIADGVPTRMPGATWAKTTIQHIIRNEKYCGDCLFQKAFIANSITHQQVRNNGELPKYLVEDCLPAIVDKETWKLAQAVAARHTPHRQAPNERYPFTGKLFCGVCGKPYYYYHYTTTNKQPLAAYRCMSRKTQSAVEVPGQTYTPPHKATFNRNASPELIAYRERYCKPPKERPMLCTDVRIPIDLPQKAFCRAWNLIVAKKLRYQATLRSTVDNAEDILVRYRAEEMCLLIDEIGKLTEFSYPLMLKTLDKVVVNANGKLTFIFQSGIKITV

SEQ ID NO: 25813 - protein, 548 aa, synthetic construct
MANKTVKKIEATKPTLSAQYSTFTRKRKVAAYARVSTAKEEQENSFDAQVSYYTQKIQANPEWVFVEVYSDEGITGTNTKKREGFNRMIEDALAGKIDLILTKSVSRFARNTVDSLVTIRQLKEKGVEVFFEKENIYTLDAKGELLLTIMSSLAQEEARSISENTSWGRRKSFADGKVSLGYSNFLGYDKGPDGELVINEEQAKIVRRIYAEFLAGKTPGGIAKGLTADGIETPGHKKVWQASTVLNILKNEKYYGAAILQKQITVSYLTKEKRPNTGELPMYYIEKDHEPIVSPETFQMVQEEMRRRQEAGSNMQCVSIFSSRIICGDCSGYYGRKIWHSSTKYTAWHWHCNAKFQKRKYCETPTLKEESLEETFVEVFNGLIADKDEIIENYRLCIDAVTDDSEYRRQLEDLNNGCGEVQTLIRSLLMTYSRQDTAEDIHEKLQEYEERLDTMARLKQELDLKIAACAAKRVQITGFLNELMKHDAPLTKFDPLVWQAVINYATVNRDCTITFTFRDGTEKTVPIKNGVRPYTKRNKPQEVDGNDG

SEQ ID NO: 25814 - protein, 434 aa, synthetic construct
MEKTIVNIAPAAAETPRTKRVAAYARVSCGKDTMLHSLAAQIDYYRDYIIRNPEWRFAGVYADEAKTGTKDNREQFQLLLTECRNGNVDMVITKSISRFARNTVTLLETVRELQGLGVDVFFEEQNIYTLSAEGEVMLTLLASFAQAESLSVSDNCKWRIRKGFEEGRASTCTMLGYRLVDGEITLIEEEAKIAKRIFDLYLAGHGLQKIANMLNEEGQHSIYGNEWHTSTVRKVLTNEKYCGDLLLQKSYRENHLTKKMRPNTGELPQYFVEDDHPAIVSRETFAAVQKEIERRAEEKTQPVGSTSVFTGKIRCSCCGKNYRRKTTPYNIVWCCSTYNSKGKKYCPDSKVIPEETLKRAVTDILKTDGFSDEAFQMQVCTIEAHPGNLLRFIFTDGSTADYVWKDRSRSESWTDEMKAAAGRKTKERNASHGK

SEQ ID NO: 25815 - protein, 587 aa, synthetic construct
MRKINIIEPKVPQMPSRKMVAAYARVSMESERLQHSLSAQVSYYSSLIQQNPAWEYAGVYADDGITGTKTNDRTEFNRMIADCEAGKIDIILTKSISRFARNTVDLLNAVRHLKDLGISVQFEKEHIDSLSEDGELMLTLLASFAQEEVRSLSDNVKWGTRKRFEKGIPNGRFQIYGYRWDGDHLVVEPEEAKIVKLIYVNFLNGLSAESTEKQLEEMGVKSYKGQHFGNTSIRQILGNITYTGNLLFQKEYTVDPISKKSRKNQGELPQYWVENTHEAIIPMEVYQAVQEEKARRRELGVFANWSINTSCFTSKIKCGRCGKSYQRSNRKGRKDPDANYTVWICGTRRKTGNAQCQNKDIPEPMLKEACTAVLGLDEFDETVFSEQIDHIEIPAPYEMVFYFKDGRIVPHRWQSTMRKDCWTDERRAAKGRYVQEHQLGPNSSCFTSRIRCDQCGENYRRQRSRHKDGSFDSVWRCASSAKCSSPSIKEETLMALCAKAMGLDEFEETAFREQIACIHITAPYHLSIHFFDGHTFEAQWENKRKMPKHSEKRKQHMREVMIQKWRERHGESNDHSGDDQPVYGNAD

SEQ ID NO: 25816 - protein, 523 aa, synthetic construct
MARVTTIPATISRFTATPINEKKKRRTAAYARVSTDSEEQLTSYTAQVDYYTNYIKGRDDWEFVAVYTDEGITGTNTKHREGFKRMVADALDGKIDLIVTKSVSRFARNTVDSLTTVRQLKEKGVEIYFEKENIWTLDSKGELLITIMSSLAQEESRSISENCTWGQRKRFADGKVTVPFKRFLGYDRGPDGNLVLNPEEAVIVRRIYSMFLQGMTPYGIATQLTADEIKSPGGKDKWNSGAVRSILTNEKYKGDALLQKSYTVDFLTKKKKTNEGEIPQYYVEGNHEAIISPDVFEQVQRELERRKQGKGRHSGVHLFSGKIKCGQCGEWYGSKVWHSNSKYRRVIWQCNHKFDGDEKCATPHLTEEDIKTMFVSAVNQLISQKNAIITVLTASLDTAFDLTALKAEQAELESEMTVVSDLIQKCIYENAHVALDQAEYQKRYDGLTARFDAAKARYESLDETIRSKQSRRATIETFLETLAKADLVDKFDTALWCGLVDFVTVHSKDDVRFTFKNGQEILA

SEQ ID NO: 25817 - protein, 446 aa, synthetic construct
MPAAKEVSRVAKIIYQTMPGGRKKAGKKRVAAYARISCVKDAMLHSLSAQVSYFSDLIQRNPDWIFAGIYADEVTGTTKERKDFQRLLTDCRNGQIDMIIVKSLSRFARNTVTLLETVRELKALGVDVFFEEQNIHSMNGDGELMLSILASFAQEESRSVSENCKWRIRNDFQRGKPSFFRIYGYKMKNGRLEIVPEEAEVVRMIFRDYLDGMGRELISKKLNEAHIPPMISDQWWPSVITAMLKNECYVGDLRLQKTFVADHLQKKQLPNRGELPQYLVHDAHEPIIDRETFDAVQHLTAIRIAHYHPNRDASGRYPFSGILRCDQCGSYYRRKIASAGTPYSKPVWICTTYNMKGKRYCASKQIPERILLQMTASVLSLEEFDEEAFATVIERIHVTGPNSLRYVFRDGQEREAVWQDHSRRDSWTDDMRVQAAAHARRRYDHE

SEQ ID NO: 25818 - protein, 531 aa, synthetic construct
MSENYAASPRITVFPATLNRFTATPIAEKRKRRVAAYARVSTNSDEQKTSYEAQVSYYTDYISAKPDWRFVQVYADKGITGTSTKRRERFNDMIADALAGKIDLIITKSVSRFARNTVDSLTTIRLLKEHGVEVYFEEQNIYTLDSKGELLLTIMSSLAQEESRSISENVTWGQRKRFADGKVSMPYKQFLGYRKGENGEPEIVPEEAETVRRIYRLFLDGMTPYKIKLTLESEGVLSPSGRSTWQPRTILSILTNEKYKGDALLQKTFCTDFLTKKMKVNEGEVPQYYVENSHPAIVSDEVYEEVQLELERRRKLGRQHNSQHCFSGRIYCGCCGSVYGSKVWHSNDKYRRTVWQCNARFVKGTGCQSPHLSEPMIEQKFLAAFNQLLTQRDFIADDMQAILQHLTDTAELNAEKEALQVEMGIVSELIRQAVGQNASAALDQVEYNRKYNSLTDRFHKAADRVKGIEAECARRKGQRREIETFRDAILANDKPVVVFSTEIWNATIDRMTVNLDGSVKVAFRNGIEMTV

SEQ ID NO: 25819 - protein, 668 aa, synthetic construct
MAYAKTKKHLKIWTKKKAALYVRVSTRYQVDKDSLPFQRKKLKEYCKFLGLEDYVIFEDDGYSAKNTERPHFQEMMSRVRSGEFSHLIVWKVDRVSRNLLDFAAMYQELKDHKVTFISMNEQFDTSTAIGEAMLKIILIFAELERNMTSERVTGIMLDRAEQGLWNGARMPVGYRWNDEAKFPEPDPEEVKIVQLIFDKYEEWKSSLKISRYLNNNNFKSKRGGQWTSKLIHDIIRNPFYIGTYRYNMRESGRGPLKPESEWIVREDNHPAIIKKAQFDRCNKIMDQNGSSRDTSDLRARKYVHTFSGHLVCGKCGSNMIASKDRARANGWRPSMYRCAQRSRMLDCDNSRTINESYIGPFVFNYIANLARVQKNFKNITTVEKLEKELLKGETFDGVAGILPEGLNLTFQALSFRQVGNGTYIPDIDFLGDSDGTSGRDQIELLKSEIEKSKNAVARLTDVYLFDPDSMTKEEFATKKKELAKKIEGMERQLADLLDDSGSDDLADMSFIKKASAFLVAQRIVSKSFVDYVGMAQELDNEILKDFIDQVVDQIVVLDGRVQSITFINGLKHEFRYTAPAELPVCKKCGGRIGSTCGCRTRTFDFSGKRYQRIKVGDPCDMLHGKKNPVCPECFAQEGRWHHWNCKIEACPICGERLAECEHGPNGKN

SEQ ID NO: 25820 - protein, 538 aa, synthetic construct
MPEALNAVIYARYSSDRQTEQSIEGQLRECYAFAKANDIAVIDTYIDRAISGKTDNRPAFQKMIEDSAKRQFQAVIVYRLDRFTRNRYDSAIYKARLKKNGVKVLSAMENLNGSPESIIMESLLEGMAEYYSVELSQKITRGMRENALKGKALGGQRVLGYKVNSDCYFEIDETTAPVVVDIFKLYSSGKTVKEICDILNARGVKTARGGAFNKNSLHTILTNKKYIGIYKTKYGEIVGGIPAIIDKELFEMVALRMEQNKKAPARAKAEINYLLSTKLFCGKCRSAMVGESGTSKTGKKYYYYACVKKKREKACDKSNVKKDWIEDLVIQRTVTDILKDDVIEKIADRLVELQKAEAAQSGTMLYLENSLAEIQVSIKNIMTAIEKGIITESTKTRLTELEDEKRNVEIEIAKESIARRIISREQIIYWISSFKDGDITSEKYRQQLIDTFVHAVFVYDDKIVITYNYSGENNTATISDLDLSSPPRQNNTMRSSAAASGVRSTDGVVFPFHTEPAAPGLISGIFFAYKSWERADQL

SEQ ID NO: 25821 - protein, 569 aa, synthetic construct
MSSVDKIAVVYARYSSHGQTEQSIEGQIAAAQKYAEQHGYTIIHVYADRAMTGRNDDREQFQKMLSDTAMHQFGVILLWKIDRFGRNREEIAFNRYRCKKNGVRVERVAEDVPDGPEGVILDSVLEGMAEYYSLQLAQNVRRGQRESAKKSMSIGGNKMLGYIVNPETKRYESDPKTASYVTEIFKRYANGETISEIVTWLNAQGIRTTRGSEFTVNSLHRLLKNEKYTGVYIFHDIRNEGGMPALTDRATFDKVQEMLKVNRRAPARVWSKTEYLLTDKLFCGHCGAMMVGESGHGRNGIKHSYYTCLNRKKKKSCDKKPVRQDVIEPLVLRAIGKLLENPATLENIADQVWAAYERSDTSGDTIKALDKQIADVDRALSNVMKAIEMGIINEMTKTRMDELTDQKQALSAARAEAGLAGGFKLTRDMILFFLQEIAALDMADRDSQKRLIKTFVNAIYLYDDHFDIAFNYTDNGKVVVRMQEINDAVRGEMFGRCAQCPTKRVVASILPRLFLCFSTVKCNRASCILQCCPDRVLFPCALAICGGSGYNSLVTAPLHDTQKTEYQSQ

SEQ ID NO: 25822 - protein, 505 aa, synthetic construct
MRVVLYMRYSSDRQTEQSIEGQNRVCTAFCEQQGYEIVDRYIDRATSAFKDTDKRTEFQRMIRDSEKQLWEGIVVYKLDRFARNRYDSATYKARLKKNGVRVISATENISDNPEGVILEAVLEGMAEFYSKELSQKITRGMFESANKCHSIGGHIPLGYKIENKKLVIDEAGAAIVREAFDLYANGATVAEICETFNTKGYRTAKNAEFNKNSFRSMFKNERYIGIYKYKDLRIEGGVPAIVDKDTFAIVQKKLSKNAEAPSRGKAKIDYLLSQKLFCGHCGSLMTGESGTGKGGTTYFYYTCGKRKREHTCDKKPLKKDFIERAVVEDALTLLTPETIDELADIAVNESIREMEENSIIPALKDQLHDTERSINNLVKMVEKGVESDTIADRLKELEKEKRAIEKRLVVAQDDYVLLEKDHIVWWLSEFCNGDIEDEEFRRHIIDLLVNSVTVWDEPDGWYKITSVYNLTSNKTKTFRCSDLSGQAPPKVKIRTLSSMVIRSDF

SEQ ID NO: 25823 - protein, 514 aa, synthetic construct
MPKKNPSGGKRLVAYYRYSGGSHQTEQSIEGQRRDCETYARIHGMVILHEYIDRHISGKTDDRPEFQQMIADAGKGMFDYVICWKTDRIARSRYDSIIYKKKLRDNGVELLYAAEANVEGSGGIIVEGLMEALAEYYSAELAEKVRRGMRESALKGKAIGSSRPLGLTVDKDKKYIIDPAGAAAVRYIFEQYAAGAASSAIVAHLNEQGLCTSRGNPFNKSSVVRIIQNEVYRGVYVSPKFDVRIEGAVPAIIDDDLWERAQKMFIRNRQSRSPRNDRADYILSGKLFCGECGTAMKGVSGHSSNGEVYFYYNCPCKDCHRRNIPKDELEGLVIRTVCNDVLQPDVMDRIADSVIEAQTAELNQPNPEKEALQHELADVQRKAKNLLSALENGTAGAMLTNRLAELEQRADTLSYQLSSLESEPKFPVFSKEEVLYLLEQFLIAPSEKTKAYRRRLIDTFVSKIEVSNTELTIYFNIAEEDCGKMKKAPQSNQPEGCSTEKQMVRVARIELTAS

SEQ ID NO: 25824 - protein, 516 aa, synthetic construct
MPKTEEKQAAKAVIYARYSSDRQREESIEGQLRVCEDYARRNNITILHTYADRAMTGRSDQRLEFQMMIRDAATMAFNVILVYKLNRFARNRYDSAKYKHKLKKYGVKVVSAMENIADDPSGILLESVIEGMAEYYSAELSENVLRGMTQNALEGKWPGGVIPLGYKLDKGGRLIINEEKAPIVRMIYQMFLDGMSVARIERKLNDKKYTTDAGKVFSRSRVYYILHNERYIGTFQWKDIKKEGIIPPIISKEAFHAVQERINAMKSSSYRTNNNYLLAGKAFCASCGAKVSGTSGKSQNGNKYCYYGCSHHHRSARYEYCETKNIRADVLEKLVCDKTHEILSSKKAIKEIARQAVKLRPRDESELEIRAIKNHISSCQKKIDNCIKAIENGVMSNALVESLNENERTLDVLKEKLAKASLMQGSGLLTEEKIQFFFETIREKAKETEKYNDILLTSLVRAVYICNEYVEIQYNYAEQLPILTNPVRIESCSYKCTNGGTIWIRTKDLFDVNEAL

SEQ ID NO: 25825 - protein, 545 aa, synthetic construct
MDIFAVRQQLKHANIREIPLRVTFYARVSTDSEEQALSNAHQIKYFTDKIAANPNWTLVEGYVDEGISGISTKSRISFQRMIEDAKAGRFDLIITKEISRFARNTVDSISYTRDLLRNGVAVIFENDGINTIEEDSEFRLTIMAGVAQDELRKLSSRVRFGHKQSIRQGHVLGTDNMYGYHKSGAKLTVDERTAPLVRKIFELYASGNHSLREVARLVGQEGLRNRNGGELSTRTLRNILSNPKYKGYYVGGKVEIVDMFTKKQKFLPEDKWVTFKDDGSRIPALVSEKLWEKANAVLSARSEHVKARQGKMNMQNLFTGVIRCGTCGGVYYKKENILRDGVRRTRWSCSTKLKGGRAACDSPDVYEEDLIEVIRALLLSDELDIERAAGQYEALLQEQRRDGEAEAQRAELNREMEKLSKQKTRLVQMNLDGAITDAELVELMRENRALLDAYAERLQALPEAETRAADIRAMVTELRQALQAARGDVFRALDRRFVERYIDRIEVRREGEGEVTVTVYPKFGGKAAARIGKKEVRCEDIFLTM

SEQ ID NO: 25826 - protein, 560 aa, synthetic construct
MQKEKIKVYTYTRVSTAMQVDGYSLDAQKAKMKAYADYNDYEIAGEYEDAGKSGKSIEGRAQFGQMMEDIKSGKDGVSYVLVFKLSRFGRNAADVLSSLQVMQDFGVNLVCVEDGIDSSKDAGKLMISVLSAVAEIERENIRVQTMEGRIQKAREGRWNGGFAPYGYQLVDGKLIINEEEAEAIRVIYDQYVHTDIGANGIAKYLENHGIRKIPRQNGKNPLFDAHLIRLILKNPVYCGKIAYGRRKTEKVRGTRNEYKLVEQDNYLLADGQHEAIVSEEVWQAAQVKLLAQAKKYEHVNRGKDEHVHLLSGIVKCPVCGAGMYGNKSIKHKADGTKYKDFYYYGCKHRTMIRGHKCDYKKQIREELLDDAVAEVIVKLVSNPKFAAMMQEKINMKVDTAAIDQEIANYEKQLRQHYSIKSKLAEEIDSLDPDDRHYVRRKADLDDRLYRMYDKIEDTESSLIAARAKKQAIEAEKLTGDNIYKVLIYFEKLYGVMNDVERRQLIEALISEIQIYPERQPNGQWLKSIKFKLPIIEEDMSISLDNEEQVETVVLMSRVKD

SEQ ID NO: 25827 - protein, 520 aa, synthetic construct
MGNVMVIPAKRQVGNNIKKAEKPKLRVAAYCRVSTDSDEQATSYEAQIEHYTEYISKNPEWVLAGIFADDGITGTNTKKRDEFNRMIEECHDGNIDMIITKSISRFARNTLDCLKYIRELKDLNISVFFEKESINTMDAKGEVLLTIMASLAQQESQSLSQNVKLGIQYRYQQGKVQINHNRFLGYTKDADGNLVIEPEQAEIVRRIYREYLQGLSMDKIAAGLEADGILTGAGKTKWHTSTINKILRNEKYIGDALLQKTYTTDFLTKKRIKNNGTVPQYYVEGDHEPIIPKDIFLLVQEELVRRRVVHTSDNGKRHCYSCKHCFSQIVICNECGEFFRRVHWNNRGCKSIVWRCCSRLEATGHACHSRTVNETLLEQVVIDAINRVLCQKDDFLQTLRANIATVVLQGDVLSPEVIDERLSKLQKELLKKINQKDDYDAIADEILRLRDQRRQAEVDSVIKDEQMKQIRGLQDFVKNQPSTITEFDETLVSRLIAKITVFDDHFTVEFKSGITINIEA

SEQ ID NO: 25828 - protein, 519 aa, synthetic construct
MKRVTRLGGDVKKKSTAKVLRVAAYCRVSTGSDAQLESLDAQKTHYENYINGREDWEFAGLYFDEGISGTKKEKRPALLQMIADCKAGKIDFVITKSISRFARNTTDCLEMVRKLLELDIPIYFEKENLNTSSMESELFLAILSSMAEGESTSISENNKWSIQRRFKNGTFKLSYPPYGYNWDGEQMVINPEQAETVRWIFKQVLSGKGTHAISDELNANSIPTKKGGRWTPTTVRGMVSNEKYTGDVIFQKTYTDSQFNRHINYGQKDRYAMSDHHEAIISREVFEAANALIAQRGKEKGIIKGSEKYQSRYCFSGRIVCGECGDTFKRRIHSTTTHKYAAWCCNTHIEDKSRCSIKYIRDDTVKAAFVTMINKLIFAHSIVLKPYVETLQNGCTNAPMRRIQQIQTLLLENAEQRETLTKLMAQGYIDQILYNEENNTLLSQADRYRQEMDTLSKAIGGDGAHVTAAKELLRYVEKAAMLTDFDEALFENTVTCIKVLSREEIAFELKCGLTLKERM

SEQ ID NO: 25829 - protein, 549 aa, synthetic construct
MESSDVMKIAAYCRVSTEKEAQIDSLEKQIEFFNEFTKKNGYELYKLYADEGISGKQIKHRKQFQQMMIDAKAKKFDKVVVKDVSRFARNTVDLLQSVRELKSYGVQVDFLNNGEVMEGGSEFILTILGAMAQQESANMSKRVKFGKDITAKKGRVPNLVFGYDKIPDERYTLKINEEEAKIVKEIFESYVYKGIGTTKIAWNLNDRGIRTKKTKSKWVQTSIVRMLKNPIYTGRVTNKKSEVTDFITGTRKELPEEEWIVVEKPEMRIISDELFNRAQELLEQRSNEFKLNNKREKTEYVFSTLIYCKHCGYSFRRIKRKYTADGPEYIRWVCSGRNSMGVNHCPNTTVIDEEELLNAIKIYLKSIIKNKKDFMKAVEKEFEKITKLRENNERSEESLLKEIEKVTVKKQKYMEMFQNEIINIQELKKYTNPLNEDIARLERELKLITSEIKEKDVLEKELNKTIKTVDDILNNQTITNAMLKTIIDVIEVDSDSNVEVRLKLLNEIGTNEPVITRFEDIYQSGEDTENKDANNNEENSTALKSINST

SEQ ID NO: 25830 - protein, 492 aa, synthetic construct
MMYLRKSRAEEGQSTEEVLSKHRAALEELADRLGLPVDGVYEEVASGEKLYARPEMLKLLERIRAGEVEAVLCMDIDRLGRGGMADQGTILDAFRESGTLIITPEKTYDLTNDVDIEMTEFKAFFARAEWRAIRKRMRRGLMQTIEAGGYTANAPYGYRRCRIGKLPSLEVIPEEARFVRYIYERYLAGIGAQTIAQELNAMGSTPRRGAEWSRNTVRHVLRNPTFAGKVAWNRVKHYRPGAHGKETHHVVYTPVGEWLMVDGVHEAIIPWSTWLEAQERRKQRYIPPSNTGQRANPFAGIIRCSKCGNNMQRMGTNKGEPYLLCTTKGCTAGAKFEYVEERMVELLYDELARLRLLIDSGAAPNVDALEAALAAAQRELERVQARIPRLYEFLEDGTYDRATFRSRLDAAEKELSELASKRTDLERQIDERRRSDPRKVAAALENLVQLYPTMSPADKNSALKALGVEVTYTKEKKTKPRDFTLELQLRDF

SEQ ID NO: 25831 - protein, 519 aa, synthetic construct
MAANVTVIPPRAVRPDTLRVAAYCRVSSDSADQLHSYAAQIQYYTDLIQNHDGWDLVDVYADEGITGTRMDKREDFNRLLADCRKGKIDKVLIKSISRFARNTRDCLASLRELFRLGVSVLFEKENIDTGTLTTELMVSVSSSLAQQESVSISQNQQMSYQRRMERGEFITCTAPYGYRMPDGKNLVIEESEAREVRWMFQAYLDGNSVKRIAEEMNRKEVHNSWKRGVWYERLIRKMLSNEKYVGDSLCQKTYTANTFPFVKKTNHGEVDQYYIENTHPAIISRETFDKVQNLLKKRAERRPSSRQRTPLSLKVICGNCGSVYMRRVNKSGHTTWVCRKHDRNAIDCPNGRVPETELYGAFVRMYNKLKRNTGVVLLPAIKQMEELRDVIQRGNPAMLAVNKAIAKASEQSYNISKLQTAGLLDTDACTAKFNEISAQLAKLRAERRRLLENDDIDDAIDALQETVDLVRHGPERLMEFDEGLFLSLVERIVVESQTCVRFRLQGGIELKELLKEIGR

SEQ ID NO: 25832 - protein, 543 aa, synthetic construct
MEQALERRVRIIPATKKVTDPRTSQHGKQRVAAYCRVSTNNKEQINSYEAQKAYYTQKIEENPDWELAGIFADKGLSGASMKKRDNFNKMIAACKRGRIDTILTKSLSRFARNTVDCLETVRMLRARGIGVIFEKENINTLTESSEFLITLFSGFAQAEIESLSKNVTWGKEKSRAAGNVPFQYKKLLGYRKGEDEKPEIDPDEAKTVLRIYRRYLDGCSLSQIKQELEADRIPTAQAVQRWSYQVIHNILTNERYIGDAMLGKTFSTGCINGQVKQNTGERLQSYVENNHPAIIPREMFYRVQEEMARRASKRKVMQRHGKTELGKYSAKYALSELLVCGECGTPYKRCTWARNGKKRIVWRCISRLEFGTKYCHSSPTLDEEKLHQAILEALNEFAQADSEVKEDMLNFTQLVWAGQEAEGTSLISLKQRLGDITAEQALLLDRVLENMDDPDLNAQLKALMDEKQAVQDQIQAMEQEAAQSENRMSRMAELREWMAKLGVNTEYNDEQVRMAVERITVVDAETIHIKFRYPGLEMDKKLS

SEQ ID NO: 25833 - protein, 585 aa, synthetic construct
MAQVEIITANLKCEDNTTVANKKKRVCAYGRVSTDDEEQLTSYNSQIKYYTEKIKSNPDWEFVGIYADEGISGTQVKNRTEFQRMIDDAMNGKIDIILAKSISRFARNTVDTLKYVRDLRDRKVDIYFEKENIHTLDLDSEVFLTVYSAFAQAESESTSQNVKLGLKAMMKRGEYVGSPDCYGFDWNKETKQLDINEEQAEVVRMIFNWYVSGMGCRRIANKLEEMKIPSYTGARWSTSSVSNMIHQEKYVGDLLQQKSYTVSPITHKSVLNKGEKDKYYIKDHHEAIISRDIWDKAQEIASKRSKSMTMKGYTSRETSKYAFSSKIKCAFCGTNFCRRHSSYSKKNPKYNIYWTCIKKREHSDACPDSVGLSETKLEQVFVMLYNNIVKNKHKTKEVLLQAIKEVVNDNDYQDKLNDLNNQKTTIEQRLSKIIDMELDNTDIDRKELFMKKEKELLDELNNIKNKIRYYEELLAENKGLSKQLKSIDDYFNEPRELKQFKREVFEKMIECIIVGDYDEDGNKLPRVARFVLKTGKEYKFTIPPKNNSKNDKNELVPFDTGNVTLFNCSCHTNFSSFTCSFNFIL

SEQ ID NO: 25834 - protein, 545 aa, synthetic construct
MDIFAVRQQLKHANIREIPLRVTFYARVSTDSEEQALSNAHQIKYFTDKIAANPNWTLVEGYVDEGISGISTKSRISFQRMIEDAKAGRFDLIITKEISRFARNTVDSISYTRDLLRNGVAVIFENDGINTIEEDSEFRLTIMAGVAQDELRKLSSRVRFGHKQSIRQGHVLGTDNMYGYHKSGAKLTVDERTAPLVRKVFELYASGNHSLREVARLVGQEGLRNRNGGELSTRTLRNILSNPKYKGYYVGGKVEIVDMFTKKQKFLPADKWVTFKDDGSRIPALVSEELWEKANAVLSARSEHVKARQGKMNMQNLFTGVIRCEACGGVYYKKENILRDGVRRTRWSCSTKLKGGRAACDSPDVYEEDLIEVIRALLLSDELDIERAAGQYEALLQEQRRDGEAEAQRAELNREIEKLSKQKTRLVQMNLDGAITDAELVELMRENRALLDAYAERLQALPEAETRAADIRAMVTELRQALQAARGDVFRALDRRFVERYIDRIEVRREGEGEVTVTVYPKFGGKAAARIGKNEVRCEDIFLTM

SEQ ID NO: 25835 - protein, 448 aa, synthetic construct
MERIIQKVTPPARKKAPKLKRVAAYARVSSGREAPLHSLSAQISQYSGMIQKTPGWQYAGVYADEALTGTKDSRGEFQRLLADCRAGKIDMIITKSVSRFARNTVTTLRTIRELRLMGVDVFFEEQNIHTMGEDGELLLTLLAAYAEEEARSVSENQKWRIKSNYEQGLPWSITMYGYRQVNGRLEVVPEEAEIIRLAADLYLEGYGRYKLEDAFAAVNIKGRHGANMGGNSIVDLICNEKIVGDMLLQKTFVVDPITKELRKNNGEKPQYFVEGSHEGILDRETYEKVLAERARRAAAYKPRSGSYERNRFPFSSKVRCGKCGKCFTRKTVAPKTPYEKQVWICRTFNQKGKAHCDAKQIPEEILKRVSAEAMGLPEFDAAAFATKVEEIQVPENGVLVFVFYDGHTVTKTWDNPSRRHSWNPENRQRARELALRQAAERRLAKCQQ

SEQ ID NO: 25836 - protein, 537 aa, synthetic construct
MPAVTAARVTVIPAKKDRLPINVLSNEARKLRVAAYARVSTNNEEQLTSYEAQVDYYTRYIQSKDEWQFVEVYTDEGISATNTKKRDGFNRMVADALAGKIDLIITKSISRFARNTVDTLTTVRKLKEKGIEVFFEKENIRTLDGKGELLITIMSSLAQEESRSISENVTWGQRKRFADGKVSLPYRRFLGYEKGPDGLPVIVESEAVIIRLIYRLFLYGKSPSAIATYLTDEGIPTPGGKKVWRAKVVESILTNEKYKGDALLQKKFTVDFLTKKQKVNEGEVPQYYVTNSHPAIIEPELFNLVQYELKTRKTDGRFTSCLHPFSGRIICGECGGIYGSKVWHSNTENRSLVWQCNEKYRGQHCSTPHLTEGEIKAAFLAAFNIVLGSRDEIIEAYEEVIAALTDTADLDAEQETLENESEVVLGLIQKIISENAQTAMDQEEYNRRYDAYSERFEAARKRLAEIAELRQERNAKKTRIRLFMENMNNHPELVQSFDEELWYSTVDYVTVYEDKRLVFTFRDGRQVEILAELWRAA

SEQ ID NO: 25837 - protein, 449 aa, synthetic construct
MSAPVVRAAGYIRVSTAEQALRGLSLEAQEAEIRRWAAEHHVRLENIYVDKGITARKQLHRRAAFMQMMQAVDAGQIDLILVMRLDRWFRNVYDYHKMMNEHLIPHGVNWCAVKEDYDTTTTNGRLMINLRLSIAEQECDTDADRIRDVQQNMVAKGRWPFGAAPLGYRIEEKRLVKDPHTQPQVEFFFRHMLANGSLRGALFAMNDRFGTSYEYRRAQDLSRKSVYYGVYGENQSFCPAYITLEEHQRIRSLAEKNVRVWSSPTAWPHLFSGLLICDDCHRRLNAQTIRRPSGVYTTYRCSHSTDNHGCANNRSISEKVIEEYLLNYVREDLAQYIVQMEVSQKKAAALPDNTAKIRAKQERVKTLFINNFIDLEEYKRRIQELEGQIIRRPPSEKTKDVSKLKQLLEDGALKMYPTLTREEKRAFWRGFLKELHIYRGTIQGPPIFL

SEQ ID NO: 25838 - protein, 559 aa, synthetic construct
MKAKKTDNGKITALYERLSRDDDLTGDSNSIINQKKLLEDYAREHGFTNCVHFTDDGWSGANFERPNWKRMIAGIESGEIGYVLVKDLSRVGRDYLQVGFYTEVMFKERGVRFIAIANGVDSDKRESSEFAPFLNIMNEWYVRDSSRKITSVLHARGMSGKHTNSHCIYGYKKDPNDKDHWIIDEEAAEVVRRIYRMALESKGPYEIARILALEKVERPSYYLAQRGVGKHQSNFNPAERYTWRGGTVADILSKPEYMGHTVNFRTYKESYKDKRSRMTPKEDLVIFKNTQEAIIDKETWERVQSLRKTIRRTDTIGAANPLTGLMFCADCGAKMYNHRGGAGLARDWAGRPTGKKRPDRDEYNCSRYDLGNQHFDDYCTTHLIRTAVVNELLLEAIKEVCDYAQNNEAEFMAQVCSASEDRQAKAAKAIRQRKQRSEKRTDELSRLIRKLYEDNVNGRLSDKLFEQMLHDFEAELEGLTDSITQDQQELDRISRETVNAEKFLALVKKYTGFAELTPAMINEFVEKILVHQAEGKSGLTFAGIALHNGYFPKGDIRLP

SEQ ID NO: 25839 - protein, 522 aa, synthetic construct
MGNVMVIPAKRQVGNTVKQSEQKKLRVAAYCRVSTDSDEQESSYEAQVTHYTEYIQKNPDWELAGIFADDGISGTNTKKRDEFNRMIDECMSGNIDMIITKSISRFARNTLDCLQYIRQLKDKNIPVYFEKESINTLDAKGEVLLTIMASLAQQESQSMSENIKLGLQYRYQQGKVQVNHNRFLGYTKDENGNLVIDPEQAEIVKRIYREYLEGSSMDKIASGLMADGILTGAGKEKWHTSTINKILRNEKYMGDALLQKTYTTDFLTKKRIKNNGTVPQYYVEGDHEAIIPKDLFMQVQAELVRRRVVHVSPTGKKRSFSCNHCFAQMVFCGDCGELYRRVHWNNHGCKSIVWRCISRLEPGSADTNCTNRTVNELLLQEVTVTAINQILTERGTFLKQLQANIAKAVVSADTLSPDGIQARLEELQKELIKKANNKQDYDAIADEILRLREQKEQSEVDSHHREEAMNRIKELQDFISKQKTDITEFDEALVKKLIEKITVFADHFTVEFKSGITIDIEA

SEQ ID NO: 25840 - protein, 519 aa, synthetic construct
MKKVTKIAEVANTKVKLKKIRVAAYCRVSTDSDAQLESLEAQKTHYETYITSRDDWEFAGLYYDEGITGTKKDKRPELMRLIGDCKAGRIDFIVTKSISRFSRNTTDCLELVRKLLDLNIPIFFEKENINTGSMESELFLAILSGMAESESVSISENSKWSIQKSFENGTFKCSYPPYGYDWDGEQMVINPEQAAVVKEIFASLLSGKGTHAIADDLNRRGVSSKRGGRWTATTIRGMLSNEKYVGDCLFQKTYSDSQFVRHNNHGEQTQYMVTDHHEPIISRDDFEAARIFISQRASEKGVTKGTDKYQNRYAFSGKIICGECGDTFKRRIHSCTDHKYIAWCCNTHIKDKDRCHMLFVKDDALKQAFTTMLNKLIFSHRQILKPYLESLKTSSSDDSLHRIQQIQTLLAQNTEKRETLTMLMTQGIIDPVLYSQETNELLSQADSFRDEIEALKNEVSGDVNKVTETTALIHFAEKSAMLQEFDKDLFDRYVKRIIVHSRNDIRFELKCGLTLRERK

SEQ ID NO: 25841 - protein, 567 aa, synthetic construct
MQSKNKNQIGITALYCRLSRDDGTESESNSIGNQKKLLSQKAKEMGLTDTKYYVDDGYTGTNFNRPGFQQLIDDIEIGLVSAVMVKDLSRLGRDYVSVGNYTDSYFPEHNVRFIAVNDAIDSDEGESEIAPFKNILNEMYARDISKKIRSSHRLRGSMGEPLSQPPYGYTKSLENKKKWIIDPEAATVVKSIFKMCLDGKGNETIARELQENKVLIPMAYWRSKGLNRGGKKTQTNPYKWCKTTVQKILSQQEYCGDIINFKTYSKSFKNKTRYENSKENWAVFKDVNEPIIDRETFETVQKFISKTKRRAPKKENGERSIFNGLIYCGDCHSKMRYHTSTSNKEIHYFTCSDNKVDYRGNCPGRHYVRADALEEVVKLELRRLVEILEIDEPYFAQLLLRKNDEEREKDKKFLETELQKAIARSNTVSQLYEKLYEDNVIGKVSDEWFVELSHKYEKERMDLKAKIADTRHQIEELKNTNSEYGKFISAIRRFMQMDNLTSPLLRELIDHIDIFETEGTGKSRTQRIVIYYRFIGYIELPNTAKQTHIADTRKGVAVEYITEQFTA

SEQ ID NO: 25842 - protein, 479 aa, synthetic construct
MRGVIYARYSPGPHQTEQSIEGQVADCQQYAEEHGIDIIEIYADRHVSGKSVVGRDEFQRMLRDAEKGRFDCVLVWKIDRFGRDRQDIAMGKMALKRAGVKLMYARESVPEGPEGIILESVLEGLAEYYSADLRQKVIRGMKETAKKGQYCGQSLPIGYKVDAERHIVVDEREAAVVREAFKLHIAGGQIRDIVQLFADRGIMGRRGKPVSNAVVYRMLRNEKYLGEFYIQDVKLNVEPIIDQATFLEAARHFKTSRNNAAGRAKVNYLLSCKMFCGYCGSMISAEAGTGKLGKVYRYYKCGDKKRGKKCELKPFPKDHLEDAIILATVNDMLTDEMIEKLTVRILEVQEQENADDPVVGLRRRLDSNKKRQRNLLDAIEEGGARGLVSRLAALEEEEERLVLEIQRAEIKRPRLTHEVVEAWLRSFRVGDVTDDDFRARLVDTFIARVELRNDEALIFYNIREKGPHSRVRVRPEWWT

SEQ ID NO: 25843 - protein, 501 aa, synthetic construct
MQRAVIYARYSPGPNQTEQSIEGQVRECTKYAELHDLRIVGTYIDRKISGKTDNRREFQRMIDDSEKHIFDIIILYHTDRFARNRYDSAIYKHKLKENGVELRYATTDIPKGPEGIILESIMEGWAEYYSAELSRKIKRGMRESALKCHSTGAGRCLGYRTAEDKSLVIEPEGAKAVQTVFDMYIKGKSHADICRYLNDCGFRTAQGKLFNKNSVTHIIRNKRYIGVYTYDDITIEDGIPAIISKDTFHLAQLEAARRKTAKRPKEPKAEYLLSGKAFCGHCQKPLVGVSGTGKSGNKWYYYYCQESRAKRGCTKKPVKRDWLEREVVKRTVAEVLQPEVIQHIAKKCYDLQMEYRQDNSDVLFYELKLKDVRKAIKNTMHAIESGVKTKTLPARLQELENEEEALEAELAIAKASDFVITADQIEFLLTQFAEPWECESEEEYHRRIIKCFVHKVFLFDDKLLIYYNVSRDGKTREQSEAELLEEALGEGFDKRSSGSTK

SEQ ID NO: 25844 - protein, 544 aa, synthetic construct
MMQTLAQGEMRVVVIPAKSSEENKQAAKCLRVAAYCRVSTDDEEQKTSYEAQIGYYTEKINQNPEWQMAGIFADEGISGTQAKKRPEFLKMIRLCRQRKIDIILTKSLSRFARNTVDSLGYIRELRALGIAVISEKENINTLTAESEMLITIMSCFAQAESESISKNVSWGVRQSFKNGNVPMQYARLLGYRKGHDGNAEIIPEEAEVVKEIYRCYLDGMSMNLIADRLNEKGLTTKGGSSPYRKTVVQRILTNEKYTGDALLQKTYVTDCITKKTRKNNGELPMYLVKNHHEPIISRTDFNRVQEEMARRSAKRTIADKLTKTGQGKYSAKYALSELLICGECGEHYRRVTWTAKGFKEIKWRCVSRIQYGKKKCHSSPTVDEQAFHRAIVSAINEFCEVKDDVAKALRESIIEALDQNQNGSVHAAQQRIDELARNMDELIKLATVPETAENAMSDIAKFSEEMKMLREFIETEKAKQAATQRGSDEVNTILERLGQEDFTLIEYDDVAARQLIEKITVASKDAITVRFKGGFEIRKDLNGN

SEQ ID NO: 25845 - protein, 501 aa, synthetic construct
MAEITIIPAKNHADEIVRTAAYARVSSDSEDQLNSFAAQIRYYTELLQNSTDAVFVDMYADQGITGTSAAKRTEFQRLMSDCRKGKIDRILTKSISRFARNTKDSLEAVRELKTLGISVYFEKENIDTGEISSEMMLAIYSQFAQEESMSISRNVRMGFQKRMADGSYVPSAVPFGYIRENGKFVIDKEKAEIVRGIFSDYLNGVSAEWLAEKYRVKLATVKYVLTNEKYTGDSIFHKWYTTDTLPFDCRENRGERDKYYVSETHPAIISREVFQSVQRLIERKGRAHKGKTTQSYPLRKKIYCGECGTLYKRKERGSRVCWVCRNHDSSADKCSAKQIDEREIYGAFIVMFNKLLQNYKVILVPLQRQIQELFNLKMRENAQIVQLRKELAESREQAYLIAGLRSKGILDAAYYTEKAAALEKNIDSLQKRLDAFEEDDENGRILGKFRKLIGIFERAETITEFDEIKFGQIVEKITVLSESKIRFELIGGIGFVEQIMR

SEQ ID NO: 25846 - protein, 529 aa, synthetic construct
MSKYCIYLRKSRADLEAEAHGEGETLSRHKTALLELARRMGITISATYEEIVSGETIAARPQMQRLLSEVGAGEWDGVLVMEIERLARGDTMDQGLVAQTFKYSGTKIITPLKTFDPQNEFDEEYFEFGLFMARREFTTTNRRLVRGREASAKEGKYVGSVPPYGYRKVKIPNDKGFTLEIIEEQAKVVRMIFEWYAEGAEVNGQKKRIGPYSIAVRLNELGIKSVAGKDYWTIYGVQHMLINPVYIGKIRWGYRKVKKTVTPEGTKKKSREFAQDGDYIVVDGLHEPILSEELFYKVQDLIAANPPTPIKYRHKNINPFAGLIFCAKCGHCMNYRRGYGRQPDYIGCYTAGCDNKASRFDLIEQRVLSILNSWVKDYSVDKAQIKHEVDLNAELSNAISLAEKEIEALQGQLDNVYSFFERGTYTEKIFKQRSSAIEQQIMEIGEKIDRLKAEHQQVLERQNVQAEFVPSIKHLLEIYDTLEPVEKNKWLKQIIDRIVYEKNADGKYHNVDPGDFTIGILPRLPKKGS

SEQ ID NO: 25847 - protein, 519 aa, synthetic construct
MLAMYAVYLRKSRADLEAEAMGQGETLSRHRAALLDYAARRGLEIGAVYEEIISGESIDARPKMKQLLREVEQGRWAGVLCMDIDRLARGNSADQARVSNTFRISGTLIITPSKVYDQSRESDEEYVDFELFMARREYKAISRRIMRGRIASVKEGHFIGSTPPYGYDKVKVEKGRGFTLSPNYESDIVKQIYSMCISGMGCNAIARRLDMMGIEPRKGSSWSSASIKDILRNPVYCGKIRWQYRKEEKSLTDGIVTTHRRENPDCIIAQGLHPALISEEEFDRAQQFLNSRRIPHKKENTELRNPLSGLVYCGMCGSMMTRLGNGSRNHSDTLRCPNRNCSNVSAKLELVESALAEGVARWLNDCRVNVSRKPAADTAKAERTAADKVRAELAKLDGQRERIYSFLEQGVYSAVEFRERMESLEKRRTQLSENLRQAEQAVSEAEGDRQLYAQMIPRAERVMDIYSQSTPDEKNRLLKTIISRAEYIKTERNTRGNADRCNFTLNVIPLFPEIKTGAE

SEQ ID NO: 25848 - protein, 535 aa, synthetic construct
MITNAVLFRRVSTTMQERDGNSLQNQREMLTEYCQRKGLTIIKDAEIVESSTKGERKKFMEVIKFCQHQRGGVALVCLKTDRLFRSFKNYTLIDEMRQSGQLELHLTQDNLILNKTSKAGDLTILGLNVVMAQNYTLSLRDNVIYGMDYSVNQGRCMSKAPVGYLNIRTSDGKATVIVDNERAPIIQKLFEQYATGLYSVKDMMKKCKEWGLVNRSSGKAVNTSTIHRILNNRFYIGEMLYKNQWYKHNYETLIAPALFKTCQDIMHGRKPEEPKHFKTTEKPFIFRGLITCGECGCIISSDRKTKPSGKEYVYLKCSHFKGNCKNPQVNENVVLQQIEDELKNLSVPQEIMSYLRSDMEKIINRQNEAHNREVKTIRKKYDDCQNKIKRLRSLLLEGHISPEEYRDMNEDLKNEQYELEGKSELLTEADEKFSIAVATILSLGNNAYQIFQSSKVETKREILHILLSNLKLQDRKISYTLRKPYDYIRSLNKKIPSKTEGIAIGDPNEIRTRVTAVRGRCPRPLDDGTVFCLCF

SEQ ID NO: 25849 - protein, 668 aa, synthetic construct
MAYAKAKKHLKIWTKKKAALYVRVSTRYQVDKDSLPFQRKKLKEYCKFLGLEDYVIFEDDGYSAKNTERPHFQEMMSRVRSGEFSHLIVWKVDRVSRNLLDFAAMYQELKDHKVTFISMNEQFDTSTAIGEAMLKIILIFAELERNMTSERVTGIMLDRAEQGLWNGARMPVGYRWNNETKFPEPDPEEVKIVQLIFDKYEEWKSSIKIARYLNNNNFKSKRGGQWTSKLIHDIIRNPFYIGTYRYNLRESGRGPLKPESEWIVRENNHPAIIDKAQFDRCNKIMDQNGSSRDTSDLRARKYVHTFSGHLVCGKCGANMIASKDRARANGWRPSMYRCAQRSRMLDCDNSRTINESYIGPFIFNYIANLARVQKNFKNITTVEKLERELLKGETFDGVAGILPEGLNLTFQALSFRQVGTGTYIPDVDFLGDSDGASDRDQIELLKSEIEKSKNAVTRLTDVYLFDPDSMTKEEFATKKKELAKKIEGMERQLADLLDDSGTDDLADMSFIKKASAFLVAQRIVSKSFVDYVGMAQELDNEILKDFIDQIADQIVVLDGRVQSITFINGLKHEFRYATPAELPVCQKCGGRIGSTCGCRTRTFDFSGKRYQRIKVGDPRDTLHGKKNPVCPECFAHEGRWHHWNCKIETCPICGGRLAECEHGPNGKK

SEQ ID NO: 25850 - protein, 545 aa, synthetic construct
MEQSSLERTVHHIPALRSNVAGNKTRLHGRQRVAAYCRVSTDSEEQINSYTAQKAYYTQKIEESPDWELAGIFADEGITGTSMKKRKEFNRMITACKRGGIDLILTKSLSRFARNTVDCLETVRMLKARGIGVIFEKENINTLTESSEFLITLFSGFAQAESESLSVNIQLGIRMAMKEGKVNFHYRSMLGYQRGADGKPEIVPEEAEVVRRIYRRYLEGCSEGQIQRELTQEGIATAKGVKAWSHQIVHNILTNEKYAGDALLQKTFTTDCISKKVKKNTGELPQYYIKDNHPAIITRDIYQRVQAEMARRTSKRKILQKSGKTEQGKYSAKYALSERLVCGECGSPYKRCTWARNGVKRIVWRCVSRLEFGKKYCHNSPSMAEDKLHTAILTVLNRVVEASDGLQEELAETLRMVCTPEVDGNNLMELERNMEALTTRQNTLLDQVLAHMDDLTLTEQLKTLLEEKQHLQTRIDAAKKEAANRINEDSRMAEYTAYLEEHLNGFPHYDDEIVRKMIERVTVVDSEIIRVKFRYSDLEIEQSVC

SEQ ID NO: 25851 - protein, 514 aa, synthetic construct
MAEVQVIPPKAARPDTLRVAAYCRVSSDSADQLHSYAAQIRAYTQAINAHDGWDLVDIYADEGLTGTRMDKREDFNRLMADCRKGKIDKIVVKSISRFARNTRDCLATLRELSSLGVTVKFEKENIDTGTLTSELMVSVSASLAQEESISISKNQRMSYQRRMERGEFITCKAPFGYKIVNGKELEIIPEEAHYVKWIFDMYLSGASMEWIAEQMTNTGLLTSDGGHQWYSSTIAYMLTNEKYMGDSLCQKTFANAFPFTKQVNRGERDQYYVEHSHPAIISKDIFEKAQALLQRKGQRIDLQRERTPLSKKMTCGFCGSTLVRRISKAGYVSWVCRKHDRKAADCPNGRISEDSIHAAFLRMYRKLRTHDGIVLAPVLRQMETLSDALHRGNPAMLAVNTAIATASEQSYHLTKLHTAGLLDKAALSAKQAGLNAKLTELRRERRKLLCNEDIDEQVDAIRLTIDTIRNGPETLSSFDEILFTKLVERIVVDTQSTIRFQLYGGFEFQETLEA

SEQ ID NO: 25852 - protein, 597 aa, synthetic construct
MPKKRGSNEEFLNPGARRFRPPEVMPRKLKAAIYVRVSTRYQVDKDSLPFQKEELINYIKYALNIEDYEIFEDAGYSAKNTSRPKFQEMMSRIRNNEFTHLVVYKIDRISRNLLDFAQMYEELQKHNCSFVSKVEQFDTSTAMGEAMTRIVLVFAELERKMTGERVTAIMFSRAEKGLWNGAPIPIGYKWSEEKKYPVVDPEEAKVVRYIFDRYISLESALKVSYDLAANSVKTKRGGEWTSKTVRDVIRNPFYKGTYRYNHKTQTGTEKPLSEQIIIECNHEPIISEEVWSRANAIMDTNAERSVAHLRNNIKYTHIFSKMLKCWYCGMTMGAGLDRPRSDGYRPSKYYCTSHNRKQGCPNRYISDIIIGPFVLNYLANMVQAAQSVSKRTRADTLEKMLLRGKFFSNVDHIEREGLLTTFNNMVYGVARADFDPKKDQQDEPNNAELDLLASEREKYIRALDRLQSLYLFSDDGISEKDYIVQKGELEDKLESVNRRIAEIQGEAPEDDADLLQKATRFYIQNELVKKRSLDFKKAVSVFDKESLKDFFSSVIDTMTVKDGRVKAIRFKNGLTNVFVYKDETGPEEHESAVEASE

SEQ ID NO: 25853 - protein, 468 aa, synthetic construct
MDKKINNNMNDFTKKVEEVALYIRVSTEEQAINGDSLRTQREALTKFALANHYHIYGIYEDDGFSATNLNRPALQRLLEDVRKNKINRILLTKLDRLSRGVRNYYKVLDVLDAHCVFWQTIFEKYDSSTASGRLHINIMLSVAENESAQTSERIRSVFNNKIHQKEIISGKIPIGYKKEEKKLVVDEDKKALVIDAFNFYLKSGSVYKTFEYLALFDPSMNYPRTARLLANPLYIGTKVCKYGSIENYCEPIISNKTFNEVQNLLKKNQRKRDNSDHEFLFSGLLRCNECGYKMSGKYCKNFPTNCTFYYLCSNARLKKKCNMLKQLNETKIEKKLLEQIVPEINKYIDKNNILEQEKAQIRDISKERDKVNKQLEKLRDLYVNDLIQIDHYEKQYKELTSKLDSLKEEEKPVEEKKTVNYDEFRSFLSRDFVTLYNSLSRTEKRLIWASVIDTIYIDDNYNLRIVFI

SEQ ID NO: 25854 - protein, 518 aa, synthetic construct
MGNVMLIPARRQVGNNARKQEEEKPKLRVAAYCRVSTDSDEQATSYEAQVEHYTEYIQKNPDWEFAGIYADDGISGTNTKKREEFNHMIDDCKAGNIDMIITKSISRFARNTLDCLKYIRQLKDMNIPVLFEKESINTMDAKGEVLITIMASLAQQESQSLSQNVKMGLQYRYQQGKVQINHNRFLGYTKDAEGNLIIDPEQAEIVKRIYREYLEGLSMDKIAAGLEHDGILTGAGGKRWHTSTINKILRNEKYIGDALLQKTYTTDFLNKTRVKNNGLVPQYYVEGNHEAIIPKDIYLQVQEELVRRRVVKTSANGKKRSYSCNHCFSQIVICGECGEMFRRLHWNNRGVKSIVWRCISRLESTGLECHARTINELILQDAVVKAINQMLGDKSSYQAQLQLNIASVIRASQATSDEKLMVLQQELIQKAQSKEAYDEIADEIFRLRELRQQTTIDTAARDEQIKRINDLQDYIAQQTTHLTEFDESLVRRWIKQITIWDDHITVELKSGVNIDVDV

SEQ ID NO: 25855 - protein, 555 aa, synthetic construct
MPKKTAKHPAKPKRGKKLEIEEPGVLYGRYSSHNQKDISIEQQFEKCYELAAEYGIRIIDTYADRAVSGRTDKRVDFQRMMADAAKGKFRYVLAWKSNRIGRNMLEALVNEARFQELGVRVLYVEEDFDDTAAGRFAARSMMNVNQFYSENMAEDIKRGLYDNAANCMVTNGHLPYGYKADETLHYAIDEPRAAVIREIFTRVSCGEAFVDIMSSLNARGITTSYGRPWGRSSFQKILSNERYRGIYIYGDVRIEGGIPRIVSDELYFKVQEAITTKKNPQGRHRVNGDYLLTGKLFCGHCKSPMTGISGTGRAGKLHFYYVCQKRRTEKTCHKKNVRRDVIELKIAKAIRDYALKDDIIEWIADSCVEDHDRRVSESHLSVFEDQLAEVNRSIKNVMSAIEKGIITETTKGRLMELEAERTAIEGKICAAKAAIVPTNRERLVEWLRSLREGDVHDKKYQAGLFDTFLVAAYLYDDNRVKIVFSFAGDKNTIEIPLEDVIDSIDDEASCVRLSSTLSHQKTFARKCGGFLLITFYFFTITLSARRFFGKVKSNR

SEQ ID NO: 25856 - protein, 523 aa, synthetic construct
MRFFSYGRKSVFSDKSDSIDNQFRMNREYCESKFSGQVDSWQQFSDEDFTGANTSRPDLQRMLSFIKGGFCDVLVVYQLDRLSRDVRDFANIYALLEEHGVMFISIKENIDTTTPIGRAMMYVTVVFAQMERETIAARVTDNMLGLAKKGYWTGGNPPVGYVRKHIVVNGKKHCSIEVDPDGARYVTQIFDTFLAYNCSLQGMETRFKNQGIRTQSGKFFSTTQLHKMLTMPYCVEATPEVYDFYAAKGCIMDPGSPREMWDGSVGVIIYGRSTEKNKKHQAQPPEKWTVCLGKHKPFMPAEKWLAVQSRFTQNKCIKDAKWPVPLLKGVLRCKCGNLMQVSRKKKVDGTCSSWYYCRKRMRQGVDACDMGQIKCDLLDEEVLELFRGITADPALIQKFVKAEAPADVTDLKAAQARVSACERKIGRLAASLALAEDSAASKYIIAEMERLDVELGALKREASLAEMESHRAAASAKDAKSTAAEIAKLIHGLDGFDDKEKNAIARAVIQECTWDGERLFITL

SEQ ID NO: 25857 - protein, 681 aa, synthetic construct
MNSETSTNKILRAVLYERLSKEDGDKLTKEEKSESIKNQDLMLRSYAIEHGYEIVGVYNDEDWSGADSSRPQFNEMIKACEAGEIDVVIAKTQSRFARDMELIERYLHNKFLEWNVQFKSVVDHIDNTRRETKKTSQILGLTDEWYLEDTSINIKETLRAKRASGEFTGSFAPYGYDRDPENKNHLIIDPVASETVKQIFENYINGMGLKTIARYLNDNFVASPYEYKMSKGSNLKLAYLDNYLVYDYIEKAGLYKVDISYINESREILHNLISYNIFSKDKKNFDNKCKLYLKNYSEKKMKIYYTTDNDIDYNNFDVKKWTLLRKDDLIPFDTTCIATVVEMLDRKHTINYQFDILLENNIEHEKYYFDIIQITNDEKKIIDYEKNIRKKCKWCDQMIKKILTDEVYIGNLVQSKTTNVSYKNKKKVKKDKEDWIRVENTHERIVSLEQWLKVQERLKQRVRANKDGYYNPFVHKLYCKCCGKIYCRTGDCNHVYFRCKDQQEKYKSCDNRSNISKDELNNFALGKINELLNRFYNEEQLKEFKEKDTDSDLFKSRINSLNKELIDVNKELQNKKTYFQHLYEDKINGLLDTDEYIILKSKYKDDSEKLENRSAKIKEELKLINDKKAILKTKETVYGKYKHIDCIDIDIVSDFIDRIYIGKYDKETNTRDMKIVWNFES

SEQ ID NO: 25858 - protein, 544 aa, synthetic construct
MKRVICLYRVSTKGQVDKDDIPMQRIECRKFIEAQGWTLVGEYAEKGISGFKVSAEKRDAIMSIRKEAERSAFDVLLVFMFDRLGRRDDETPFLVEWFISKGIEVWSTREGQQKMESRADKLINYIRYWQAGGESEKTSERVRTKHRQMVEEGLWRGGTRPFGYKLIHNGRIGKKNRQLFDLAIDENESVIVRDIFDGYIRRGMGIHRLANYLNSRYPSPDKIWAPQSVKTILTNPIYIGISRCGDVRSPVNEALRIISDEDFEFAKRVMSMRVTRKTQTRGDIDEDNPDETKRTKTSIFGASLLSGLLYCAHCGHKLVGTYHTKKRANGECYYRPVYRCYNGATKAKGCDGQRTYSALKIEEAVLEIVRQYFSHFGKSVDAIWKEQQRLQIKQGSGARLKQAEMGLAKLNAQYKKLREEMVKVLMGESVFDEATIKSMLDEKKEAITKAAVYLDEIRASAEDTEQKLQQLILQYRSISDWAEVFDAANNDEKKMILSRIIEKITVDKEYHIELHFLITLDSFRRDVERLEHAMVSEDTVTVAI

SEQ ID NO: 25859 - protein, 544 aa, synthetic construct
MKRVICLYRVSTKGQVDKDDIPMQRIECRKFIEAQGWMLVGEYAEKGVSGFKVSAEKRDAITSIRKEAERGAFDVLLVFMFDRLGRRDDETPFLVEWFISKGIEVWSTREGQQKMESRADKLINYIRYWQAGGESEKTSERVRTKHRQMVEEGLWRGGTRPFGYKLIHNGRIGKKNRQLFDLAIDENESVIVRDIFDGYIRRGMGIHRLANYLNSRYPSPDKIWAPQSVKTILTNPIYIGISRCGDVRSPVNEALRIVSDEDFEFAKRVMSMRVTRKTQTRGDIDEDNPDETKRTKTSIFGASLLSGLLYCAHCGHKLVGTYHMKKRTNGECYYRPVYRCYNGATKAKGCDGQRTYSAQKIEEAVLEIVHQYFSHFGKSVDAIWKEQQRLQIKQGSGARLKQAEMGLAKLNAQYKKLREEMIKVLMGESIFDEATIKSMLDEKQEAIVKAEAYLEELRVSAEDTEQKLQQLILQYRSISDWAEVFDAANNDEKKMIFSRIIEKITVDKEYHLEIHFLITLDSFRREVEQLENATVSENVVAVAI

SEQ ID NO: 25860 - protein, 700 aa, synthetic construct
MDSNAFLNDLMSKMKLPEAKGKKKAEQSESVAQILAAMQKVKTEKKKPPVTSYAPTKEMPVNELESMEEFSQLASDVMQECWPAIPAVKTSISEKIVRVAAYIRVSSTNPAQEDSYEMQERYFMSLLAGNAGWTSAGIYSDHGISATSREGRTGFNRLLRHCKQGKIDRVICKSISRFARNTQDFLVALRTLKENNVTILFEREAMDTADAYSEFILTTLAAIAQEESRSISANIAWSNQKRFPAGNVCNKDIYGYEFRKGEYTVNENGYRYRAVFIIPEEAEIVRMVFRLFTKEELSFTQIAQKLDALHIPPPNSGCRQRQKRKPTVLPAGALKEEDKRGWTATDVRYMIANVRYCGSVLCQKTYTDHRNGHKQKVNKGEKPKYLIRNHHPAIISEELWQEAQEVWKAYTAKYRGIEKGRNERNYSKLLLCGECGRYFQGHSTTRTTIWRCATKLAQQGQKRCRMEPIYEEQIQTLLCKAFAEKFKLGEKLDAEVHEVMQMISKAPIDNARNQALKNLTEKLREIHDFDHMEQEGDFLKRQLSAVNYSIRDVHQHIRDIQAEKEALKVRCEVLGEPRDKEAVTELENRLLNEEEQLEKLEHEAQQQAEQVRYMEDYWKKLEQTHEIREKTLQWLDSLAGGTQMFLDEAVGTYVKAFVLSVTIFSPKHFRIHWFDDTCTEVECDSVFEGYQQPGMIRRKY

SEQ ID NO: 25861 - protein, 510 aa, synthetic construct
MSYFIYARKSRKDADLEALGIDVLERHITTLLELAKTLLLPIGAIYREVVSGDSIDSRPVMSQVMAEVESCMWDGCLVMDVDRLARGDTIDQGRVQRAFFYSNTKIVTPNKTYDPANEYDNEYFEFSLFMSRREYATIKRRMQRGRERSSSDGYYVGNIPPYGWRRVIAPDGKHFSLAPDPTESPVLDLMYDLCGNKQYGYQKACTHMAEMGILSRSGRPFTSSTLKGIISNPANIGKVRWGHRKTVRTVKDGKISRSRPHSSDYILADAVWPPRISADLFQRANQPKGSCSAPVRDDRPIQNIFAGLVRCSQCGRLMVRKKAHTKTPYDILICQYTECPTVGIRIDELELALLEWLRNYIDKYELTDALPEDVENVAAKEAIVKNFEKEHETLLKQRESLFDFLEQGIYTKEIFIERSNALERRVKECMEHIISAQNDLHATLALQANRKNFVPRCKNLLGEWGRLTIPEKNSALKVLIEKIMFTKTKRNKKGQDRSDFEIDVFPKVPK

SEQ ID NO: 25862 - protein, 525 aa, synthetic construct
MYLEISNPMDYHVALYIRLSKEDETEGPSQSVTNQKSLLNEFVQQHRLSVYDTYVDDGWSGTSFDRPDFQRMIEDIEAKKVNMVITKDLSRLGRDYIMTGHYMERYFPEKRVRYISLLDGIDTGVESTANDITPFRAIMNDMYAKDISKKIKSVKRDKQRKGQFIGGKPMYGYKMHPTEKNEIVIDEEVAPVVRRIFAMALDGMSCRKIAATLNEEGVPTPATYCGWNMGRKGPYAGLWSSERISEMLQNETYLGNMVQGRTVKISYKSKKCLKQDRENWVVVENTHEPLIDKETFQKVRMLVNSRKHTRSRTYDFLLKGLIFCHECGYPMAVLNRPPVSGEDRLFFVCRTYQRFTKAGVCSCHSIKEQVVTEAVLAKVREVCEAYLDPNKLQPIAADAVEKARKAENHEAEIQSIQNKIDSLTANLDKMYMDRLTGLLTEADFERIYLRVKMDRTSLEEKLKELESQKESPVSTENRARELVQQFLDSAYTSRELLVSLIERVELTEDKQIIIKFRFRELEAIS

SEQ ID NO: 25863 - protein, 571 aa, synthetic construct
MLKVAVYSRKSKFTGKGDSIENQIEMCKDYITNTIGKDVEFTIYEDEGFSGGNLDRPNFKKLMSAIKNKKFNILVCYRLDRISRNVADFSSTLEILQSNNCSFISIKEQFDTSSPMGRAMIYIASVFAQLERETIAERVKDNMLEIAKNGKWTGGKIPLGFTSDKVEYIDEKGITRTAPQLIINEKEMEFVNFLYNKYLELGSLHKLEVYIHENNIRSRNDVLYEKSSLKTILQNPIYVKANDDVVEYLNNSNWTVYGQPDNIHSLLTYNKTEQTKKDGKYTKVKKDLSERLAAVSSIKGYIDPELWLSVQRQFDKNKDTFPRLGKTHNALLVGKIRCGKCKEYMLISHGRISKTTGEKLFYYTCSLKKKSRKKLCDNGNAKAADLEKLVLLSLKQLSLNKKDFLSKIRDKYKTDENYKNIDLEKLSLNKSLKEKKLQIDNLVTKLSLCNDIEDIILNKIKTLKDECNNIEKTLTELETKTLTLKNNLLNLDLIESLLNKCSMIDKLDRSEQKLIVDNLIDTIYWYSDGPGKGKIKIKFVGTEDNQKEISFTIKEMQQLMLHFCSHSMSSI

SEQ ID NO: 25864 - protein, 504 aa, synthetic construct
MEIQVLEARSSKGYRKKVCAYCRVSTDALEQENSLENQIAYYENLIQSNPEYEYAGVYYDFAISGYKEKRPGLQKMLMDARNGKIDLIYTKSVSRFARNTAIVLKVSRELKELNVGIFFELQNINTLSSQGELMLTILAAFAQAESESGSIGAKMVYQRKYEQGIPVQYLERCFGYTKNEKGEFVPDTEQAKWIVKIYEMAAEGYSLSKIADEMNAAGVKTDKGAGWVESTVKRILENEIYKGDYIMHKNYVNEERKLVRNRGEVDAWYIEDDHPPIVSRQLWDKAQEARKKKRDYLDMDCQIREVTEENYPYKGHLFCAKCGSPLTHRIYSNGNRMSWDCSGRRRHGKDFCDGIHVPDTAVRQWKFEGNIYISVKDSRKSIKEFSYTKESSWSRRHKKKEFVRDVPELTEENYPYYRSIFCAECGSRLVRHIKKHGDIVWECNGRKRKGAAYCEGVRIPDRVVQAFMPIRKAIYIKERKGRNGTKHYSYSCKKPERVTREEQD

SEQ ID NO: 25865 - protein, 457 aa, synthetic construct
MKKKELCPAVIRVALYIRVSGEEQKIKGLSLEAQQERLETYAKEHGWIITGTYIDAAKTARKNLHKRTEFQRMMESVKRNEVDILLFARLDRWFRSVADYYKVMEILQAHNCNWKTTDEEYDTTTANGRLYINVKLSIAQNEADIDGERIDVVFDSKIAHGTVVSGSCPYGFRVNNEKRLEIIPDDVAIVQDAFCYFESSVSQRATTKYIREKYGINWCYATFHRMLTEELYTGVYNRGGRYNANFCPSIINRDQFDRVQALLKKNVHTAPSGRIYLFTSILVCDECSHKLNGYLSQGIVYYRCAQHMQRGRCIHNHSIREDYVEQWLFDHLSEEFNRVKLDWEIQAAKRKRSSSSKGKAVLKRKLNKLKELYVNDLIDIEEYRKDYEIYTSALKQMPNDKEMEQPPNFKAVERLLQSDFKNLYNTLTREEKRTLWRSAIKEIRIDNDYNITGIIFE

SEQ ID NO: 25866 - protein, 502 aa, synthetic construct
MEFIREDCIYARQSVDRKDSISIESQIDFCKYELKGGSCRVFKDKGYSGKNTDRPEFQKLLGEIRKGKVRRVIVYKLDRISRSILDFATMMELFQEYDVEFVSSTEKFDTSTPMGRAMLNICIVFAQLERETIQKRVTDAYYSRCLKGFHMSGQAPYGYQLEPTVVEGIRTKKMVADPVAADHVRLMFEMYAEPETSFGDITRYFEEHDIKIYGKSMFRTFLSQLLRNPVYAQADLELYEFFKSQGAAIVNDASDFAGTNGCYLYQGRDVKEDKDRCLKDQILVIAPHEALISSDTWLKCRKKLMANTTFQQGRKPKNTWLAGKIKCGHCGYALKATHVPNSTGYFRCTKRTENKGCPGCGKIRKEEFEQFIFSAMQEKFKDFQILHGREEKVNPKLTTYQVELAQVEAEIEKLLDTLTGANATLLAYANKKIEELDTRRQTISKAIAELSVETISPQQIKKLSYYLDNWDSIDFDDKRKAADGLISTIKATSDRVQIEWKI

SEQ ID NO: 25867 - protein, 514 aa, synthetic construct
MDVVLYMRYSSDRQTEQSIEGQQRVCTEFCKAQGYNIVGKYIDRATSAFKDTSKRVSFNKMIKDSDRQQWQAVVVYKLDRFARNRYDSATYKARLKKNGVKVISATENISDNPEGIILEAVLEGMAEFYSKELSQKINRGMTETAYKGNSCGGQIPLGYKVVNKKLVIDEPNAEIVKEAFARYANGESVADICEEYNNRGYRTTRGSPFNKNSFRTMFRNEKYIGIYLYKDIRIEGGVPAIVDKDTFDAVQKRLAANAKAPARGKAKVDYLLAQKMYCGHCGALMVGESGTSSTGQTYNYYSCGSRKRGHGCSKKPLKKDYIERLVAEDAMEFLTPETIELLADMAVEQNRADIANDELIPALKEEIRDVSQRMNNLLKLAESGIQSETVAERIADLEKLKRDTEHRLAEAQGQYIVLEREHIVWWLSTFLNGDINDFEFRKRLLDMLVDKVVVWDDPDGLKITTTYNLIDGNKERVSKTRNNQAFEYKTELFTKRQKRLQSETLLSFIYFNIT

SEQ ID NO: 25868 - protein, 434 aa, synthetic construct
MKRVVERVDDLIPAQPKALRVCAYARVSTGKDAMLHSLSAQVSYYSKMIQSHNGWMYCGVYSDEAVTGTKRERAGFQHMIEECRQGNIDLVITKSISRFARNTVTLLQTVRELKSLGVDVFFEEQHIHTMSTDGELMMTILASYAQEESLSASENQKWRVRKAFENGEIINLRFLFGYDITPGGIQVNEKDAAIVREIFARFNGGESMSFICRDLDARGHKGVLGGTWCAERMRNTLSNEKYLGNALLQKQYRNNHIEKKLLPNRGELPMYYAEGTHEPIIDQATFDKAQERLRMLAQQAANRKKPTRSVFSGLIHCGLCGNTYKRVTYRKKHYWNCTTFQTKGKSECAAKRIPEETLEVLTCEVLGAVSFDPDMVRSKITAIRAEKSNMVVFCMDDGSEIVKRWTDRSRAESWTPEMKEKARQRALQARRKKK

SEQ ID NO: 25869 - protein, 529 aa, synthetic construct
MSRTAARSVTVIPPTINPLTHLSKVAVQKRRVAGYARVSTDSDEQFTSYEAQVDYYTQYIKRNPEWEFVKVYTDEGISGTNTKHRIGFNEMIADAMSGKIDLIVTKSVSRFARNTVDSLVTIRKLKEKGVEVYFEKENIYTFDGKGELLLTIMSSLAQEESRSISENVTWGQRKRFADGKVNLPYKQFLGYRKGADGFPEVVPEEAIVVHRIYTRFMEGLTPGAIAKELTADGIPTPSRKQRWQTSTVESILQNEKYKGAALLQKCFTVDFLTKKRKVNEGEVPQYYVEHSHEPIITPEEFDKVQTELARRKQISRQYSGKSIFSSRIVCGDCGSYFGSKVWNSTSKYRRVIWQCNSKFKGEHKCETPHLDEETIKARFVTALNAIIESKDNILEDCRLMQATLTDCTGIDKEIQTLLEKIEVVTELTKRCIAENSQTAQNQEEYAARYNGFVERYEKAKARLEQLRTTKAAREAQAEAIGAFMFEVQELDALTEFDEKLWLTVIDTVTVHADRRMTFKFQGGKTLTSY

SEQ ID NO: 25870 - protein, 520 aa, synthetic construct
MLEKNIIIYLRKSRSDDPGMSVEDVLAKHELQLQEYAVSEYGEQIPEDHIFREVVSGETIADRPVMKQVMRLLEAGNITAVLVIEPQRLSRGDLEDCGRIINIFRYTHTLVATPPKTYDLTNEYDRKFFEMELMRGNDYLEYTKKILNRGRIASVKKGNFIGSVAAYGYKKVKIGTGKDACHTLEIIPEQADAVKLMFKLYLEGNGFTNIAKTLDELKIKPLRSETWSPAAISDMLENPVYVGKIRWNYFKTVKKIEDGQIVKSRPINQDPSDWFLVQGKHPAIIDQATFDAVQERRGRTPKIKRFNELKNPFAGLLYCQCGKAMSLKIYNQKKGKCEPTKLMLCNKQSWCKTKSVKYDTFLERIVETLESTIADFEIKLKKDNGDAAQLHKNIVYNLETNLKKLKDKDIRQKDAYEDGIYTKEEYASRNAKLQEQISETTKALCQAKDSVPPTINYKEKIARFTDCLNALNDVSVPAAEKNMLLKACFEKIIYHNDMPSISGHGRWIENKFKLEIFLRL

SEQ ID NO: 25871 - protein, 522 aa, synthetic construct
MNAVIYARYSSHSQTEQSIEGQLRDCYEYARRYDINVVGEYIDRATSGMTDERPDFQRMIADAAKKQFERVIVWKLDRFARNRYDSALYKHRLKQYGIRVISAMENVGEGDESILLEALLEASAEYYSLDLKKKIKRGQRENIAKGKYCGGPIPYGYKLIDGKLRVDDKTAPTVRFLFEQYASGVPMKEIIDELTRRGVRGSRGGALTYNTFSRVLTNTTYIGQYKYKGDVVPDLAEPMIDADLFERTQAVVKANAHAPAANKAEVDYLLQGKAFCGKCGSHMVGESGRGKNGDTYYYYACANRKKRHTCKKKNEKKDFIEWYVVEQTVQYVLTPQHIENVAKAIVAQYDNEFSGSKIDECEKQIRQLDRELNKLVDALIDAPKAAHKRIYEKMESLEAQKAAAESDLIKLRIASDIRLTESEVRAWLKKFCTGDLFDPEFRRNIIDAFINCIYLYDDRVIIFYNIKGGKQVSYIDLENTLNEDSPGADFSDMIANAPPEIFDPNLFFRKGSDLFYDRNQFG

SEQ ID NO: 25872 - protein, 525 aa, synthetic construct
MTKKVTTIPALLNKQSTNQVGAIKKRRVAAYARVSTDQEEQLTSYEAQVDYYTNYIKSRDDWEFVDVYTDEGISGTSTKHREGFNKMVKSALDGNIDLIITKSVSRFARNTVDSLTTIRKLKDIGCECYFEKENIWTFDGKGELLLTIMSSLAQEESRSISENVKWGHRKRFADGKVSVPFGNFLGYKKGEDGNLVIDEEQAVIVRRIYREFLSGSSSVAIAKGLTNDGIETPGHKQKWYATTVRSILTNEKYKGDALLQKHYTVDFLTKKQKINNGEVQQYYVENNHPAIIEPDVFEMVRLEIDRRLMLKGKYSGTDILTAKLRCGECGGSYGAKVWHSNDKYRRVMYQCNSKYSGKEKCKTPAIRSEDIESRFVNVVNILIESKDEIISNLEKVLDKICNKKELLEEKEKLEYSLTEQVEKIQDLIDINSRVAQNQEKYKKEYDALIKNYDETKCKFEQLEIELSRQAAKHQVIKDYISTLKKKEKPLTKFDGLIWGSLLESATIKDKDVIVFRFKDGTEING

SEQ ID NO: 25873 - protein, 453 aa, synthetic construct
MRKITKLETKKIDLPKLKRVAAYARVSVERGRTLNSYSAQVSYYNDLIQKNPEWEFAGVYADLGISGTGIEKRNDFKRLLQDCEEGKIDIILTKSVSRFARNTVDLLKVVRHLKELGIEVRFEKENINSLTGDGELMLSILASFAQEEVISTSNNIKWSIRKKFESGRPQCRYKIYGYRWDGDTLVIEPEEAKIVKLIFEMYLNKVSAERMEIILKDMGVIATNGGYFNIGTIRDMLKNITYTGNLLLQKCYTPNPLVRRKKANNGQLPKYYVENNHEPIIPLEMFMKVQEERERRKAEGQRANFGKNITCFSCRVKCPICGKNYMRNSSSRRSNGTKAHIWTCGTRLTVGSKACNGKNINEIALKRVSAKVLGLDEFDSNAFDEQIEKVIVIGDDILEFHFNDGRIISEKWEFNGRKEYWTEERRKERGERLKKIWREKNDKKSNNNTSVIK

SEQ ID NO: 25874 - protein, 489 aa, synthetic construct
MRVVLYMRYSSDRQTEQSIEGQNRVCTAFCEQQGYEIVDRYIDRATSAFKDTDKRTEFQRMIRDSEKQLWEGIVVYKLDRFARNRYDSATYKARLKKNGVRVISATENISDNPEGVILEAVLEGMAEFYSKELSQKITRGMFESANKCHSIGGHIPLGYKIENKKLVIDEAGAAIVREAFDLYANGATVAEICETFNTKGYRTAKNAEFNKNSFRSMFKNERYIGIYKYKDLRIEGGVPAIIDKDTFAIVQKKLSKNAEAPSRGKAKIDYLLSQKLFCGHCGSLMTGESGTGKGGTTYFYYTCGKRKREHTCDKKPLKKDFIERAVVEDALTLLTPETIDELADIAVKESIREMEENSIIPALKDQLHETERSINNLVKMVEKGVESDTIADRLKELEKEKRAIEKRLVVAQDDYVILEKDHIVWWLSEFCNGDIEDEDFRRHIIDLLVNSVTVWDEPDGWYKITSVYNLTSNKTKTFRCSDLSGQAPP

SEQ ID NO: 25875 - protein, 592 aa, synthetic construct
MPNLRKIEAAVPTIREKKKVAAYARVSMQSERMLHSLSAQVSYYSGLIQKNPDWEYAGVYADDFISGTNTVKRDEFKRMLADCEAGKIDIILTKSISRFARNTVDLLETVRHLKDLGIEVRFEKENIRSMDGDGELMLTILASFAQEESRSISDNVKWGTRKRFEKGIPNGRFQIYGYRWEGDHLVIQEDEAKIVRLIYDNYLNGLSAETTEKQLAKMGVKSYKGQHFGNSSIRQILGNITYTGNLLFQKEYVIDTISKRSKINRGELPQYFVENTHEAIIPMEVYQAVQEEKVRRRELGALANWSTNTSCFTSRIKCPLCGKNYRRSGKRQRKNPDEVYYIWICRTKSEKGAKSCPAKAIPEKALKNACAEVLGTAEFDDAVFSAQIEQLYVVGDDTLEFHFYDGSVLEKKWKSTAKKDWWTEERRAAWGELHKHKATNPNRRRFYEFTGLIKCGQCGESFRCQSMTRKDGTRIRSWHCGRTCGNTNIRDEILKSMVCDVLGLDAFSEESMDAALEKITVNGTAVRFHLRDGSVAEREYTQPKRKGTKHTEEFKEHMRQLMKAKWKEGKMHGTKKSDNHSSHDQPVHGGAD

SEQ ID NO: 25876 - protein, 438 aa, synthetic construct
MARTIQQISFPAPMRPSLKRVAAYARVSSGKDAMLHSLSAQVSYYSALIQKHTGWLYCGVYADEAFTGTKDGRDGFQSLLAECRAGNIDMVITKSISRFARNTVTLLETVRELKALGVDVYFEEQNIHTMSADGELMMTILASYAQEESRSASENQKWRIRRGFERGELVNLRFLFGYKIEKGCVAVDPEKAAVVREVFRRALEGESLTSLAIDLNRRGFTGVLGGKWNSMRIREMLSNEKYLGNALLQKQYRNNHLEKKEIPNRGELPQYYAEGTHEAIIDQATFDAAQELLAEITENSPVKRLRRRSAFTSMITCKVCGRNYKRCTGGKRHFWNCPTVVQTDLPSCGTSQIPEKLLYDLAAQVLGLAQFDEDVFLERVKGVDALPDKTLVFHFKDGSTAELHWEHISRAKSWTPEMKEIARQRALAQRRGEKWQEP

SEQ ID NO: 25877 - protein, 525 aa, synthetic construct
MARAVTVIPPTIQPITHLARNAVVRRRVAAYARVSTSSEEQLTSYEAQVDYYTRFIQSKPEWEFVRVYTDEGISAVNTKKREGFNQMVRDALDGKIDLIVTKSVSRFARNTVDSLVTVRKLKEKGVEVYFEKENIYTLDSKGELLITIMSSLAQEESRSISENVTWGQRKRFADGKVSLPYSHFLGYRKGDNGLPEIVPEEAETVRWIYSLFLSGKTTGSIAGLLTREGIPTPAGKKKWAASTVESILKNEKYKGDALLQKAFTVDFLTKKQKKNEGEVPQYYVENSHPAIIDPAEWKLVQRELERRKAIGRSYSGNSIFSSRLVCGDCGGYFGSKVWHSTDKYRRTIWRCNSKFTGEEKCQTPHLTEEEIKARFLEAFNALVTDKERLLDECRTMQAALTDTGSLDSEIAALLSEMEVVAELTKRCIEENSTTAQDQAAYLERYNSLAERYETAKAKLEKLQAAKAQREAKSEDIGGFMFELAEYGEPLVKFDDRLWLTVIDTVTVHRNGRLTFKFQTGHEITV

SEQ ID NO: 25878 - protein, 519 aa, synthetic construct
MMRVKKTDTSKDRVAVIWCRVSTKEQFKNNCSIDVQKKECREYATQHNIQVIGEYEGKGESAKTTNGRQFQEMLKVVTSNKKVNTILVRTYDRFSRTGGEGIVVKEMLRKRGVDLIAVAQPVEKNTQGEFLEDLYLILSKFDNSQRRDKCLAGIKGCMERGDWCCRVPMGFSRKKVDKRHIITVNETGKILREAFLWKANENITSDEIMRRLNRRGVFIKKSQLSEMFRNKFYCGMIRHWSLGEDWIRGNQEILIEPEIFDKVNRKMNEGHLAGYEKQESNNFPLKGHVFCPDCHRPFTAYTVKKKNRDYYKCNTKGCCHNRAADVMHQKYINLLSDYRIPKCLFPILQRVFTKVFWENNQREKEEIKSLNIRLTDCEVKAKAVRLRYGLGEIDKEIYDDTMNVLEEQKDEIEQNLELYKNKLSNLDRYTTKVLKMSCKLGDLWQKGNARVCQKLQNLVFPQGIEWDDKNDDYRTFSENEVFRLFRKISTTYKYESKKNTPLSSEVSALVENNGNSFLW

SEQ ID NO: 25879 - protein, 485 aa, synthetic construct
MPTSDLKIAAAYIRVSTDDQEEYSPDSQVRLIREYARKNGYLLPEEYVFQDDGISAATARKRPAFNRMIALAKEKERPFDAILVLMFSRFARNREESVLYKGLLRKQGISVISVKEPAVDGPFGTLIESIIEWFDEYYLINLSAEVKRGMSEKFLRGEAMGTAPFGYRIDSANKTFTVDPERAEIVCDVFRSYADGAGLRDIAVQLGDAGITTRRGNRPDNRFVEYMLRNPVYIGKIRWTPGHKTRYSRVHIADGVEVVDGKHPPIVSMDLWEAVQRRMDQRKAAYGRYQRQAPAAWMMRGLVRCSACGATLIMAGRSSSCPFLQCHSYAKGACHTSHSLSLRRANAAVLAGLRRSVGTLIFHMVPHLTSAPSRTADYGRLLEQERRRLARCKDAYQAGVDTLEEYRDNKARLEERIRRIEEQAASAAAAPESFDKAAYGKKSADILRFLETSADEGAKNEVLRSVVDHITYEKASRHLAIYFYT

SEQ ID NO: 25880 - protein, 554 aa, synthetic construct
MKKFPIDLSCLTEEEISQFQEDPYTLYNGDQNVAIYLRYSSTGQSDQSIEGQLRDCRTFCKANHYRIVAIYVDRATTARKDVEKRLHLMEMISDSAKQNWEYVIVWKLDRFARNRNDSAIMKMRLRKNGVKVLSATEHLTDSPESIILESVLEGMAEFFSAELSQKVTRGMRESALKCHSVGGHIPLGYKVENHKLVIDPDTAHIVQEAFSLYANGESVAAICRKFNSAGYKTAKNTEFNRSSFKAMFRNTRYIGTYTYKDIVIENGIPAIIDKELFETVQRRLSKTATAPARGKAKVDYLLSGKLFCGHCGASMNGESGAGRHGKVYHYYSCYTKKRKLGCDKRPLKKDYIEGIVARDALNLLTDQLIDEIADMAIRQSEQDLINDTHIPQLTAQLSEVEKSITNITAAIEKGIASETLMNRLVQLEHEKKTLNKEIKAEEKFVYRIDRDQIVFWLSQFKYGNIEDEDFRRRLIDLLVNSVTVWDEPDGYKITTAYNLTSCKTKTFRVEKNPAAEEATGFDFGESECTKSPRNRSISRTFAFYKLPFSDVAFF

SEQ ID NO: 25881 - protein, 526 aa, synthetic construct
MKMKRVICLYRVSTVGQVDHDDIPMQKIACREYAATHPDWEIVDEISEKGVSGYKISTNARDAIIEIKKKAINREFDVLLVFMFDRLGRREDETPFVVQWFVQQGIEVWSTREGEQRFDNHVDKLLNYIRFWQASGESEKTSIRVKTKHIQMVEDGQYRGGYVPYGYKLEHQGRTNKKNQPVRDLVIDEDEAAVVREIFHLLTDEGYGTVRVANYLNDKGIKTKRGKSLWRGTSIRALIDNPIYIGIYHMDGAQSQPFDHLKIVDEAMFERCQQTVKGRATCLGDKMTMPVRTDTRSLLSGIIYCADCGSRLAYSHNVTRRKLADGTERVYERECYRCYRKINARETCDGQSSYNAETINETVLYEVRRILNAIKSKPEAALLEKAKECTTGVNEIAYRQAEADFFEAHKQITALEDQTMKFLTGENTVDISIINAMMPKYKEKLANAQKRMDETRDKMEAEKATAKNAVQEVTDLLSWAEAFDDATIEEKHMIIARLVERIDIGHDYEIEMKFRISVEQYMRIAA

SEQ ID NO: 25882 - protein, 423 aa, synthetic construct
MRVKVINKRPASVLQKKRVCAYARVSTDSRRQEDSLENQIETYERLITGNPEYEFIGVFADQGISGYCENRPQFQRMMEKARAGEIDLIITKSISRFARNTVTVLQFARELKELGVGIFFEEQNINTLSGDGEMMLAVLASFAQEESRSMSENNKWSIRKKFERGEVMITTSRFLGYDKNEYGDLIVNRKEAEIVSLTFDLYLLNVGSSRIGELLDYLGVKTVTGTTWESGTINGMLCNEKYKGDFHLQKYYTPENKRNHTRKNNGEVQSYYISENHITPEVWEKVQEVREQRKRDRNIGQDSTMKFQNRYPLSGMLICPYCGKTLRRRQVYKKKIQWLCSTYIEKGVKACKGIRIDDAELQGLNITEQTVIEEVVKNGKKHYCYTSKADFDCGIRNSTVSAEIEDGSVLPSVNRPRRTVIKL

SEQ ID NO: 25883 - protein, 438 aa, synthetic construct
MSTDQEEQLLSYENQVNYYTNYISENPLYEYAGTYADEGISGTNTKKRDEFNRMIADCRAGKIDMIITKSISRFARNTLDCLNYVRELKDLGIGIIFEKENINTLDAKGEVLLTILSSLAQDESRSISENCTWGICRRFETGKHKMSTKRFLGYDTDETGKLVINRTQEPIVIRLYQEFLDGKTTDYIKRIFEREGVKNWDGGTKWQSTTLMSMLENEKYKGDALLQKSYTVDFLTKKRTQNKGEIQMFYVEDDHDAIISKRIWECVQLEIKRRKKYLEEHGTNSYSHRPESNPFASKIICGDCNKVFARKGWRSSTGVDRKVWQCSERYKVKGVMGCVNRHVEEETLIKAYLMAWNALVENREDFMEQWTEQLQSENLLEGYRAEKFIEYTDGAEPLTEMDTDFMLKTLDHIKVFEDGTLLVVFLDGTEIECKNEEE

SEQ ID NO: 25884 - protein, 512 aa, synthetic construct
MKAVIYARFSSHNQREESIEGQVRACQRFAKEHDMTVIEIYADRGLSGLHADNRPEFQRMIADSDRHKFQALIMWNLDRFSRDKYDTAVYKSRLKKNGVTLYYSDQNIPDTPEGIILESLLEGFAQYYSANLSRNAKRGLQENARKCLWNGGGLPLGYTIDETKHFVIDPAGAACVRLIFQMYADNHSIKEIVSALNEKGYRTVKGNKFRLGSIQGVLRNRKYIGEYHASGITVPNGVPAIVDVELFNAVQEKIGVVSAAKARNKAEIPYLLTTKVFCGHCGSPMIGESGTGKGGSTYRYYKCSCRKNRKGQCDKRTEQKEWLEETVVAQTVEKFLHPDVIEDVSNACAAVLEQDCQNNALLKALNAQLADVEKSSRNLIKAIEAGVFTASMRERLAELEQQKEDITVQIAREQLRKPQLSAEQIAFFLRSFLDGDAHDPNFQERIIESLVRRVDVYDEGPGNRKLTVFYNLKKNNHSSVSVKCSDSESVGLPKRSVAKAADFFSLLAEGRE

SEQ ID NO: 25885 - protein, 570 aa, synthetic construct
MALLPRKPAKHPAKPKRGKKLEIEEPGVLYGRYSSHNQKDISIEQQFEKCYELAAEYGIRIIDTYADRAVSGRTDKRVDFQRMMADAAKGKFRYVLAWKSNRIGRNMLEALVNEARFQELGVRVLYVEEDFDDTAAGRFAARSMMNVNQFYSENMAEDIKRGLYDNAANCMVTNGHLPYGYKADETLHYAIDEPRAAVIREIFTRVSCGEAFVDIMSSLNARGITTSYGRPWGRSSFQKILSNERYRGIYIYGDVRIEGGIPRIVSDELYFKVQEAITTKKNPQGRHRVNGDYLLTGKLFCGHCKSPMTGISGTGRAGKLHFYYVCQKRRTEKTCHKKNVRRDVIELKIAKAIRDYALKDDIIEWIADSCVEDHDRRVSESHLSVFEDQLAEVNRSIKNVMSAIEKGIITETTKGRLMELEAERTAIEGKICAAKAAIVPTNRERLVEWLRSLREGDVHDKKYQAGLFDTFLVAAYLYDDNRVKIVFSFTGDKNTIEIPLEDVIDSIDDEASCVRLSSTLSHQENRYALWRDDFLFERRADPPSLPKPPAVFRIHPFPPNSIPKSISITS

SEQ ID NO: 25886 - protein, 513 aa, synthetic construct
MKKCVIYARYSSERQTEQSIEGQLRVCYEFAKNNELIVIHEYIDRAMTGTNDLRKEFQQMLSDSEKTNEWNICLVYALDRFGRNSIEQAINKFKLQKTGKIVISATQRTSRNIDGSQNLDGIILENMYVGMAEYFSAELSQKVKRGLNESRIKGQFTGGVPIFGYEAYGTKAEGRKVRIKEDEAVIVRRIFDEYASGRLIKDIHDDLNNEGVLCHGKPFTRTAFYNLLKNEKYIGIVRFGNQIFDNIYPPIVKKQVFDICRAKAQANKIGKHTDVQYLLKNKVHCGYCGRSVSSDTGTSKNGTVMRYYKCIGRKVDKNCDNVPIRKELLEQLVIDSTYQALATPDLIEKIADLILSAHEKRMADNSIINILESQLQDISTSITNLIACMEKGIVSSSTAKRLEELENQKIALETKISLEKVKESTLIQKRDIVNYLKNAIKKTPRLMIELIIKDVILYKDRIEIHFNYTDLIRPDAEPRQAFLFFKFTKEIIFDYHWMNWKPIKKNIEINLLI

SEQ ID NO: 25887 - protein, 524 aa, synthetic construct
MATVTKIPATVSRFTAAPIAVKQKRTVAAYARVSTDHEDQLNSYEAQCDYYERFIREHDEWEYAGLYSDEGISGTSTKRRNGFNQMVEDALAGKIGLILTKSVSRFARNTVDSLTTIRKLKEHGTEVYFEKENIWTFDSKGELLISIMSSLAQEESRSISLNVTWGQRKRFADGKATAPFSVFMGYDRGENGEFVLNLEQAKVVKLIYAEFIKGFSFVAIARKLTEMGIKSPKGLKSWNPSTIKSILTNEKYKGCALLQKRYTADYLTKKVVVNNGAVPQYYVEDHHPAIIEAETFDRVQDLIAHRSREKHFSGSTIFSTKIRCGECGGWFGSKVWHSKDQYRRVIWRCNAKYADRKSKCGTPRVTEDEVKAAFIRAVNKMSGDRKALMADLREVQQAFSGSEELESRLRELDERLNAEADEVQEMIATNARVAQNQDEYSTAYDAAVGRYESTKAERDSVAAEIRQKGIRRREFERFITELEKLPDAVTEFDESLWGSMVEYVTVRKDKTMVFTMIGGTEIEA

SEQ ID NO: 25888 - protein, 581 aa, synthetic construct
MSRTTNKRPGSAKSGRSRKQKVAIYIRVSTLYQVDRDSLPMQRKDLIAYASLILGIEEYEIFEDAGYSGKNTDRPAFQEMMQRIRKGEFTHVLVWKIDRISRNLLDFAEMYEELQDLRVTFVSKNEQFDTSTAIGEAMLKIILVFAELERNMTSERVTATMISRANSGLWNGGRIPFGYDYDPDKTAFSIREDEEKVCQMIKNDYMEHKSLVHTSRMLNASGYKTRAGAEWSPTAVWIIISSPFYAGIYRYNRYKGTERRVENPEDEWIMIQNHHPAIFSLEEHEKMLAILDENSRNHRSVGQKHQTERVHIFGGIAYCGKCGSKMVSTPGRLHANGYRPTNYSCPKHRKTKECDNPTVSDTQVGEFVINYILNMLGAKKKFSTIENPEDLERCLLYGNTFSEVEHIDSNGLNEYFNLLSRYSSDDSYTFSVKKSRKKKAEVDPEAEALRKEKEKQERAMKRLQDLYLYSDTSMSEKDFIIRKTEISKRLEEINAMLGMVAKNSEPSLSDEEFVRQASHLLISRELQNRQYIYFKNLAQNVSPEILKAYMETVLDSVLLVDGRVSSIVFRNGLTHKFKYKS

SEQ ID NO: 25889 - protein, 556 aa, synthetic construct
MKKKFPIDLSMLTPEEIDQFREDPYTLYHGDIEVSLYLRFSSERQKEQSIEGQLRDCRAFCKRSGYRIVAIYVDRALTARKDAEKRVQFQQMIVDSEKRHWQYLVVWKLDRFARNRNDSAIYKMRLKKNGVRVISATENISENPEGIILEAVLEGMAEFYSAELSQKITRGMRESAMKCHSIGGHVPLGYKIKDHKLVIDPVGAAIVQEAFQLYANGDTVADICRLFNNKGYRTAKGAEFNRNSFKSMFKNERYIGIYTYRDLRIEDGVPAIVDKELFEIVQQRLRKNGEAPARGKAKVDYLLSGKLFCGHCGASMNGESGTGRHGGKFHYYSCYNRKRHRNCDKKPLKKEYIERVVVEDALTLLTDEVIEELADMAISQSDIDLKENTRVPELTAKCDEIDKAIGNITKAIEKGIASDALMERLMVLEKDKKDALRQLREEEKYIYRIDRDQVIYWLYQFKEGDIEDENFRRHIIDLLVNSVTVWDEPDGYRITSAYNLTSAPTKTFKVDGAFSGEGFGFEKLTSTIKSYRYRCVWRKARRINRFRAFSSPDFFF

SEQ ID NO: 25890 - protein, 526 aa, synthetic construct
MQYCLYLRKSRADSEAEALGEGETLARHEKALLDLAKKLNLNITAIYREIVSGETIAARPVMQQLLQEVEQGIWDGVLVMEVERLARGDTIDQGIVAQTFKFSDTKIITPIKTYNPNNEFDEEYFEFGLFMSRREYKTINRRLQRGRMASVKDGKYVANKAPYGYNRIRIENDKGWTLEINKEEADVVRLIFELYTVGEKQSDNTFNRLGTGFIAKRLNTMKVSPKRGKVWVVASIRDILINPVYIGMIRWNWRPQQKKMIDGQLHISRPRATDYVLCNGLHPPIISKETFDMAQELMRHNPARPIGEKNTVKNSLSGIVICGNCGRHMVRRPHTKYPDMLICSEPTCNNVGSQLRVVEERILQSLKEWLGEYKISWDITSPPVERISQVSIKKKALQKEQHELDTLNKQISKIHDLLEQGIYTTDVFLERSRALSLRMDEVKEHIAILDKELKTEITREDSAVNIIPKVEKLLEVYHDLPSPKAKNDMLKDVLEKVVYTKKERSKKGNLDNFNITIYPKIPKYIT

SEQ ID NO: 25891 - protein, 576 aa, synthetic construct
MKKNFKMPGSGSETPIRVAIYVRVSTVYQIDKDSLPMMKQDLTSYCKYILNTDDFVIFEDAGYSGKNTDRPAYQKMMSQIRQGLFTHLLVWKIDRISRNLLDFANMYAELKDLGVTFVSKNEQFDTSTAIGEAMLKIILVFAELERNMTSERVTATMINRASNGVWNGGRIPFGYSYDKPTQVFSIDPEENKIYNFMVETYEDTQSIVHTSRRLNEAGYRSRNGNMWSPVAVWTILRNPWYKGVYRYNYYKIPGRKAIKDESEWVIVENHHPASIDPDRFDRIQATLDKNARYRNTPGRKTAQKNVHVFSGLVWCAECGSAFTASPGKLHVSGYRPSKYGCPNVRKTKTCHAKYTSDVVLGEFLLNYILNILNAQKQFAYIHSTDDLQKRLLHGSTFSNVDHVDPDGLASLLNMLEKCSGSDPVLLKRPRSKPKMDPELKRMMADQKKQQRALDRLNDLYLYSDDSISEREYLVRKQQITDRLQEINEAIGMMSQESWMRTMNDEEFIRQASSFILTQKLADKQYIYYENLAESLDPEILKNFFVSILDSIILRDGRPETVVFRNGLSHTFTYKDS

SEQ ID NO: 25892 - protein, 464 aa, synthetic construct
MKQANTNIVRVALYPRVSTEEQFLRGYSLQTQEEVLVQYAADHGFKVVGIYRDEGHSARKPAMKRAVMQQLLTDVQAGKIDRILFIKLDRWFRNVREYHKIQEILEANHVTWQATMEDYNTATADGRLKVNIMLSVAENESDRTSERIKFVFDGKRRRKEWCFTGGQDKWPYGYRPEVVDGVKRCVKDPETAPIVQDFWDYVLNYNSVRKAGMYCCEKYGITRHYRSWSCTARNEIYTGTFKGVEDYCPAYISREDWERIILGHETIKKTQRPERIYLFTGLLRCPDCGTTLKATFKSDPRDRNKEYLSYRCGRANINLCTFHHQLSERRVEKYLLNNIRAQLEEYLVDVGTQQTQKRRQLNIQDVLSLNEQLRRLNIIFMAGNISDEEYASETKRLKQELEKSKQAAQQTELPNLQAIKDFLSGNILDLYATLPKEDKRRLWRSLISEIQVEGTTPKKIIPRP

SEQ ID NO: 25893 - protein, 562 aa, synthetic construct
MDIHNIRQLLRAKTIYDLPLRVTFYARVSSESDEQLNSLGNQIGYYEDFIKKNPAWTFVPGYIDEGISGASTRHREDFNRMVEDAAAGKFDFVITKEISRFARNTLDSIQFTRQLLSSGVGVFFQNDNINTLDEDAELRLSIMSSIAQDELRKLSSRVKFGHQQAIKQSVVLGNSRIFGYTKDDGRLVIDETQAPMVRELFTLYATGAYSMKQIENLFWEKGYRNLNGKKIAHTTMSNMISNPKYKGYYVGNKVKVVDMFTKKQKFLPPEEWVMFKDETGQIVPAIVSEELWEKANAVLLRRSEDVKNRQGICNHANLLTGKLFCTHCGTAYYRRESKDKLGNQNSKWVCSNKIKSGADACDSFPIYEKELVPLLFEVFRDTRQASAAMIAEYEGMYRSMTCDGNLEKKIEEAQANIDLAKKKKSKLLELVTLESITPADFKAMTAQCNQEIKSGEQVLLELKDQQESSEEFRANMEHLRKVLREAEKQCQTEAITKDFIDIFIDRIYVTPEDDNTLRLDIKIFTGDTCEKYLGKLKRRANPEGSTGHTFKKMIEAYESGMQ

SEQ ID NO: 25894 - protein, 500 aa, synthetic construct
MRMCGYARVSTDEERQLDSLEHQMEFFSDFAKQNGHHLVNVYTDEGITGRQLKKRDAFNKMLSDSKLGLFDLLVVKDVSRFARNTVDLLTSIRQLKSRGIDVIFVNNSQKVLGESEFVITLLGAVAQEESSNLSKRVKFGKNITSKKGRVPPRIFGYDRIDNFTMEINEREAEVVREIYHLYIDEGLGCRLIAITLGEKQMKTKFGNDWNQRNIRRILENPIYSGHYINHRYTVVDFLEGTTKALPKEQHYHHDRPEWAIITPERFQQAQEILEQRRKQYATEYTHFTGRYSNRHLFSTLIRCKECGRAFSRRVTHYPNSDYIYWRCPTNNQYTAKRCSNNTIVREDDLIETLSTYLREVVSNKESIAQEIARKFKEANAVEGSKPDAQALEAKKVKLKAKLEKYMEMYANDIITMEALKSKTAEINESINVIDDQLILLEGQRTQERTIESITNEAMAEIERFLSLQSATNMDLRRIIDSIIVDDKKKVKINLKITGNL

SEQ ID NO: 25895 - protein, 622 aa, synthetic construct
MQQALNAVIYARYSSHSQQEQSIEGQLRDCYAYAQREGLQVVGEYIDRAISGKTDERPDFQRMIADASKKQFQRVIVWKLDRFARNRYDSAHYKAKLKKYGVKVVSATENISDEPEGIILEGLLESMAEYYSANLSKHVRRGQRESIINGTYLGGVPPIGYKVENKRLVIDERTAPTIRYMFEQYAKGVPKREIIAELNARGIRNKKGKPLTLSSMQAALRNEKYIGIYRYSGQEVMGGCEALIDEATFRKVQERLDKVKHAPAAAKAKIDYLLQGKAFCGYCGSRMVGESGRGKMGNTYHYYACGKRKKEHTCAKKNEKKDFIEWYVVEQTVEYVLTPDRMDYIAAALVAQYEKDFGDNRIKDYEKQLERINGEIRSLVDTLAVCPPSARQPIFDKMELLDVQKTDLEIDIAKLRVAARVQLTEEQIKVWLKQFCKGDLDDMEFRERIIDVFINSVYLYDDKTVIYYNIEGGKQVSYMEMLDSTEEPPFADDPQGSSGVRISNDTPQLLFAVLQQRTVNIAANQSDVHGCYSLSVFSYFTTVFRCGKAPARLLCPSPVPRSALRLVVHTGHIINRNKGLWVLAVDKVHQLLILVFVHDGNDLVVLFKVVCADGLVHGGTAV

SEQ ID NO: 25896 - protein, 577 aa, synthetic construct
MKKRVYTLYRVSTIGQVEKDDIPMQKEACHEFAERQGWEIVKEFSEKGVSGFKKSAKDRDQLQLLQQAAAAGEFDVLLVFMFDRLGRRDDETPFIVEWFTKQGVEVWSVNEGQQRFDSHVDKLMNYIRYWQASGESIKTSIRTRTRIEQLTEEGHYTGGTVAFGYKRVQKGRLNKKNQAVCDLEIDEEEAAIVRLIFQKYVYEGYGVKRICNYLVENHIMGRNGKNIPTTTLVRMVRNKCYTGYLINGNVEKECPELRIIEQEVFDRAQELRDTRRREKGEDSDSYSPHALLCGKVFCAHCGNRLNITSSGRTRLRADGSTVKEKRFRYSCHYNVRHPGQCDGQSGYGVTKLDAIVESIVCTKFSEILECSKSKLLQDMLRKDMEVAQKEVSRAKSELDLKDDERNALKDEMIRVIREKSSIDRDMIQQLLDENQAAIQAAQDALTAAQNKLEEIEQENKKAENDCSNLFTWASTYQNASFQQRQAILNQFIKEVRVGRDYDIEIILNVPLEEFEEFKSHSLSVRTPSGRKMDLKQAPVRGLGTPNGGIVVFDKTSGEAMNIMPKSSAHVTLRCQDE

SEQ ID NO: 25897 - protein, 525 aa, synthetic construct
MAQRKVTAIPATITKYTAVPIGSKRKRRVAGYARVSTDHEDQVTSYEAQVDYYTNYIKGRDDWEFVAIYTDEGISATNTKRREGFKAMVADALAGKIDLIVTKSVSRFARNTVDSLTTVRTLKEKGVEIYFEKENIWTLDAKGELLITIMSSLAQEESRSISENTTWGQRKRFADGRASVAYKRFLGYDRGPNGGFVVNQEQAKTVKLIYKLFLDGLTCHAIAKELTGRKLPTPGGKAVWSQTTVRSILTNEKYKGDALLQKEFTVDFLQKKTKKNEGEVPQYYVEGNHEAIIDPITFDYVQAEMARRTKDKHRYSGVSIFSSKIKCGECGCWYGSKVWHSTDKYRRVIYQCNHKYKGGKPCSTPHVTEDQVKDAFVRAVNILLSEKEELSVNVQMVIAMLCDSAELEKRQTELKEELEVVVGLVERCVTENARVALDQDEYTQRYNGLVSRYEAVKAQFDEVTQAVADKADRKKLLEQFLHTVEGQAPVTEFDERLWSSLVDFVTVYSEKGIRVTFKDGTEIQV

SEQ ID NO: 25898 - protein, 547 aa, synthetic construct
MNAVIYARYSSHSQTEQSIEGQLRDCYEYAKRYDINVVGEYIDRATSGTTDDRPDFQRMIADAPKKQFDRIIVWKLDRFARNRYDSALYKHKLKQYGIRVISAMENVGEGDESILLEALLEASAEYYSLDLKKKIKRGQRESIAKGKYCGGPIPYGYKLSDGKLLVDEKNAPVIRYLFEQYASGVPMKEIIDELTRRGVRGSRGGALTYNTFSRALTNTTYIGQYKYNGEVVPGLAEQMIDKELFDKVQVVVKANAHAPAANKAEVEYLLQGKAFCGNCGAHMVGECGRGNNGSVYYYYSCANRKKRHSCRKKNEKKDFIEWYVVEQTLQYVLTPPRIKQIAKAVVAEYDKEFAGSKIDDCEKSIRQLDHELNKLVDALVEAPKVAHKRIYERMESLEAQKTAMESDLVKLRIAHDIRFTEEEVRAWLKKFCTGDLFDPEFRRNIIDVFINSVYLYDDRVIIFYNIKGGKQVSYIDVAAALDAAPEAKVSDFITNAPPKPLAICKRFFVAVHSHDRLKDKTPAGRYLPRRKKVSSRSETDEGERSSR

SEQ ID NO: 25899 - protein, 501 aa, synthetic construct
MQRAVIYARYSPGPNQTEQSIEGQVRECTKYAELHDLRIVGTYVDRKISGKTDNRREFQRMIDDSEKHIFDVIILYHTDRFARNRYDSAIYKHKLKENGVELRYATTDIPKGPEGIILESIMEGWAEYYSAELSRKIKRGMRESALKCHSTGAGRCLGYRTAEDKSLVIEPEGAKAVQTVFDMYIKGKSHADICRYLNDCGFRTAQGKLFNKNSVTHIIRNKRYIGVYTYDDITIEDGIPAIISKDTFHLAQLEAARRKTAKRPKEPKAEYLLSGKAFCGHCQKPLVGVSGTGKSGNKWYYYYCQESRAKRGCTKRPVKRDWLEREVVERTVAEILQPEVIQRIAKKCYDLQMEYRQDNSDVLFYELKLKDVRKAIKNTMHAIESGVKTKTLPARLQELENEEEALEAELAIAKASDFVITTDQIEFLLTQFAEPWECESEEEYHRRIIKCFVHKVFLFDDKLLIYYNVSRDGKTREQSEAELLEEALGEGFDKRSSGSTK

SEQ ID NO: 25900 - protein, 580 aa, synthetic construct
MALLPRKPAKHPAKPKRGKKLEVEEPGVLYGRYSSHNQKDISVEQQFEKGYELAAEYGIRIIDTYADRAVSGRTDKRRDFQRMMTDAAKGKFRYVIAWKSNRMGRNMLEALINEARLQDLGVRVLYVEEDFDDTAAGRFAARSMMNVNQFYSENMAEDIKRGLYDNAANCMVANGHLPYGYKADETLHYAIDEPKAAVIREIFTRVSCGEAFVDIMAILNARGIKTSYGRPWGRSSFQKILSNERYRGIYIYGDVRKEGGIPRIISDELYFKVQEVITTKKNPQGRHRVNGDYLLTGKLFCGHCKSPMTGISGTSRSGNLHYYYVCQKRRTEKTCEKKNLRRDDIELQVAKAIKRRTLDDDTINWIADSVVEYSQHQESASGIGLLEDQLKDTQRSIKNLMAAIEQGIITPTTKARLMELEKEQSDIDRKITMAKADVIPVNRDQLVGWLKKLQAGDVHDKKYQAELFDTFLIAVYVYDNPDGQDYMKVVFNYAGSKNTVEIPLDPSVIDNVENIETGAVRLSSAQVHHCRARRTMPVRLAFCYAQRSAWSAVFSRCPIRCHTARLVFSHKPKPSCVFSV

SEQ ID NO: 25901 - protein, 519 aa, synthetic construct
MAANVTYIPPKAAKPEALRVAAYCRVSSDSSDQLHSYATQIKAYTEQIGAHTDWELVDVYADEGLTGTRMDKREDFQRLLADCRKGKVDRVLCKSISRFARNTKDCLAALRELSALGVTVYFEKENIDTGTLTSELMVSVSGALAQQESISISQNLKIAWRRMMAAGDFVTTNPPFGYELVDGCGLRIKESEADIVRWIFASYLDGISTREIAKSLTERGILTTEGNAVWNPRSVQLILDNEKYKGDTFTLKRYTTNQFPFAVKRNHGEVDQYYIENSHPAIINTDTFERVQKLKERRTRKRQLDKQDSPLRGKMACGVCGTALMRRTTGKGLISWVCRKHDESAADCPVGRIPETEIYAAFMRMYNKIRANADIVLKPALTQLDDLERALQRENPAMLEINQAIAQVAEQSHNISKLQTAGLLDADACTAKLSSIQTKLTQLRRERRRLLEHDDIEDAISRLHQTADTIKFGPEQLDTFDESLFEELVERIIAESQTCIRFRLWGGVELTEEVRRAKR

SEQ ID NO: 25902 - protein, 542 aa, synthetic construct
MEQTAQRQVRIIPATKNVNAPLKGAQKHQRVAAYCRVSTDSEEQITSYEAQKAYYTQKIEENPDWELAGIFADKGLSGTSMKKRENFNKMIAACKKGKIDTILTKSLSRFARNTVDCLETVRMLKANGIGVIFEKENINTLTESSEFLITLFSGFAQAESESLSKNIIWGKEESKKAGKVPFQYKKLLGYRKGPDGKPEIDPQEAETVRRIYRRYLDGCSLSQIQQELEADRVPTAQAIQRWSYQVIRNILTNERYIGDAMLGKTFTTDCISKRVKKNNGERGQSYVRNNHPAIIPREMFYRVQEEMARRSSKRKVMQKTGKTELGKYSAKYALSELLVCGECGTPYKRVTWARNGKKRIVWRCISRLEFGTKYCHNSPTLDEEKLHQAIQEAINEFAQAGTEVKEDMLTFTAMAWGGDTVGGVSLIDLRQKLKDITAQQALLLDQVLEHMDDEVLNAQLKVMMDEKQALQEQIAAAEQSQTHNAAQKSRMAELREWMAKLEVNQQYSDEQVRMAVERITVVDAETIRIRFRYPGTELEKKL

SEQ ID NO: 25903 - protein, 522 aa, synthetic construct
MAKRLHGALICARYSTDNQNPDSIEVQVAKCTEWCHTHNIPVLGVYADEATSGMKDTRPRYAAMMRDLRDGVGDMVVIYDQSRMFRKMTSWFSFRDQLTQMGVDVVSVTQPMIGKDLRDPTNFLTEGSMALFNQIWALQSRQKVMEKMRFMAKNGQHTGGKPALGYEVVDGRLAICEAEAKIVRRIFEEYGSGKSYREIVAGLNADGIKTKRGSAFGANSLHDLLKNEKYIGTLVYGQRPYREDGTRNTHAAAADSIRIENAIPAIIDKELFAKVQDKMAANKRQQGGRPPTKRDYPLKGKVFCAECKSAMTISTSQKIYDYYKCSGKKRRHDCDGVNISVDVLERTVANAVRQVLGSPKNVERLITILRDQSGEIQAQAVDALRQLIAREREISRKLDNATDAILGGLSSPTLLARVKDLEQEKTEIDRQMRELKATVDASAIPETRLREIIDEISGDNPAGNAALLAIVCRVEVAKDTITIWTMLDTHPDGTFDWSEEGVLITPGTTSGVPKGSSYRTPL

SEQ ID NO: 25904 - protein, 572 aa, synthetic construct
MASRIAEKLAAKKAAIYIRVSTHWQVDKDSLKVQRRELIAYVTLVLGITDYVVFEDPGYSAKNTDRPEYQAMMDRIRTGEFTHLVVWKIDRISRNLIDFATMHDELQSLGVTFVSKNEQFDTSSAIGEAMMRIILIFAELERKTTAERVTAVMLSRASDGQWNGGRVPFGYSWSKETKTFSIVPEEAKAIRRMAELYEQYQSLLYVAKYLNDAGIVTKTGGQWTPTTVRTILTNQWYIGQYVYNVHSDGKGIEKRDSDEWITVENHHEPILNEDVFCRMKFLLTRNKRGGVPSHKTYVRKNIHIFAGLLRCGQCGSNMTANLDRRRANGFRPSQYACGSRRRKGTSCTNKYISDTTLGPFVLNYVANIIRASKNSSEATTPEVLERKLLRGEAFEDVASVSTDALGQLLDAFRSAGDAVEYRPQIAFSGDDNSIREIDTLRARRRKLDNALARLNALYLYDDEAMPEKDFVMQRGQITKQLEEVNARIEELQNQESSEELGDDFIGKASYYIMANKLIEDRYIDYEKYIRAIDPSIPRSFLQQIIDHIVVNDGRVISITFKNGSTHTFTYKT

SEQ ID NO: 25905 - protein, 464 aa, synthetic construct
MARSVTVIPARSQKVRTGHKAVQEKKIRVAAYCRVSTDQEDQLHSFEAQVEYYTKYINEHENYEMAGIYADEGISGTNTKKREQFKKMIADCEGGKIDLVITKSISRFARNTQDCLAYSRKLKNLGIGIIFEKENINTLDSTGELLFTILSSLAQDESRNISENCKWGIRTKFKNGEMHLNTFKFLGYDKDENGKLVINKEQAKTVRRIYRDFLIGINPAQIAKELTEEKVPGCLGQIKWYPSTVIGILKQEKHMGDALLQKTYTADFLTKRQVRNNGEIAQVYVKDSHKGIIDKQTWNAVQEEFDRREKFMESHGTDRYSYGADCMPFCEKVFCGECKSLFTRHSWRSRGIVQWQCKNHRKDGKVACTNAYVDNADLEKGFVKAFNTLVMDRDKHMERWQQMKSDGTPLEKIRAGQMMEAVENEPLTRFVPEIAQLVLCEVTVLGAKKYEFFFLEGSRVKVSV

SEQ ID NO: 25906 - protein, 502 aa, synthetic construct
MEIQIREENSRQKRKLKVCAYCRVSTDADEQENSLENQIRHYKEVITSNPDYEYAGVYSDFAISGFKEKRPGLQKMLADARKEKIDLILTKSVSRFARNTSIVLEATRKLKELNVGVFFELQNINTLSGEGELMLTILAAFAQAESESGSVGAKMVYQRKYEAGIPVQYLERSFGFKKDERGVYIADEEEAAWVRKIYEMAADGYTPASIKRYLNENGVKTVGGAEWIDSTVFRLIENEIYKGDYIMHKHFVNEERKLVRNRGEVDAWYIEDDHEAIVSPKLWQKAQDALEAKRDYLAEGSVIEEFTEENYPYMNKIFCARCGHPLYKRIYSNGNRLNWGCSGTKRYGKSFCEGINIPDGVLRGAWHFDENMYIGEKPTEKGKKEFTYLKEASWKRRHKKKEPEPIPENTETEYPYREKIFCGLCGSRLVRHVNTKSHKVIWVCNGRKRKGKDFCDGTRVPDTIIKGWGEIKKDIYIQRKDDKNGKKRYSYTGKKPKGADRA

SEQ ID NO: 25907 - protein, 700 aa, synthetic construct
MDSNAFLNDLMSKMKLPEAKGKKKAEQNESVAQILAAMQKVRAEKKKPPVTSYAPVKEMLVNEPESMEEFSQLASDVMQECRPAMPTVKTSISEKAVRVAAYIRVSSTNPAQEDSYEMQERYFMSLLAGNAGWTSAGIYSDHGISATSRDGRTGFNRLLRHCKQGKIDRVICKSISRFARNTQDFLVALRTLKENNVTILFEREAMDTADAYSEFILTTLAAIAQEESRSISANIAWSNQKRFPAGNVCNKDIYGYEFRKGEYTVNENGYRYRAVFIIPEEAEIVRMVFRLFTKEELGFTQIAQKLDALHIPPPNSGCRQRQKRKPTVLPAGTLKEEDKRGWTATDVRYMIANVRYCGSVLCQKTYTDHRNGHKQKVNKGEKPKYLIRNHHPAIISEELWQEAQEVWKAYTAKYRGIEKGRNERNYSKLLLCGKCGRYFQGHSTTRTTIWRCATKLAQQGLKRCRMEPIYEEQIQTLLCKAFAEKFKLGEEMDAEVHEVMQMISKAPIDNARNQALKNLTEKLREIHDFDHMEQEGDFLKRQLSAVNYSIRDVHQHIRDIQAEKEALKVRCEVLGEPRDKEAVTELENRLLNEEEQLEKLEHEAQQQAEQVRYMEDYWKKLEQTHEIREKTLQWLDSLAGGTQMFLDEAVGTYVKAFVLSVTIFSPKHFRIHWFDDTCTEVECDSVFEGYQQPGMIRRKY

SEQ ID NO: 25908 - protein, 522 aa, synthetic construct
MGNVMLIPARRQVGSNARKKEEEKPKLRVAAYCRVSTDSDEQATSYEAQVEHYTEYIQKNPDWEFTGIYADDGISGTNTKKREEFNRMIDDCKDGKIDMIITKSISRFARNTLDCLKYIRELKDMNIPVIFEKESINTMDAKGEILITIMASLAQQESQSLSQNVKMGIQFRYQQGKVQINHNRFLGYTKDADGNLVIDPEQAEIVKRIYREYLEGLSMDKIAAGLERDGILTGAGKAKWHTSTINKILRNEKYIGDALLQKTYTTDFLNKTRVKNNGLMPQYYVEGNHEAIIPKEIYLQVQEELVRRRVVKTSANGKKRSYSCNHCFSQIVICGECGEMFRRLHWNNRGVKSIVWRCISRLESTGLECHARTINELVLQDAVVKAINQMLGDKSSYQAQLQLNIASVIRASQATSVENIDEKLMALQQELIQKAQSKEVYDEIADEIFRLRELRQQTTVDTAARDEQIKRINDLQDYISQQTAHLTEFDELLVRRWVKQITIWDDRITVELKSGVSIDVDA

SEQ ID NO: 25909 - protein, 526 aa, synthetic construct
MPYCIYLRKSRADAEAELAGEGETLARHEKTLLALAKKLKLPITKIYKEILSGETIAGRPVMQQLLQDVEAGIWQGVLVMEVERLGRGNTLDQGIILNAFKYSSTKIITPMKSYDPNDEFDEEYFEFSQFMSRREYKTILRRMQRGREASVKEGKFAGSIAPFGYRRVKLPQEKGFTLEVEGAEAAAVKLAYELYAYGDPQPDGTFADIGRATIAKRLDQMGIRNRKGGTWATASVTRMLQNPVYIGKVHWNRRPEKKHTENGKIKKTRPLAENYLLVDGLHEPIISEELWNLAQAKMKQHYRPTGVNGITQNPLAGLVHCSYCGNAMQRRPYLKTGQPASLICTTHFCPQISSPLYMVEGKILEALSLWMKQHEPTWEEESSADVFSTKIMALEHAIADMEQELQGLQSQFEKIFEFLETGIYTPEVFTARNKTLSEKMAEIRSAIEETQAELSKLKAARKNQVSMIPKIKNILDTYETLTPAEKNKLLKEVLDHVEYHKKIKGKKNVPADNFEIILFPKISPEN

SEQ ID NO: 25910 - protein, 520 aa, synthetic construct
MPRKKAPAAEAPRLVAYYRYSGGSRQTEQSIEGQRRDCEAYARAHGMTILREYVDRHISGKTDDRPAFQQLVADSAAHTFDAVICWKTDRLARNRYDSAVYKKKLRDNGVEILYAAESNISGAEGIIIEGLMEALAEYYSAELAEKARRGMRESALKGKALGSSRPLGLTVDADKHYIIEPTGAEAVRYIFEQYAAGLSSSSIVERLNAMGLRTSHGGPFNKSSINRIIQNEMYRGVYVSKKFDVRIEGAIPAIIDNDLWERAQKMFERNRQSRTPHASRADYILSGKLYCGECGCLMKGVCGRSSGNGQMYHYYACPGRSIGRACTRKNIPQDELEAMVVNSVADLLLEPELLEQIADAIVELQQAEAARPDPEKQALEKSLSDVRSKIQNILTAIENGTSSAALSARLADLEQQESTLSYQLSSLTAKKPLTFTRDQILFLLQQFRVSPSERTKAYCRRLVDTFVDHIELTNTELILYFNISDETIDKNKKAPRSNPSKESSTEKRLVRVARIELTAS

SEQ ID NO: 25911 - protein, 571 aa, synthetic construct
MKTTDQPQVKQYVIYSRKSKFTGKGESIENQIELCRQYIAMHFGEDEAEHALVYEDEGFSGGNLERPQFKQMMKDSQKIEFAAIVVYRLDRISRNIGDFAKLIEDLGDRHIDFISIREQFDTSSPMGRAMMYIASVFSQLERETIAERIRDNMHELSKTGRWLGGTTPTGYASESLSSVTVDGKVKKACKLKPIPEEIQLVKTIFSVFTESGSLSKTDQYLLEHRCVTKRGKQFTRFAIRGILTNPVYMIADDTAYQYLKENNVDLFAEPSEFDGEHGIMAYNRTLQRPGKATQIRPMEDWIVAVGKHPGIISGANWVRVQSMLDVNKSKSYRRPRSNVALLSGLLRCGECGDYMRPKLTGRTNANGELIYTYMCSTKERSHGAVCSMKNCNGNTLDAKIVEEIRKVATDKKDFGQLLSKTKKVINDNKASYEAELTLLVKNHAETEARIKRLVESLSVASETSAKYVMEQIDELHRQSEQEQTRIAELEKLARQSNALSQNLFFYRDMIESFADTVDSTTIEERRRLLRTIVKKVVWDGKNVYVYLFAEDGELNLPPIGQLMCPSGEDSE

SEQ ID NO: 25912 - protein, 448 aa, synthetic construct
MERIIQKVTPPARKKAPKLKRVAAYARVSSGREAPLHSLSAQISQYSGMIQKTPGWQYAGVYADEALTGTKDSRGEFQRLLADCRAGKIDMIITKSVSRFARNTVTTLRTIRELRLMGVDVFFEEQNIHTMGEDGELLLTLLAAYAEEEARSVSENQKWRIKSNYEQGLPWSITMYGYRQVNGRLEIVPEEAEIIRLAADLYLEGYGRYKLEDAFAAVNIKGRHGANMGGNSIVDLICNEKIVGDMLLQKTFVVDPITKEVRKNNGEKPQYFVEGSHEGILDRETYEKVLAERARRASAYKPRSGSYERNRFPFSSKVRCGKCGKCFTRKTVAPKTPYEKQVWICRTFNQKGKAHCDAKQIPEEILKRVSAEAMGLPEFDAAAFAAKVEEIQVPENGVLVFVFYDGHTVTKTWDNPSRRHSWNPENRQRARELALRQAAERRLAKCQQ

SEQ ID NO: 25913 - protein, 537 aa, synthetic construct
MPAVTAARVTVIPAKKDRLPINVLSNEARKLRVAAYARVSTNNEEQLTSYEAQVDYYTRYIQSKDEWQFVEVYTDEGISATNTKKRDGFNRMVADALAGKIDLIITKSISRFARNTVDTLTTVRKLKEKGIEVFFEKENIRTLDGKGELLITIMSSLAQEESRSISENVTWGQRKRFADGKVSLPYRRFLGYEKGPDGLPVIVESEAVIIRLIYRLFLYGKSPSAIATYLTDEGIPTPGGKKVWRAKVVESILTNEKYKGDALLQKKFTVDFLTKKQKVNEGEVPQYYVTNSHPAIIEPELFDLVQYELKTRKTDGRFTSCLHPFSGRIICGECGGIYGSKVWHSNTENRSLVWQCNEKYRGQHCSTPHLAEGEIKAAFLAAFNIVLGNRDEIMEAYEEVIAALTDTADLDAEQETLENESEVVLGLIQKIISENAQTAMDQEEYNRRYDAYSERFEAARKRLAEIAELRQERNAKKTRIRLFMENMNNHQELVQSFDEELWYSTVDYVTVYEDKRLVFTFRDGRQVEITAELWRAA

SEQ ID NO: 25914 - protein, 543 aa, synthetic construct
MEVTKVPKKIVTVIEPKRSMTVDKEKYRQKRVAAYCRVSTDSEEQLVSYTNQKKVYTEMIASRKDWCFAGLFADEGKSGTRADKRPEFNKMINDCLAGKIDYIITKSVSRFARNTVDCLDYVRMLKSKGIGVYFEEQQIDTLKTDSELYLVIYAGFAQSESESISKNITWSVRKKFEEGTPVFMYKRFLGYKKGADGEPEIVPSEVAIVERIFNLYLAGETVDKISKMMQAENYDIPGKSISFSKGMIMNMLSNERYCGDAILQKSVTIDCIEKKRKKNTGEAPMYYVQNNHPAIIDRVTFNKVQEELARRKTKTPGSAKSSITSTGKYSRYALTDVLICGNCGTRYRRVTWSRNGVKRIVWRCISRLDYGKKYCSDSPTIMEDKLQEAIVRAVNKFNEQDNATYKALMRATISEALGLNGDPEEVDMLERKVEALNNKMLALVNESVSSGDGIEAHESEFMTLSQETELLKQRIAAIQESTAKDNGEQSRIEQIQAIISERESKCMEYDDAIVRQMVECIKVYPGGKLGIIFGGGYLVEESV

SEQ ID NO: 25915 - protein, 513 aa, synthetic construct
MSEVRLITPITRQSTKKMQVAAYCRVSSNSADQLNSYAAQIRAYKKLIGERDDWELVDIFADEGLTGMKSETRDEFQRMIRMCELKQIDLIITKSISRFARNTKDALAYVRKLKLLGVGVQFEKEGISTLSMGDEMLLNTFSALAQEESQSISMNQRLSIVKRMELGEYVDSNTPYGYRLVDKMLAVYEPEAVIVRNIFTLYLQGFSTSEIARELNKLNIPTKSGKETWRPSRVAYILRNEKYIGDSFYQKTYRETTVPFNQHTNRGQEDRFYAKGTHPGIVDKNVFDTVQTLIEKRKENFSKVTTQNIYPLTSRIQCSECGSFYRRRIVSGTVKWVCSLHKDDSTACSSNYYSEERIYDGFISMVNKLRFSEDNILGQVISRLEMTLVAMKRNNTAARDLSKSIAELNAKLLMLEQLRSKGYLAPEVYQAQANEINAELAKLKDVRQEKFNSKAATMLEKVRKLKMLIFELEEPLEAFDEKLFLEIVKSIQINKEDEMSVELLGGLRFRERI

SEQ ID NO: 25916 - protein, 557 aa, synthetic construct
MDIYSTRERIRKENINFMNLPLRVTFYARVSTDFNVQLNSLDNQITYYTDFIRKNPNWEYVDGYVDEGISGVSTAKRERFNEMIEDAKAGMFDLIVTKEVSRFARNTLDSIRFTRELLSSGVAVYFQNDNINTLDEDSELRLTIMSSMAQDESRKISTRVRFGHQQAIKKGTVLGTNNMYGYIKKDGKLMIDETQADFVRELFEMYATGKFSMKQMEKHFYQKGIRNSKGKMLSHSTMSNIIRNPKYKGYYAGNKVRITDLFTKKQKFLPEEEWVMYKDETGETVPAIVSEELWDKANEVLYMRSQDVITAQHKTVHQNLLTGKLICAHCGMPYYRKDAVSKGGEKISKWVCSGKIKNGASSCPSRAIYESEIKPIIEDIFKSGQQHIEELSACVLKLVSEVLDTNENKDELNRLNQELITRQKMKAKLLQYNADGRMNDSEFIRMTADCDNEIKDIEKKINALNKTSKTEREMKKELAEIKAILKAAEKHIDGEEIDRAFIDRYISNITVYPDEEITRFEIHLKAGTTVTKTLQNLTSRAGSNSKKMIKAYEESMK

SEQ ID NO: 25917 - protein, 510 aa, synthetic construct
MSYFIYARKSRKDAELEALGIDVLERHITTLLELAKTLSLPIGAIYREVVSGDSIDARPVMTQVLSEVEACMWDGALVMDVDRLARGDTIDQGRVQRAFFYSNTRIVTPNKTYDPANEYDNEYFEFSLFMSRREYATIKRRMQRGRERSSSDGYYVGNVAPYGWERVIAPDGKHYSLAPHQTEAPVLDLMYDLCGNKQYGYQKACTYMSNMGILARSGKPFTPSTLKGIISNPANIGKVRWGHRKTVRAVKDGRVVKSRPKATDYILSDAAWAPRISPDLFKRANQPKGCFSAPVRNDRPIQNLFAGLVRCSQCDRLMVRKKAQTKTPYDMLICQYTECSTVGIRIDELEEALLGWLKDYIAKYEFADTHEEDTAAIAAKELIVTNFETEHQTLLKQRESLFDFLEQGIYTKEIFIERSNALEQRIRDCMNNITAAREDLHTTIARQANRKNFVPKCKNLLSEWDSLTVSEKNSALRQLIDRIVLTKTKRNKKNQKNSEFTIDVYPKVPK

SEQ ID NO: 25918 - protein, 463 aa, synthetic construct
MSEKIKRCAIYIRVSTSEQMMHGKSIEAQREYLACYAKDHGMIVTGIYADEGKTARKELKKRKAIHALLEDVKAGKIDVILFWRLDRWFRNMSDFYKVQDILDEYGVYWISASEPGINMETRDGRLQLNVVLSIGQNEVDTTSERIKFVNEASIRQGKVIFGENNMPRGYKVGIVDGKKCMVKDPEQEEMVNAFYDYFEKHQAKQQTLRFIQRNYDPAFSYGMLRTMLSSEFYKGTYRGIPYCPAYLSEERWAHIQNISKKSIRHTRSGRVYYFTGLIRCPQCGQILCGTGCKSIVNKKTGEKRDYCYYRCNRAMIDRICTNQHRVSQNLIESYLLDNLENEFKTYKIRVENVKQQKKKAPPVRTEKQIDKELDRLNLLFQKGRIEWDYYSREYDSLEKEKEDLNSVTVDPEPDYSFIETLLQQDFRDIYRSLTPENKRAFWKNTIRQIYLKSDYTIDYVDFI

SEQ ID NO: 25919 - protein, 556 aa, synthetic construct
MDILKTREQLRSCSIYDLPLRVTFYARVSTEKDAQLNSLDNQISFYSNMIKKNPNWEYVEGYIDEGLSAISTEKRENFHRMVTDGENGEFDMIITKEISRFARNTLDSIRFTRELLHFGVAVFFQNDNINTLDEDSELRLTIMSSIAQDELRKLSSRIKFGHQQAIKDHVVLGNSRIFGYRKDNKRLVIDEDEAKMVRELFELYATNEYSMKQIENIFWEKGYRNHNGNKIAHTTMSGMISNPKYKGYYVGNKVKVVDMFTKKQKFLPPEDWVMFKDETGEIVPAIVSEELWDKANDVLERRSKDVKNRQGKCNHGNLLTGKLFCTDCGATYYRRDAKDRQGNKNSKWICSGKIKNGADSCKSFPIYESDVVPILLEVFKETSCDVEELINQYVEMYKSLSQPEEVGRRLDELKKKMDLEQKKKSKLLGYNVSGQISDRDFISLTKQCSNEIALCEKEISALENEMQTRNDFKKRIEEMRRTLKRASEDANSGVINHSFVEKYIDKIYVTPIDETHMEMKIKLFTNETTTKYLENLRVRTGHTFKKMIESYENSMK

SEQ ID NO: 25920 - protein, 510 aa, synthetic construct
MSYFIYARKSRKDADLEALGIDVLERHITTLLELAKTLSLPIGAIYREVVSGDSIDSRPVMSQVMAEVESCMWDGCLVMDVDRLARGDTIDQGRVQRAFFYSNTKIVTPNKTYDPANEYDNEYFEFSLFMSRREYATIKRRMQRGRERSSSDGYYVGNIPPYGWRRVIAPDGKHFSLAPDPTESPVLDLMYDLCGNKQYGYQKACTHMAEMGILSRSGRPFTPSTLKGIISNPANIGKVRWGHRKTVRTVKDGKISRSRPHSSDYILADAVWPPRISADLFQRANQPKGSCSTPVRDDRPIQNIFAGLVRCSQCGRLMVRKKAHTKTPYDILICQYTECPTVGIRIDELELALLEWLRNYIDKYELTDALPEDVENVAAKEAIVKNFEKEHETLLKQRESLFDFLEQGIYTKEIFIERSNALERRVKECMEHIISAQNDLHATLALQANRKNFVPRCKNLLGEWGRLTIPEKNSALKVLIEKIMFTKTKRNKKGQDRSDFEIDVFPKVPK

SEQ ID NO: 25921 - protein, 548 aa, synthetic construct
MKFKYPAMGTTKNAVIYARYSSHSQREESIEGQLRICHEYAKAEGLAIVGEYIDRAISGTTDARPDFQRMIDDAKKKQFSYVIVYRLDRFARNRYDSVLYKHELKQCGVKVVSATEGIGTGDESILLEALIEASAEYYSMELSRKIKRGRQDSAMKGNFLGGAVPLGYKVVDSKFIIDDETAPIVRYIFERYAAGIGKKQIIDELTAKGYMRRTGKPFTYRAFDSVLRNRKYTGEFTQTGITVEGGCPAIVDTEMFEKVQARLEINRRAPAKAKAKTEYLLSGKMFCGYCGEPMIGISGTGRHEKTFYYYSCVGRRGKSGCKKQHEKKDFIEWYVCEQTVQYMQDPERLSHVAKRIIEINDAEFDGGKVKELERAVENCDNDIRKLVDALTTIPDAGRAALYDKIERIGAAKADMEIDLAKVRVLSEVRYKQEDVEAWIRSMCRGDLMDFEFRRQLIDVFINSVYLFDDRVVIVYNIKNGKQVSAIDVLNAVEELDGVELSSDSTEDGNAGGSGSFLVADAPPYMKNPNLFPIGNGFGFFIFIKDIID

SEQ ID NO: 25922 - protein, 571 aa, synthetic construct
MSIRDKLSALKVAIYIRVSTHWQVDKDSLKVQERELISYCQMVLGINDYVVFTDPGYSAKNTDRPDYQAMMDRIRTGEFSHLLVWKIDRISRNIIDFATMSEELKHLGVAFVSKNEQFDTSTAMGEAMLQIIMVFAQFERKQTSERVTAVMLSRAGNGQWNGGRVPYGYLWDKETASFQLCETESGYVRRMAQLYEEHQSLLYVVKWLNDAGIKTRRGFAWTPTSVHVILTNPWYIGQYVYNVHSDGKGIERRDESEWVCVEHHHEPILSEDQFYRIKFLLTRNRRGTPTPGKSYARKHTHIFSGLMRCGICGSNMSASADKRRANGFRPSQYACASRRRKGTTCTNKYISDLTVGSFVLNYAANIIRAARNSAADIQPDVLERKLLRGETFKAVESVNHEAVQQLRSSFAEAGEAVEYRPQYAFTSASGEGRDMDNLKARKRKLETALSRLNALFLYDDEAMPEKDFIVERTNIERQLAETDKRIAELAATGLSSSEDSSDFLKKASYFIMVNKLIEDASVDYEKLVRTLDPTAIRDFVLNIVQEVEATDGRITAITFRNGTAHRFKYKT

SEQ ID NO: 25923 - protein, 605 aa, synthetic construct
MRIINKIEPKIPQMPSRKKVAAYARVSMESERLQHSLSAQVSYYSELIQKNPAWEYAGVYADDGITGTKTNDRTEFNRMLADCEAGKIDIILTKSISRFARNTVDLLNTVRHLKELGISVQFKKERIDSLSEDGELMLTLLASFAQEEIRSLSDNVKWGTIQRFKQGIPNGKFNIYGYKWVGDKLAVIPEEAKIVRFMYREYMKGASRIEIGRMLMEQGIYTRQGYQWVDSNVKVILTNITYTGNMLFQKEYCLDPITKQRKKNRGELPQYFVENTHEAIIPMDEWQAVQEEFQRRRDLGPFGNKSLHLTAFSTKITCGCCGKHYRRSGKRNTAGEVYYIWICQTKSQKGIKACDSKSIPEKMLQKVAADVLGTAEFDEDIFSKLIKEIMVIGTDTLIFRFYDGHEQTTTWVSTAKADWWTPERRRLWGERHKRKDTNPNKNTYYEFTGFIKCGQCGANYRCQANVRKDGTRTRSWYCTGPRSECSNKGIRDETMKALVTEALDLDAFDESVMDAQIEYATVINNTVTFHFRDGHTVTRPYLDKRHGVKWTAERRERQVQSIRASWTEERRKRHGEIIREIRREKRGESNDYTGNDKPVHGNADQ

SEQ ID NO: 25924 - protein, 523 aa, synthetic construct
MAKVTTIPATISRFTATPINERKKRRTAAYARVSTDSEEQLTSYSAQVDYYTNYIKSRDDWEFVSVYTDEGITGTNTKHREGFKRMVADALAGKIDLIVTKSVSRFARNTVDSLTTVRQLKEKGVEIYFEKENIWTLDSKGELLITIMSSLAQEESRSISENCTWGQRKRFADGKVTVPFKRFLGYDRGPDGNLVLNKDEAVIIRRIYTMFLQGMTPHGIAARLTADGIKSPGGKDKWNAGAVRSILTNEKYKGDALLQKSYTVDFLTKKKKVNEGEIPQYYVEGNHEAIIQPEVFELVQQELERRKQGRGRHSGVHLFSGKIRCGQCGEWYGSKVWHSTDKYRRVIWQCNHKYEGEEKCSTPHLTEDEIKAMFVTAANKLIGKKAAIISPLRASLDIAFDTSALEAETEKLQEELMVASDLIQKCIYENAHVALDQTEYQKRYDGLTARFDSAKAQLEEIDSAIADKKSRRAAIDAFLDTLAQADLMEKFDPALWCGLVDFVTVYSKDDVRITFRNGMEIRA

SEQ ID NO: 25925 - protein, 538 aa, synthetic construct
MQENYIVGIYARLSRDDERAGESVSIENQKEMLSRYVREQGWTLYDYYCDDGVSGTTFDRPGLNRLVQDATDHKINLVLCKDLSRLGRDYIEAGKYTDFVFPSLGCRFIALNDGVDTLRKNNEMLVILKNVMNDLYARDTSSKIKAVKLSTFKSGKYVGCYAPLGYKKSEADKHVLEIDPVTASVVRHIFDLRLQGYGFRKIALQLNAEKVPAPRSFYYMAKGRESLRGETPFWNDVTVKTILRNEVYIGHMVQNKTGTVSYKNHKQVSKPESEWIKVENTHEPLISQETWDAVQRMDNHPARGRSGKSGTIALFGGLLRCMDCGSSMRYMRDYRKKVSEKEPEYKAYVCNRYASGGKNACSSHYINQKVLTQIVMTDIRCKAMWAQNSRETLRTQLLAREQNASAERTRTLQAELNAIGKRLPELDKLIQSAYEDKVLGRIPESVCVNLLNQYEAERREKQERCKELTEQLAASRETESSVDAWLDMMQDYAQLEELDRPTLVRLIQKIEISERYTVDDHEERDIHIYYNFVGYIEA

SEQ ID NO: 25926 - protein, 430 aa, synthetic construct
MRVALYVRVSTEEQAVHGLSVDDQKESLKKWAEENKHKVVDYYVDAGVSGRKSVSKRPELQRLLSDVEARQIDLVAFTKLDRWFRNIGEFYKAQEVLDAHGVVWQATYEDYETATAAGRLKVNIMLSVAQDEADRTSERVKRIMQHKRELGLCPAGKTPIGLKAVESRLCIDEETAHIARRMFEDYIATGSINHVKKMLVSEFGIMRGNHHIKNALGNERYIGKNNGIQVCDALIPPEDFALVQRMLTARSVRNNGSRHTWLFSGLVWCAECGHRLVTHSTRQRGTDYFYYRCKNYEIGLCSHKKRINEAELEAYLLMKLPIEVQAHNAKLKAGKIKPPVDTAAIKRKMDKLTDLYLADLINREKYEIEYTALKEKLNVPPEPKPIDEALVMSLIDAYDKLPPSGKKEAWNRFIRRIVIANNGDIFFDLV

SEQ ID NO: 25927 - protein, 511 aa, synthetic construct
MPKKETAVSQGLVAAIYARYSSHAQNDASIEQQIDECQEYARQHGYKIVGVYADRAMSGRSDRRPEFQKMMRAAEKREFQIVLAYKSNRISRNMLHALSYEDKLAQHGVNVVYCKEEFGNNAAGRFALRTMMNVNQFYSENMAEDIMRGLMDNANQCKVNGSLPLGYKRGADGRYEIDEQTAPIVQEIFRRIANGELKASIADDLNKRQIRTGTGGAWNKGSFHSLLANERYTGIYIYRDVRIPGGIPAIIDRELFEAAREREETMKTVVKSRRRRDDMEYLLTGKLFCGYCLEPMVGSSGTGKMGKMYYYYRCKNNAEKHTCQKKPVRKDAIEQLVVSSLKACITKPENIDWMTDLVMKYRSKIIAESDIGYLEDKLKENKTAIKNVMKAIEMGVVTETTKARLEELEAEQREVLSSLLAEKRSIPDVTRDHVQFFFESFRNGDVNSIKYQKTLIKHFLRAVYLYDDHIKITFDYDDSDTGVEIPLEDSSAESSEDTSVLIDSLGVYGRV

SEQ ID NO: 25928 - protein, 684 aa, synthetic construct
MSILQTIKTIIRVVLYLRLSDEDKNKLSKEELSQSIKNQEIMLRDYAEEQGWEVVGVYNDDDWSGSDATRPDFNRMIEECKNGNVDIVLCKTQARFARDMELVEKYVHNLFHEWNVRFITVVDRIDNARKETKKTSQILGLTDQWYLEDTSLNIRETLKSKRKDGQLTSSFATYGYMKDPENKNHLIIDPISAEVIKRIYDEYLSGTGLDKIARRLNEDKILSPYEYKLLNGCKLKIPVIKDYVNYGYIEKTGTYMLDVSFTNKEEYILKDLVSFNYITTDMKSFNNKCDIVLKKYTNNRTKIYYSENDNIDINNFNIDDCILLNENDVIPKTAKVIISYTKELDRTHTINYQFEITLKENREHEDYYISICGKAKDEIKKSDFIHNIRKKFKWSSSTIRTLLTDEVYIGNMVQFKSTTVSYKNHTVVWNDDETRIRKDNTHEPIIAKDIWYTVQERLENTARSCKGGTVHPLCNKVYCSNCNQIFTKTGNRRSDGTGYLCCKDKKTNWSNCDNKASIREDQLHQFILEKMNEMLKKFYEEDDLKEMQNEVIEQDLYKDKLNSLEKELQSINKELQGKSTYFQKLYEDRTNGILPEKEFLILMNKYKDDNEKLEERQKIVKKEISSTLAKKETVKTKKNIFKKYRHIEELSIEIVEDFIDKILIGSYDETTNSRDIKIIWNFTI

SEQ ID NO: 25929 - protein, 512 aa, synthetic construct
MNAVIYARYSSHNQTEQSIEGQLRDCYEYAKRNDLTIIGEYIDRAISGKTDERPDFQRMIKDASKRQFERILVWKLDRFARNRYDSATYKHKLKQYGVKVISAMENVGEGDESVLLEALLEASAEYYSLDLKKKIARGMRESALRGKFVGGTLPWWCRVDDEQKLTVIDERAAIVREAFMRYDSGEGSKSIVSDFAKRGLRSNRGVPVTLSWLLSILKNRKTIGEYTYNGIEIPGGLPAVVDKPLFDRVQDRIARNRRTGGGEARAKTEYLLQGKLFCGLCGSPITAECGQNHKGVVYNYYACSLKKKKHQCKKANERKDFLEWYVVEQTLDYVLTPARTEYIASAIVAEYEREFDKSGIRVLEQKIALTEGEIQKTMDLCIQATTDAMRDRFMKRCEELDAKKADMEIDLSKLRVAASIVYTKDEVCAWLRQFCTGDCFDPAFRRRIIDVFINTVYLYDEKLIIYYNLRDSRQVSYIEAIGASSEIENLLPVPDNKKSATECSTADGDGGA

SEQ ID NO: 25930 - protein, 464 aa, synthetic construct
MARSVTVIPARSQKVRTGHKAVQEKKIRVAAYCRVSTDQEDQLHSFEAQVEYYTKYINEHENYEMAGIYADEGISGTNTKKREQFKKMIADCEGGKIDLVITKSISRFARNTQDCLAYSRKLKNLGIGIIFEKENINTLDSTGELLFTILSSLAQDESRNISENCKWGIRTKFKNGEMHLNTFKFLGYDKDENGKLVINKEQAKTVRRIYRDFLIGINPAQIAKELTEEKVPGCLGQTKWYPSTVIGILKQEKHMGDALLQKTYTADFLTKRQVKNNGEIAQVYVKDSHKGIIDKETWNAVQEEFERREKFMQKHGTDRYSYGSECYPFCEKIFCGECGSLFTRHSWKSRGIIQWQCKNHRKDGKVACTNAYVDNADLEKGFVKAFNRLVGEREKHIERWNSMKLDGTPLEKIRAGQMMEATKSGQLQQYVPEAAQLVLEEITIFGAKKYEFAFLEGSRVKVSV

SEQ ID NO: 25931 - protein, 550 aa, synthetic construct
MYYQPKINFSPNEVIAYLRKSRSDDPLLTVEEVLSKHETMLDEWAEKNLGAAVPEENKFREVVSGETIAERPEINRVLRLIESPKYKAVAVVEPQRLTRGDLEDIGRIMKLLKHTSTLVITPQRIYDLRDEYDWDTFERELKRGNDYLEYTKKILNRGRLLSVSQGNYIGNVPPYGYSKTFVTEGKRRYPILVPNKEEADVVRMMFDLYVNKDMGCQNICNRFDEMGIKPPKGKHWSPSAMAKMLENIHYIGKVKWNYRKTLTIVEEGEFKKTRPIAKAGEYLIYDGKHEAIVSEELFNAAQAKKGKHTRQKPNTKIRNPFAGLLWCKCGRAMSLRAYKSNISAPRLLCDGQTHCKTGSCLYSEMNERVCSILTNCIHDFEIRLQNNEGDSVKQHMRLIKNLEAKQKELEEKELAQWEAQADPDPAKRMPQHIFQQLNEKLLKEKEEVRQTLCKAYESMPEPVNYEEKIAQFTEALNALKNPKVDAATKNRLLKACIDRIEYYRDAPQRIRSQKVIYYDPEQKRTRCKSPLNVGGNWTAPEIILDVKLKV

SEQ ID NO: 25932 - protein, 519 aa, synthetic construct
MKRVYCLYRVSTVGQVDHDDIPLQRISCRQYAQQKGWTILRELYECGVSGYKVSSEARDAIQELKDEALLQRFDILLVFMFDRLGRRDDETPFVVEWFVKHGIAVWSVNEGEQRFDTHVDKLMNYIRYWQASGESEKTSIRVRLRQEQMIQDGHFRGGMIPYGYRLEYTGRANKKNQPVHDLVIDPFTSENVKLIFSLVSSQGYGANRIAMYLNERNILPRTANAHWHASSIRAILRNPIYIGIMRMGACCSERSFAQYRIISDEQYEAVQKIMLERSLSHTLTRSIPYRTDNAYLLTGLLRCGSCGSRLCGATMSSKGASTQCHRRYYRCYTSSVHRGVCNGQRCYAANRIERMVEQRVVDVLNEILSTPVGVLAEQMDALAYCDDQSALQAAQFEITAIEREVEKLEQQLVKSVIKNDRTLTDAINDAVVKKRQAYIEAEREYRKLADAIAQSAERRENMMLEIRNIRSWAVNYKLLKPEEKRMILPQMIERIVVLKGYGVEIVFRSVIKELCQMKV

SEQ ID NO: 25933 - protein, 408 aa, synthetic construct
MKTAVIYARYSSDKQTEQSIEGQLYDCYNYAKQHGITVVQEYIDRAMTGKNDDRPAFQQMLHESAMHKWDSVIVWKLDRFARNTIDSAVNRQILAKNGVKLLSVMESFGDDASGQMMTHIIEAINEYYSADLREKTIRGMRQSAMKAQTTGHIPLGYKVVDKKLVIDDETRIIPETVFRMYAEGERLTDIAEHLNAQGYRNRRGRPFTTNSFYNMLANEKYIGIYKYDDIVIEGGIPQMIPNEVFEAVREKLITNRKRAAKNTAKADYYLSGKLYCGHCGEPMSGLSGTGRNGVKHYYYRCNGVQKKSGCHKKLENKYLIEDEVCRAARSAFEQMDKAETAETIYQMYLQTVRNEYAPAELEKELTECTKQAENVVNAIAQTGGNQLLFDKVRELEERKEQLSSALRQ

SEQ ID NO: 25934 - protein, 522 aa, synthetic construct
MNVVIYARFSSHSQTEQSIEGQLKVCYEYAEQNHYTIIGEYIDRAVSGKYDNRAEFQRMISDSEKHAFEGILVYQLDRFARNRYDSAIYKSKLKKNGVRVLSARENITDDASGILVEGVLESMAEYFSAELSQKIHREMEINAQKCLSNGSNPGLGFKVDKDRRFYVDEEEAKIVREIFERYASGETKAEIVKDLKRRKIKTSLGNDFTYNSLSRMLSNKRYIGVYMYNGQETPGGMPRILDDNIFYKVQDILDKNKKASARTHGEGEYLLTTKLFCGHCKNMMVGYGGTSKTGKQYHYYICKEARKKRCDKTIVSKKKIEDRVIAECLKLLTYDNIKFIAQKVSEECSKSPDNLTVKQLKKAIREADIAIENLWRGIEQGQSVPMLTERLNKHQAEKDALEEQLAIEENKRICLSEAQILAFLNFICEMPLDDVNKRRAIINILVHSVYLYDAHFTLIINASKKPMSVDDIPLEEIEEAFNSDKTCTEQCSTMTSPAPPNKNRNSDTFYQDYGSFPFAPGK

SEQ ID NO: 25935 - protein, 590 aa, synthetic construct
MRVSVNLNAQKPDTTTNAVIYARYSSHGQTEQSIEGQLAKGHEYAAAQGYTVVHEYIDRAMTGRNDNREAFQKMLSDTGKHQFQVVIVWKVDRFGRNREEIAFNKHTCKKNGVRVEYVAESLPNSPEAVILESVLEGMAEYYSIQLSQNIRRGQLESAKKCQCVGGSVPLGYTLDSDKHFVIDPQTAPVVKKIFDLYAEGATISEITGQLNEQGIRTTRKQLFTKNSLTKLLKNEKYIGVYTYKDIVRVEGGVPAIVDESTFDRVQELLKINRRAPSHTWTKVEYLLTDKLFCGHCGSPMVGESGFSHTGAKYSYYGCIKRRREKACDKKPVRQDWIEALVLDETVKLLHDDELMEYIIDRTWEYYQVTDKVQEEKAVLEAQLAEVDKAINNLVRAIEAGIFNAATKSRMDELDAQKAALTASLADLELTSGIRITRDHIEYFLLRLRDLDVKDRECQKRLVQTFVNAVFIYDDGRVKITYNYSGQSSTITLNQIASAEKGKGFVCCLPCSTSSPRFPRGVAALFLFWGKSGANQLPISTVLCYNGSENGRGGMENEKAACCVPDGARLLGLRGVRGRNAGWRYGHFRAV

SEQ ID NO: 25936 - protein, 421 aa, synthetic construct
MKLRKIEPLKPKQKKLRVCAYARVSTDCLKQGESFENQVSTYERVIKSNPEYEFVSVYADQGMTGRSENRPEFQRMIVDCKAGKIDLIITKSISRFARNTTTVLKYTRELKELDVGVLFEENNINTLSSEGELMMTVLASFAQEESRSISENNKWTLKKKFERGEGMVNTARFMGYDKDETGDLVINKEEAKVVRRIFEMYISGIGCHRIAKALNEEGIPTVAGTSWHASTIKGMLKNEKYKGDFHIQKTYIPEGSHQSIINEGQVQSYYVTEDHPAIISAEEWQQAQEMTEYNRKQRNIGKGDKYTNRYPMSGMLVCPHCGKSLRRRYVYNRKVEWLCATYIHKGKEACKGIRIKDTELAGLSFSEPMVVEEVMIDGEKHYGYTSKRAYDAGERAADRIKEESSSVLPRVNGPRRTVIKL

SEQ ID NO: 25937 - protein, 559 aa, synthetic construct
MNREGKKCVLYPRVSTEMQVDGYSLEGQKNGLKRFADREEMEIVGIYEDAGKSGKSIEGRPAFKKMLSDIKNGLEIDYILVYKLSRFGRNAADILNSLEFVQSYGINLICIEEGIDSSQTSGKLLISVLSAVAEIERENIIEQTMNGRREKARQGGWNGGFAPYGYYLKDNQLLIEETEAEAIRIIFDKFANSDIGLGGVAKYLNLQGIKKIPRQNGTLETWSSHFIRLILDNPVYCGKIAYGRRTREKVKGTKNEYKQVHAEDYILEDGQHEGIISEELWQKVHAKRMATGIKQPSKIGKDRSHLLTGILKCPLCGSSMYTNKHAWTNKDGTYKEVYYYICGRNKQERGHHCDYKASLRKTDIEPLVIEAVKELVSDKYFAKEIEKRIGVQTDTTAIDKELANYESKLKEVDLNKARLEREIDNLPVDTRFRERKIHDMTLRLDALYDTIVELEERIEDAKLRKSSIEMETITLDNIYKLMLNFGKLYDIISDEEKKSLITYLIKEIQIYPNGESEQPLKSIEFNFPIYRDGQEVRRLLWEKGNTVETVCLLSRKAPV

SEQ ID NO: 25938 - protein, 502 aa, synthetic construct
MEIQIREGNSRQKRKLKVCAYCRVSTDADEQENSLENQIRHYEEVITSNPDYEYAGVYSDFAISGFKEKRPGLQKMLADARKGKIDLILTKSVSRFARNTSIVLEATRKLKELNVGVFFELQNINTLSGEGELMLTILAAFAQAESESGSIGAKMVYQRKYEAGIPVQYLERSFGFKKDERGVYIADEEEAAWVRKIYEMAADGYTPASIKRYLNENGVKTVGGAEWIDSTVFRLIENEIYKGDYIMHKHFVNEERKLVRNRGEVDAWYIEDDHEAIVSPELWQKAQDALAAKRDYLAEGSVIEEFTEENYPYMNRIYCARCGHPLYKRIYSNGNRLNWGCSGTKRYGKSFCEGINIPDGVLRGAWHFDENMYIGEKQTDKGKKEFTYLKEASWKRRHKKKEPEPIPENTETEYPYREKIFCGLCGSRLVRHVNTKNHKVIWVCNGRKRKGKDFCDGTRVPDTIIKGWGEIKKDIYIQRKDDKNGKKRYSYTSKKPKGADRA

SEQ ID NO: 25939 - protein, 650 aa, synthetic construct
MGKALLFVRVSTQQQHLESQEDSLRRAAIADGYSETDIVVIGKKESAIKLDEEERNGLNELKEQLANGNIDCIYIFELSRLSRRPKILYSLREQFLATKVQLKCLNPQFTLLTKDRCQYDQMASIVFSLFGAMAEQEMIEKKERFHRGRRRLAEEGRFNGGNIPFGYRKDPERGNLIVIDEEDAAIVREVFNLYEGGVSQPQLAREFYRRGNKKLTISFINNILNNKRYTGDKHCYPGSSFERSYPVIITPEQYERCRQIARKNNTTANKAKNIYYANKLIVCTNCGCNWSASGSKVLYHCYDAFNPMRKYDHYARPQCTCRLSISINIMDSLLWHIAQEAEVHYILHAAKEEREQYEHQVDVLTQKILNIQPRLKEMDDKQSRIVDSFIEGLISKEKRDERLASITSERKEILLDQMNFTNEIKHIQDLLNDLENRYDLNDVDSMMTQLEHNMAVQNRVRAIEDDAERFRIIQKHIKKVTIENSEIVYTFGIGTKLTKTRFITVELYVGDTLYFHYLPSTGKGSVTLRATADRKPIEKVTFQYLDRYFDEGKRRRHQEARERDKYERTEHYPPGKYVLSYSGLAKFLNVSLATAHRWVATLGVLRPAVVDHYRKEIVVDKVKCMAILKEEASHNIWAQRILDNMDYKEE

SEQ ID NO: 25940 - protein, 523 aa, synthetic construct
MRFFSYGRKSVFSDKSDSIDNQFRMNREYCESKFSGQVDSWQQFSDEDFTGANTSRPDLQRMLSFIKGGFCDVLVVYQLDRLSRDVRDFANIYALLEEHGVMFISIKENIDTTTPIGRAMMYVTVVFAQMERETIAARVTDNMLGLAKKGYWTGGNPPVGYVRKHIVVDGKKHCSIEVDPDGARYVTQIFDTFLAYNCSLQGMETRFKNQGIRTQSGKFFSTTQLHKMLTMPYCVEATPEVYDFYAAKGCIMDPGSPREMWDGSVGVIIYGRSTEKNKKHQAQPPEKWTVCLGKHKPFMPAEKWLAVQSRFTQNKCIKDAKWPVPLLKGVLRCKCGNLMQVSRKKKVDGTCSSWYYCRKRMRQGVDACDMGQIKCDLLDEKVLELFRGITADPGLIQKFVKTKAPDDIPNLKAAQARVAACERKIGRLAASLALAEDSTASKYIIVEMERLDVELGALKREASLAEMENHRATANAKDAKATAVEIAKLIHGLEGFDDKERNAIARAVIQECTWDGERLFITL

SEQ ID NO: 25941 - protein, 615 aa, synthetic construct
MKRAALLLRCSTDSQDYDRQLRDLQPTAERMGYIIEKDLIFGEYITGKDDVRKKDRESIANLKLACKEGKVDAIFINEVSRLSRDSIAGRLFIREFNEDYRVPIFFRDLQQWTINPISKNRNAYLEQMLGFYFDAASAELKSMKTRFASGKRKNARTGKSIGGVPSIGYTKDKDGTIIIDEENSKLIKIIFDKYLEKDGTITTVGRYLRGISNIRTWGTGTIGNILRNKAYTGKMEVFITNPDEIDENKKVEKFITTIPVIIDEETFDKVQKKLDANRSAQEYTRTKVHLLQKLIVCSDCGKAFSTKTVNSGRNYTYCCVSKQNGINCNLSISLDADKTESIIWNLVKSKLLELNRLGISERQERIEKEKQQIQSYEEEITAIELAIEKIVRKRKNLIDYLEDAESDEEVEDIKARRKKYDNEISDSKNRINQIRDKIDICKSNITQHLNSSLTSDIISSIESNRNKMKTQIKEFIKKIVPYPIANSHSVLEVHTIFGLYYILYSSRDKDKQAYYLYGSYYKFFPKDNKFLVIGDMDEDIIEKNMQVSKFAQSFTTFGYTDKTKEIRTSISNSDISDNQIINQKYFKITDSTGVYTYEEMKEKCKKMNWVLSFII

SEQ ID NO: 25942 - protein, 520 aa, synthetic construct
MKAVIYARYSSEKQQEISIEGQLRVCQEFAAREGYEVVDTYTDRALSASRDVERREDFQRMIRDSSRRGFEVVIVYKFSRFARNRYDSAVYKARLRQNGVKVVSACEPISANPEGALIEGIFESLDEFYSKSLAQDVTRGMHENATKALSTGGTIPLGYVSVDKRLQIDPATAPAVRLAFERYAEGMSLARIADELNAQGYRTRAGKAFNRSSFNALLSNRKYIGTYHYNGEVELVGQVPPIVDPGTFRRVQERLRKNTTAPGRTKATINYLLSTKLYCGACGKPMAGESGHNHSGTRYYYYACSGRKRRLGCKMPTLRKDDLERLVVEHARTLLSPDNIKALAHAAAAEYQRQAEDDSAAVSLRRQLDEVTRSLDNLLRMVEQGAVSATLVARINELEGRKASIAAELADEQRGAPELTEVDILRWLSCFADGCLEDEDYMRNVIDMLVNKIVVQQNPNQKVSVLVAYNLSGRGDEISGSGLVDVVHQARHNPNFCTNATESCMTFLLYHGCAIFQLAA

SEQ ID NO: 25943 - protein, 521 aa, synthetic construct
MKKVTKIESVQNAKTVKQKLRIAAYCRVSTGSDAQLESLDVQKSHYERYITSRDDWQFAGLYYDEGITGTKTEKRPELLRLIADCEAKKIDLVITKSISRFSRNTTDCLELVRKLLSLNIPLFFEKENINTGSMESELFLAILSSMAEGESASISENAKWSIKRRFQNGTFKLSYAPYGYDWDGTNLTVNPEQAKTVKRIFSDVLSGKGTNTIADALNAEAVPSKKNGRWTSSSVRGILANEKYTGDVIFQKTYTDDNFNRHKNHGEVDQYMMANHHEAIISHEDFEAANALVDQRALEKGIQKGNDKYQQRYAFSSKIICSECGNTFKRRIHSCATYKYVAWTCNTHIDDKNACSMKYIYDEELKAAFITMMNKLIYSHKFLLKPYLKVLENSSGEEAVQRIQHLERLLEQNSEQRETLTKLMAQGYIDQILYNQEMNALLLQADSYRSDIETITTSMTGDAAKVTETAMLLQFVSHSEMLTEYSEELFEEFADHIEVQSRNEVRFILKCGLTFTERMGD

SEQ ID NO: 25944 - protein, 521 aa, synthetic construct
MKTHYRVLRVAAYCRVSTKQEEQLNSYENQVQHYTERINSENGWTLEGIYADKGISGTSVKNREEFNRMIRRCKQGKIDMIITKSIARFARNTVDCLKYVRLLNDLGVDVYFEEQGIHSNQPGAEFYITIYGSIAQSESENISANIKWGKAQAAREGKVVFRYKNFLGYRKGEDGQPEIVPEEAETIRLIYDRFLAGDSLKGIAKLLEEKSIKSPTGKAEWQFSTIQSILSNERYKGDAIINKTYITDCISKKVRVNNGERPKYYVENSHPAIIDSSTFGRVQEELARRSGKRKISRKAKTEQGKYSSKYALTELLVCGECKSAYRRCTWTASGKKKIVWRCINRIEYAKKYCHNSPSVEESVLQRAVMAAIMETANQNAEVLRTLKTHIGMGLAGEKSEDNSIDLQIRIAEIDTEFKKMLDRVSTDTIEAFDEETATRLMNEKSCLQQQLESIADAEQQRENAKSRLDDIYTILDGIKNRPMEYDDQIVRQLLECVVVDSKEQITVIFKGGLKSVQPLTE

SEQ ID NO: 25945 - protein, 514 aa, synthetic construct
MNITEITSTKKQTAERLRLAPYCRVSSDSTDQLHSFAAQIRYYSDYAKKHPEYQLVDIYADEGITGTEMKKRDELNRLITDCRKGKVDRIIVKSVSRLARNTEELLVLLRMCKEIGVSVYFEEQGIDTEKLNMEMIVTFPGMAAQQESVSISGNLRWSYQKRMQSGDFNCTCPAYGFDLKDGELVINETEAAVIRRIFDLYLQGYGTLAIAKMLNEDGIPRKHGYEKWLPSSINYVLNNERYMGDALLQKSYTTETLPFRKMKNDGRLPQYYVENSNPAIVSRETFQAAQNLLRSRKTERCKRKSYPLTGKLRCPECGRVFRHQVVNGKAHWICSCRSSGATDCQHRHVREDIVYDIFTDMVIKLKTYRGELLGTLIHQMKTMQDRTSRNQERIRQIDKEIADLGAKNHIIARLHTSGAMNAADYAMQTSEIGNRLTELRIERRQKLTEDEDDQLLATLKDLNGILDEYEPTVEFDNGLFDEIVESIMVNSSEQLTFKLIGGIALIEQIPKKGR

SEQ ID NO: 25946 - protein, 434 aa, synthetic construct
MKKTIVNIAPAVAETPRTKRVAAYARVSCGKDTMLHSLAAQIDYYRDYIMMNPEWRFAGVYADESKTGTKDNREQFQLLLTECRSGNIDMVITKSISRFARNTVTLLETVRELKSLGIDVFFEEQNIYTLSAEGEVMLTLLASFAQAESLSCSDNCKWRIRKGFEEGRASTCTMLGYRLVNGEITLIEEEAEIAKRIFDLYLAGCGLQKIANTLNEEGMYSIFGNEWHPTTVRKVLTNEKYCGDLLLQKVYRENHLTKRKCHNTGELPQYFVEDDHPAVVTRQIFMAVQDELKRRAKEKTQPVGSKSSFTGKIRCSCCGKNYRRKTTPYNTVWCCSTYNSKGKKYCPDSKVIPEETLKRAATEILKTDGFSDEAFETQICTIEAHPGNLLRFIFIDGSTTDYVWKDRSRSESWTDEMKAAAAKKAKERYASHDK

SEQ ID NO: 25947 - protein, 548 aa, synthetic construct
MTNKKVKKIEATKPTLSAQYSTFTRKRKVAAYARVSTAKEEQENSFDAQVSYYTQKIQANPEWVFVEVYSDEGITGTNTKKREGFNRMIEDALAGKIDLILTKSVSRFARNTVDSLVTIRQLKEKGVEVFFEKENIYTLDAKGELLLTIMSSLAQEEARSISENTSWGRRKSFADGKVSLGYSNFLGYDKGPDGELVINEEQAKIVRRIYAEFLAGKTPGGIAKGLTADSIETPGHKKVWQASTVLNILKNEKYYGAAILQKEITVSYLTKEKRPNTGELPMYYIEKDHEPIVSPETYQMVQEEMRRRKEAGSNMQCVSIFSSRIICGDCGGYYGRKIWHSSTKYTAWYWHCNAKFQKRKYCGTPTLKEESLEETFVEVFNGLIADKDEIIENYRLCIDAVTDDSEYRRQLEDLNNGCGEVQTLIRSLLMTYSRQDTTDGIPEKLQEYEERLDTMARLKQELDLKIAACAAKRVQITGFLNELMKHDAPLAKFDSLVWQAVINYATVNRNCTITFTFRDGTEKTVPIKNGVRPYTKRTKPQEVDGNDE

SEQ ID NO: 25948 - protein, 545 aa, synthetic construct
MLQVAAYCRVSTDKEDQANSFEAQQRYFREYIQRQPDWELQGIYADEGFSGTSTNKRVEFNKMLHAAELGQIDLIVTKEVSRFTRNTVDALQITRELRRRGVGVLFLNDSLDTRTNDGELRLTIMSSFAQDESRRTSERSKWGQMRSMEKGVVFGGSLLGYDVIGGKMTVNPEGAEVVRRIFHKYLQERKGCSTIARELREAGILSSKGNCLWSSATVTKILKNEKYCGDLIQKKTYTPDYLTHEKKYNHGKEPLVELKDHHEPIIDRETWQAVQRELSRRNRATGCGGHGNRYPLSGKIRCGECGKSFSHRTKKRQDGSSYYRWCCFTATNEGLRRTDGAGNVIGCSVGRQIRDDIAMDLLRRSVNAVTLDKKAIISNLARIVESVLASGEDSGEQELRRLELELEKLQARNDTIHDRFFDESITKADYQRAKARCESEMNRVQEKIAAIKQRQTLNTDTQTLKPDIRAAITGIVSGRTADDDFYGHLLQQMTVYRDGRVEVALNLLPAKWVYVLDGLEKYRTKIGGHDASSVPMSVSSPFASA

SEQ ID NO: 25949 - protein, 523 aa, synthetic construct
MEVTKNITVIPARRRVGNTVNKEEKPKLKVAAYCRVSTDSDEQATSYEAQAEHYTDFIKKNPEWEFAGIFADDGITGTNTKKREEFNRMIDEAMAGRIDMIITKSISRFARNTLDCLKYIRQLKEKNIPVYFEKENINTMDAKGEVLLTIMASLAQQESQSLSQNVKLGFQYRYQQGQMTVNHNRFLGFTKDEKGQLIVEPDEAVVVKRIYREYLEGASLQQIGRGLEADGILTGAGKKKWRPETLQKILKNEKYIGDALLQKTYTVDFLEKKRVPNNGLVPQYYVENSHEAIIPRDLYMQVQEEMIRRANLHSGQDRKKRVYSSKYALSSIVYCSKCGDIYRRIAWNNRGKHSIVWRCCTRVEHGPGACDADTIQESELQNLTVRAINLALGKKETMNETLQKNVEAVLTGADGIPLDEIDSRLEQLQKELLKVANAKGNYDSIADEIYHLREIKQNALVDNAEREGMKQRISEMQQFLSEQTQEITEYDEQLVRRLIEKITVYEEKVTVEFKSGTSVDVRR

SEQ ID NO: 25950 - protein, 520 aa, synthetic construct
MKRITKIGANEPLIQKKKLKVAAYCRVSTASDEQLISLDAQKAHYESYIRSNDEWEYVGLYYDEGITGTKKDVRAGLLSMIADCEDGKIEFIITKSISRFARNTTDCLEMVRKLTDLGISIFFEKENINTGSMESELMLSILSSLAESESVSISENSKWSVQRRFQNGTFIIAYPPYGYDNDNGTMVIVPEQAEVVREIFAACLAGKGTHAIAKELNARGLKTKKNGKWGAGTVNAILTNEKYTGDVIFQKTYSDSSFNRHINYGERDRFLCQNHHEPIISHEDFDRVRAVLDQRAMEKGNGTDTYRYQNRYCFSGKIKCGECGATFKRRQHYKPSGDYVAWTCGTHLESKENCSMLYISDEGIKLAFLTLINKLVYGHNAVLKPLLRTLRGMDDKDRLLRIQELENRMEENTDRKQTLTSLMAAGFLEAAVFNKENNALVVEEQQLRQEKEQLMNSVGGDKVKIKELQKLMAFTSKGEMLTEFSDETFLAFVDSITVETRERIVFHLKSGLNLTERLVM

SEQ ID NO: 25951 - protein, 519 aa, synthetic construct
MADFEHVIIYLRKSRSDDPATTVEEVLFRHENILQEYAVREWGARIPEDRIYREVVSGETIKDRPVMQHVMKILETGLVSGVLVVEPQRLSRGDLQDCGHIINSLRYTNTAVITPPKTYDLSDEYDRKFFEMELTRGNDYLEYTKKILNRGRIASVKAGNFIGNSAPYGYRKICVGTGKEKYYTLEIVPEEAEAIRLMFDLYVNKDYGFRNIAHALDMAGYKPRRSAEWSPAAISCMIANETYIGRVVWNRRKTIKKWENDTIVRTRPRQSEYISVPGKHPAIISDELFYAAKAKRNRTPRIKRYVQLLNPLAGLLYCGTCGHAMSRKRTVDKKYGSVSVSFLCNNQSNCHTKSVMYDAVIDRVKETLRQSIEDFEVKVNNKDETDIAYHRAMIANLKSELRKLKEKDMRQKDAYEDGIYTKEEFVVRNAKLAEQISIAQLKLDEAESSTTQLVDYQERLVRFRECLEALDDDTISAADKNTLLKSCIDKIMYYNDSPSLPGIGRYVDNPFRLEIFLKL

SEQ ID NO: 25952 - protein, 593 aa, synthetic construct
MKTTDQPQVKQYVIYSRKSKFTGKGESIENQIELCRQYIAMHFGEDEAEHALVYEDEGFSGGNLERPQFKQMMKDSQKIEFAAIVVYRLDRISRNIGDFAKLIEDLGDRHIDFISIREQFDTSSPMGRAMMYIASVFSQLERETIAERIRDNMHELSKTGRWLGGTTPTGYASESLSSVTVDGKVKKACKLKPIPEEIQLVKTIFSVFTESGSLSKTDQYLLEHRCVTKRGKQFTRFAIRGILTNPVYMIADDTAYQYLKENNVDLFAEPSEFDGEHGIMAYNRTLQRPGKATQIRPMEDWIVAVGKHPGIISGANWVRVQSMLDVNKSKSYRKPRSNVALLSGLLRCGECGDYMRPKLTGRTNANGELIYTYMCSTKERSHGTVCSMKNCNGNTLDAKIVEEIRKVATDKKDFGQLLSKTKKVINDNKASYEAELTLLVKNHAETEARIKRLVESLSVASETSAKYVMEQIDELHRQSEQEQTRIAELEKLARQSNALSQNLFFYRDMIESFADTVDSTTIEERRRLLRTIVKKVVWDGKNVYVYLFAEDGELNLPPIGQLMCPSGEDSERNSHVLPQPEKAPGRSLSVGFH

SEQ ID NO: 25953 - protein, 544 aa, synthetic construct
MRVSVNLNAQKPDTTTNAVIYARYSSHGQTEQSIEGQLAKGHEYAAAQGYTVVHEYIDRAMTGRNDNREAFQKMLSDTGKHQFQVVIVWKVDRFGRNREEIAFNKHTCKKNGVRVEYVAESLPNSPEAVILESVLEGMAEYYSIQLSQNIRRGQLESAKKCQCVGGSVPLGYTLDSDKHFVIDPQTAPVVKKIFDLYAEGATISEITGQLNEQGIRTARKQLFTKNSLTKLLKNEKYIGVYTYKDIVRVEGGVPAIVDESTFDRVQELLKINRRAPSHTWTKVEYLLTDKLFCGHCGSPMVGESGFSHTGAKYSYYGCIKRRREKACDKKPVRQDWIEALVLDETVKLLHDDELMEYIIDRTWEYYQVTDKVQEEKAVLEAQLAEVDKAINNLVRAIEAGIFNAATKSRMDELDAQKAALTASLADLELTSGIRITRDHIEYFLLRLRDLDVKDRECQKRLVQTFVNAVFIYDDGRVKITYNYSGQSSTITLNQFASAEKGKGFVCCLPCSTSSPRFPRGVAALFLFWGKIGCESTTNFSCIVL

SEQ ID NO: 25954 - protein, 529 aa, synthetic construct
MSNMRIIEIPASMRESAGRKNTVRKLRVAAYCRVSTEEEEQQGSFEIQKLYYTEKINSTPEWEVAGIYADDGISGVHTKKRDGFNQMIQDCKKRKIDLILTKSISRFARNTLDSIQYVRMLKQMGIAVVFEKENINTATMNSEMILTVLSAFAQAESESISQNVARGKRMGYKHGKFAFPYGRIIGYRKGADGKPEIIPDQAEVIRLIFNSYLQGDSLQSIKAKLETAGALTARGNTAWSAQSIQRILQNEKYCGDVLLQKTFTEDVLTGVHKKNTGQLPQYYIENYHEGIVSKQMFREVQAEIARRNSKSAANQRKRRRGRYNSKYALSERLFCGNCGSPYKRVTWNIHGRKQIVWRCVNRIEYGTKFCGSSPSVPEEKLHRAILKAVQDLAANFTDEVAAQINGILHDIQTGESTKPNLQEQLEQTQQEFDRLLEMSLDFDENTPFLDDKLKKLNNKIKSLKKAIEDSAARQEKARQPEMLLSAKDLQIQEYDDALTARIIEKITVRSRNEIEIRFIGGYKKTMQLT

SEQ ID NO: 25955 - protein, 509 aa, synthetic construct
MPQVQIIQPIQQQPKRLRVAAYARVSSDSTDQLNSLSVQVDYYTHLIQENPNWDFAGIYTDEGITGTSTKHREQFNRLMDDCRAGLIDRVLVKSASRFARNTADALASVREMKSLGVTVVFEKEGFDTETANGEMLLSMICAVAQEESLSISKNLKWSIRKRMQNGTYTNSSVPFGYRLENHLLVINNRQAMIVADIFKRYLAGESISKIAQYLNNTYPKETGVWQYSSVQLILQNETYKGDTRYQKHYTANLFPTKVSHNRGQVSQYYIAKGHEAIISDEDFDKVQSLLKMKAPHKPKVAEKLFDQKLYCATCGTLFARKTRTSGAVVWGCRRHLNKSGLCPVKSVYETELCRAFLCMHNKLLINQEKIFEPLLNSLSHLKSCQEKLDTMRMGIQVEIQRLAKQKHNLERIYAQGLIEDSQYLERKTLIEKQLYEKKEFLTRKPLDGNIDRLLKNTRQIKRLLGTCQPLMYFDKQVFTSLVSKVTISDTSFEFELINGMRVSERRTSK

SEQ ID NO: 25956 - protein, 538 aa, synthetic construct
MAKKVTVIKAAKEQKHTQEERRLKVCGYARVSTGSQAQATSYTAQVEYYTEKIESNPLWEFAGVYADEGISGTNVKHRDEFQMMISDCEDGNIDLIITKSITRFARNTVECIQTIRKLKEIGVGIYFEKENINTLSEKSELFITILASVAQGESENISSNNRWAIQKRFQDGTYIISTPAYGYGKDEDGNLVIIESEAETVRWIYESYLNGMGVYVIAKALNQKGIPTIRGAEKWQDGVIQDILKNPIYEGDMLQQRTYTETRFPFVRRVNNGQRNQYLIKDSHPPIVTHEEAEAVQNLMAYRVDVLHMNKSDYTKRYLFSGRIICGECGRTFRRQKIYIGKPYEKIIWTCSGHVEDKESCCMKAIREDVLHRAFTDMWNKLYTNQGTILEPLLKELTELVAARQDSEEIRQLDKEIKDISEQSQILNQVMRKGYMDSALFMESSSKLGWQLTECRRKKTLLTRKLRRTKEIVRTEQLIQLIAEQDGLREEFDEQLFKMTAEKIVVSKEHDITFCLHNGLKLTERGGGQDAVAHANRL

SEQ ID NO: 25957 - protein, 548 aa, synthetic construct
MAETAKKISMIPAKVQYDRNVKLSEKKMKVAAYCRVSTELEEQDSSYEAQLEYYTSKISENENWKNAGIYADDGKSGTNTKKRADFNAMIQDALAGKIDMILTKSVSRFARNTVDSLVTIRKLKEKNVAVVFEKEGINTLEGTGEILITILSSLAQEESRNISENIRWGVVRKFEKGKVIVNCTKFMGYTKNEDGDLVIVPEEAEIVKRIFRLYLEGYSTGKIAKHLEEQGIKTATGQDKWHSTVIDKMLRNEKYMGDALLQKTYTVDFMTKKKVKNTGLVPQYYVEDDHEAIIPKELFYRVQEEMMRRASLCKAAVTRKKNQRSRYSSTYALTGMLICGKCGQEYRRVTWARNGKKKVVWRCSNRLTNGVKKCGESETLEENALNRAVMEAIHRITSDDMEFMENFRQNIIHVIGNYSTAKESGEYEEKIKEKIKEKQEEMVALIAENAKTGSYTPKFDERYRTIAEEINALKEAQKTARNEKRMADSYEQRIQDIDHYLSTSTCQIPEFDNDLVRRLISTIKVESSEKLLIQFQSGIVMEQEIRYE

SEQ ID NO: 25958 - protein, 523 aa, synthetic construct
MPNTESFTVNEVLVYLRKSRSDSPDMSVEEVLRKHEEMIQQYASTHFHSPIPEKNIFREVVSGETIDSRPQMKNMLKMIESEQFKAVLVVEPQRLSRGDLEDCGRLINILRYTNTTVLTLTHSFNLQEEYERKFFEMEITRGNDYLEYTKRILKRGREASVAKGNYIGSVDPYGYKKTVIKKDGITCHTLEIIPEEADTVKLIHELYAYTPGGIGFTNIAHKLDAMHIKPKKAAHWTPAIISSILCNPLYLGMVRWNNRKVVKYINEGQLAKARPQNSEAKYYKGLHEPIITQELYDACMARRGTNPSLRRNKELCNPFAGLLYCGTCGHAMSLKIYKNHNSVSQMMLCNHQAYCHTKSVLYSAFLRRFISSMEDTLNDFELAQKSDDGRTQAISKTIVINLENKLKKLNEKDARQKDAYEDGIYSKEEFLKRNVRTQKDIASTIIALEDARAKKADIVDYEEKIRRFKDCLHALNDPELSAAEKNRFLKSCVDKILYYNNMESKAGIGRYIENVFSLEIQYK

SEQ ID NO: 25959 - protein, 590 aa, synthetic construct
MKTVEKIKPKLPALKTRKRVAAYARVSMDSERMQHSLSAQVSYYSALIQKNPEWEYAGVFADYGISGTGTKKREEFNRMLAECEAGNIDIILTKSIQRFARNTVDLLNTVRHLKELGIEVRFEKENINSLSGDGELMLSILASFAQEESRSISENVKWGTIKRFKQGIPNGKFSIFGYEWQDDKLVIIPEEAEIIRWMYSEYMKGASRIEIGRALMARGIYTRQGKPWVDSNVKVVLTNITYTGNMLFQKEYCEDPITKRRRKNYGELPQYFVEDTHEAIIPMDEWQAVQAEFKRRRELGPFGNKSLKLSAFSTKITCGCCGKHYRHSGKRNTTGEVYYIWTCQTKSQKGVSACSSKNIPEKMLQKITAEVMGLDEFDEGAFNQQIEEIVVIGDNTLTFRFYDGHEITTQWQSTAKTDWWTDERRKLWGERHKRKDTNPNKNAFHEFTGFIKCGCCGANYRCQSGKRKDGTPTRSWYCTGPRDQCHNPSVRDETMKQLVTDVLGLDKFDEDTMDAQIESATILNHTVTFHFRNGHTESRDYLDKRHSTPWTEERREKVRKSMKAAWTDERREQMSERIKKIRSEKKWPKS

SEQ ID NO: 25960 - protein, 523 aa, synthetic construct
MAKVVTTIPATLSRFTAAPINSKKKRRVAAYARVSTDHEEQLTSYEAQVDYYTNYIKGRDDWEFVGVYTDEGITGTNTKKREGFKRMVADALAGKIDLIITKSVSRFARNTVDSLTTIRSLKEHNVECYFEKENIWTFDGKGELLLTIMSSLAQEESRSISENCTWGQRKRFADGKVTVPFKRFLGYDMGPDHNLVINPEQAKLVKRIYGMFLQGQSPFQIARILTEEGILSPGGKNHWNPSNIKSILTNEKYKGDALLQKSFTVDFLTKKKKANEGEIPQYYVKDNHEAIIDPETFEMVQTLMATRKRGRNRKSSVSIFSSKIKCGDCGSWYGPKVWHSNDAYRKTIWQCNHKFDGQKCATPTLTEEEIKELFLRAANQVIDQKDQFISVYEQVLSKSLDTRSLERELSELEAEINIAAELIEECIKENAHVALDQADYQKRYDALVARFDKAKARHAEVTDLITEHTARKHQIETYLQELRDREPLTEFRETDWLAMVDYTTVHSRDDIRVTFKDGMEIKV

SEQ ID NO: 25961 - protein, 497 aa, synthetic construct
MQFVNVAAYARYSTENQDENSIETQFDNIAQYCQAHQYNIVAHYFDKAKSGTNIERADFQEMISAARTGKFSAIVIYDITRGSRDVADWFTFRKQMMQAGVQIISTHDNIGDLLNPNDFLTELIGVGIGQHHVLTSRLKSIDGTTMKAHEAIFLGGCPPLGYDVKDGKYIINESEAKIVRKIFSMYASGESYSNIIDSLNGAIGKKGRPIGKNSLSSILRNDRYIGIYTWNRRKIKIMGKWAGGVPNERIVQIKDAIPRIIDQPTWERVQIRLKSKTNSSSKAAHSYLLTGKIICTECGARYCGRTSVNQRGYQNPYYVCGNKTRTRQCHSKNIKCEDLDNFCRNAVREYILNYDLSETAQRVVTTYNATVSQYTNEKKELAEISRKIKNGTDAILNGFSSEELFQQMGKLQMRQKELEKIIADDAADELDLDLVTKLLKNMLEDVSTNIDEVVKQFVTKIYAHPNGDCTVHLGVAHFTSSGREIRTLDTTGMNRML

SEQ ID NO: 25962 - protein, 547 aa, synthetic construct
MEKKMWKIEQKVTEISKRKRVAAYARVSVESERMQHSLSAQISYYSSLIQKNPAWEYARVYADYGITGTKIIKRKEFQRMLADAEARKIDIILTKSIQRFARNTVDLLKTVRHLKEIGVEVWFEKENIRSLSGDGELMLTILASFAQEESRSISDNIKWRFQKKYEKGIPHAKFFIYGYRWEDGELVIQNEEAAIVRRVFKGYLAGKTRRDIQRELANIGAHTMYGNLFQDSTIKQMLQNPVYKGNLVIQKTFVIDPITKHQVINHGEKDKYVVENHHEAIIDAATFNQVQEEMAWRKEAGKQRGGYARNFLNTSCFTGIIKCGICGKSYIHNIRKYKGKPSEYWSCLSNKGKAEERCGAYGAIPQPALERACMSALEMAIFDKTEFLQRVEKIVVPAYHSLLFYLKDGKVIKQPWKSTALKDMWTEKRKEQVQQRMVQYRKSGLSSRYSAFSERIFCPTCDVKFVRCLETRKNRRVAYWRSRNKHKCVHTSGIQEDWLKKTAAALLGESTFDEQKFREQVEWIEVQKNRTLLFRFYSGENKEVQLP

SEQ ID NO: 25963 - protein, 521 aa, synthetic construct
MKKVQVIPATLQNYTEKPIHSQKKRRVAGYARVSTDRDEQLTSYEAQVDYYTNYIKGRSDWEFAGMYTDEGISATNTLHREGFKSMIRDAMDGRIDLIITKSVSRFARNTVDSLTIVRKLRDNGVEIYFEKENIWTLDAKGELLITIMSSLAQEESRSISENVTWGHRKRFADGKVSLAFSHFLGYDRGADGNLVVNKEQAETVKLIYRLYLSGYTFHSIAKKLTEQKIPTPARCKIWRPNTVRSILMNEKYKGDALLQKKFTVDFLTKKSKRNEGEVPQYYVQNNHEAIISPQVFDLVQEEMRKRKNSKIRHSGISIFSSKIKCGQCGSWYGAKVWHSTDKYRQTVYRCNDKFKRHCKTPHLTENEIENIFVRAVNQLIKNKDEILSNIILLKIRLVDTTDLEKKRNALEFNMNLLAERVQQLISENACLTQDQVQYNQEYSELVNRYEKIKIKYDQICDTMKQRTSRGQQLERFIENLQKQEFISIFDKRLWCSLVDFITVNEKDDIWVTFKDGTEIKA

SEQ ID NO: 25964 - protein, 481 aa, synthetic construct
MKKTGAIYIRVSTGRQEELSPDAQLRLLKEYAERNDIYIPSEYIFQDNGISGRKVSKRPAFQQMIGLAKSQEHPIDVIIVWKFSRFARNQEESIVYKSLLKKSKVDVVSISENVEGEFGSLIERIIEWMDEYYSIRLGEEVVRGMTEKAMRGQTLSAPPIGYLLQDGKVEIDPVTSVIPLTIKDMYLAGYSLRQISDYLNEHGYRTKRGNRFDTRGVLYIIENPIYYGMLRWNYSGRQRVLKPEDEVIYAKGYWEPLWDEATYKQMQARRKSTKREFKTRDHSTTRHWLTGLVKCSTCGGNLTAAKGTNGFQCWKYAKGLCHDSHYISVKNMESNIISGLEGFLDTGIVFYTVISTEYNDNSQRIELLQHQLSKLQQREKRAKDAYLNGIDTIEEYKTNRLSIQNDRQTIQEEIQILSQTKKYAKEELDQLMLSRIQDVVTTLKDETVGDIEKGNSIRTIVDQIIFDRKNTSFDFVLHLNI

SEQ ID NO: 25965 - protein, 465 aa, synthetic construct
MKGNAGDTIVKKIDLSPELVRAALYIRVSGEEQKIKGLSLEAQQERLEAYARERGWVIVGIYIDAAKTARKNIHKRTDFQHMMDSVKRDEVDILLFCRLDRWFRSVADYYKIMEVLEAHNCDWKTTDEEYDTTTANGRLYINVKLSIAQNEADIDGERIDVVFDSKIAHGTVVSGSAPFGFRVNEEKRLEVVPEDAAIAQDAFNYFETSISQRATVRYIRETYGVNWCDATFRRMLKEKLYTGVYDRGGRFNDHFCPAIISKQQFDRVQALLERNARSVPSGKVYIFTSILTCAECGHKLVGYKSSDYYYYRCNQHFQRGRCSHNHSAREDVVEKWLFEHLAEELERCQLEWEVAAAKKKASVARTDKAALKRKLTKLKELYVNDLIDIEDYKRDYQIYTAALKQIPEPSIEPPPDFAAVRRLLDNDFKTIYENLTREEKRTLWRSVIKEIRIDNDQNITGVVFG

SEQ ID NO: 25966 - protein, 582 aa, synthetic construct
MRVSVNLNAQKPDTTTNAVIYARYSSHGQTEQSIEGQLAKGHEYAAAQGYTVVHEYIDRAMTGRNDNREAFQKMLSDTGKHQFQVVIVWKVDRFGRNREEIAFNKHTCKKNGVRVEYVAESLPNSPEAVILESVLEGMAEYYSIQLSQNIRRGQLESAKKCQCVGGSVPLGYTLDSDKHFVIDPQTAPVVKKIFDLYAEGATISEITGQLNEQGIRTARKQLFTKNSLTKLLKNEKYIGIYAYKDVVRVEGGVPAIVDKSTFDRVQELLKINRRAPSHTWTKVEYLLTDKLFCGHCGSPMVGESGFSHTGAKYSYYGCIKRRREKACDKKPVRQDWIEALVLDETVKLLHDDELMEYIIDRTWEYYQITDKVQEEKAVLEAQLAEVDKAINNLVRAIEAGIFNAATKSRMDELDAQKAALTASLADLELTSGIRITRDHIEYFLLRLRDLDVKDRECQKRLVQTFVNAVFVYDDGRVKITYNYSGQSSTITLNQIASAEKGKGFVCCLPCSTFSPRFPRGVAALFLFWGKSGVNRLPISAVLCYNGSENGRGGRKNEKAACCVPDGARLLGLCGVRGRNAGR

SEQ ID NO: 25967 - protein, 573 aa, synthetic construct
MAKVKLPDKPRVAIYTRVSTLHQIDKDSLPMQRQDLINYARLILNTEDYVVYEDAGYSGKNTDRPKFQEMMQQVRLGMFTHIIVWKIDRISRNLLDFATMYSELKQLGVVFVSKNEQFDTSSAMGEAMLKIILIFAELERNMTSERVTAAMLSRAANGQWNGGRVPLGYDYDPETKTFTINESEAAVVKIIHDKYEQERSLVSLARYLNGHGYRTRTGCTYSPSTLLIILRNIFYCGDYRYNVLKDGDRQKRKKESEWITVKDHHPAIISREQKEEIARILKENRRLECERRGIYSKKKNVHVFGGLVICGNCGHAMTSTIRPADQDGIRWSVYVCPTKRRSEYLCKGRATSEVVLGEFVFNYILNMLNVQKNFDSINSVEDMEKMLLSGSTFRDVDGIERAGLDDLYNMLASGLTEKAPFDSSVEVRKKPVVSDIELENLNTEKTRIERAAERLQNLYLYSDDSISQKDYIIQREKLMSQLAEVNEQIGMVMSNADEKDVSDEEFVHAASKFILTQKLEGRTYIYYKRLATTVSREVLRSFVMSIIENITIYDGRVQTIVFKNGLSHTFILK

SEQ ID NO: 25968 - protein, 500 aa, synthetic construct
MNVVLYMRYSSDRQTEQSIEGQKRVCMDFCERQGYNVVGEYIDRATSAYKETAKRTNFCRMIRDSSNGLWQGVVVYKLDRFARNRYDSATYKVRLKKNGVKVISATENISDSPEGVILESVLEGMAEFYSKELSQKVSRGLNESAYKCNSTGGAIPLGYKTVDKKLTVDEPNAQIVKEAFDLYAGGATISEICEKFNSQGYRTKKGTDFNKNSFKSMFRNEKYIGTYTYKDIRIEGGIPAIIDKETFKAVQKRLSANAQAPARGKARVNYLLSQKLFCGHCGANMIGESGRSKTGETYNYYSCSTRKRFHSCKKRTIRKDLIERIVAENAMRLITPEMINTIADMAIKCNREDIESDAIIPALTADLKEINTSIKNLLKMVERGVESETLDSRLKELEKRKKDTESRLDAAKSEYLTLDKTVIVGWLSQFLRGDIEDEDFRRHLIDTLINSVTVWDEPDGGYKITTVYNLRKGNTQTYRVNADGSSDLERNSPPKKRQFS

SEQ ID NO: 25969 - protein, 490 aa, synthetic construct
MTDKNLLVITPHRKEPGKQRIAAYCRVSSRSDEQLNSLTNQINFYRSLFENDDTVVFVGIYAEEGLSGTQAESRPQFMKMIEDCRSGLIDCIRTKSVSRFGRNTVDTLIYTRELRSLGIDVFFEKENIHSTESSGELMLTLMAAFAESESETMSENIKWGKRRRYEQGITGSITLNGMYGFRQNKGIVTIVENEAELVRQIYKDFIDGYSYGEIADRLIAEGVPTRMPGASWAKTTVQHIIQNEKYCGDCLFQKAFIANPITHQQVRNNGELPKYLVEDCLPAIVDKETWKLAQAVAARHTSHRQAPNERYPFTGKLFCGVCGKPYYYYHYTTTNKKPLAAYRCMSHKTQSAVEVPGQTYTPPHKATFNYNASAKLIAYRERYCKPPKERQMLCTDVRIPTDLPQKAFCRAWNLIVAKKLRYQATLRSTVDNAEDILVRYRAEEMCLLIDEIGKINEFSYPLMLKTLDRVVVNANGKLTFIFQSGIKITV

SEQ ID NO: 25970 - protein, 548 aa, synthetic construct
MANKTVKKIEATKSTLSAQYSTFTRKRNVAAYARVSTAKEEQENSFEAQVSYYTQKIRANPEWVFVEVYSDEGITGTNTKKRDGFNRMIEDALAGKIDLILTKSVSRFARNTVDSLVTIRQLKEKGVEVFFEKENIYTLDAKGELLLTIMSSLAQEEARSISENTSWGRRKSFADGKVSLGYSNFLGYDKGPDGELVINEEQAEIVRRIYAEFLAGKTPGGIAKGLTADSIETPGHKKVWQASTVLNILKNEKYYGAAILQKEITVSYLTKEKRPNTGELPMYYIEKDHEPIVSPETFQMVQEEMRRRREAGSNMQCVSIFSSRIICGDCGGYYGRKIWHSSTKYTAWHWHCNAKFQKRKYCETPTLKEESLEETFVEVFNSLIADKDEIVENYRLCIDAVTDDSEYRRQLEDLNNGCGEVQTLIRSLLMPYSRQDTADDIHEKLQEYEERLDTMARLKQELDLKIAACAAKRVQITGFLNELMKHDALLAKFDPLVWQAVINYATVNRDCTITFTFRDGTEKTVPIKNGVRPYTKRNKPQEVDGNDG

SEQ ID NO: 25971 - protein, 434 aa, synthetic construct
MKKTIVNIAPAVAETPHTKRVAAYARVSCGKDTMLHSLAAQIDYYRDYIMMNPEWRFAGVYADESKTGTKDNREQFQLLLTECRSGNIDMVITKSISRFARNTVTLLETVRELKSLGIDVFFEEQNIYTMSAEGEVMLTLLASFAQAESLSCSDNCKWRIRKGFEEGRASTCTMLGYRLVNGEITLIEEEAEIAKRIFDLYLAGYGLQKIANTLNEEGMYSIFGNEWHPTTVRKVLTNEKYCGDLLLQKVYRENHLTKRKCHNTGELPQYFVEDDHPAVVTRQIFMAVQDELKRRAKEKTQPVGSKSSFTGKIRCSCCGKNYRRKTTPYNIVWCCSTYNSKGKKYCPDSKVIPEETLKRAAAEILKTDGFLDEAFETQICTIEAHPGNLLRFIFTDDSTTDYVWKDRSRSESWTDEMKAAAGRKTKERNTSHGK

SEQ ID NO: 25972 - protein, 533 aa, synthetic construct
MDEKRLVDGATALAEKQPRVIKIEPTERPQNVRLRVAAYTRVSSDSEDQLNSFAAQNRYYTELISGKAEWRMVDIYADEGITGTSVAKRDDFQRMMADCRRGLIDQILVKSISRFARNTKDCLQNIRELKELGVNVRFEHEGIDTVNVSSELITAIYAAFAQKESESISGNMRWSYQRRMESGTFLPPSTPYGYRIVNKKIEIDPERAVIICKVFQWYLDGISKEQIAHKLNKAGVLSNQNKAWRAGGIHYILTNERYIGDSLWQKTYTTEAIPTVRHRNTGAREQYYVEGTHPPIISKEVFIKVQTLIQIRKENYGKSPSETIHPFSRKVICGCCGTVLRRKPQRGKYYWCCMRHDANREECPLMPISETNLYESFYRLYYKLKHQSIPILEQMLINLQMIRNRKMLWSPDIVALNKRISDLSSQNQTLAFLKQQGLVDPDIFISKTNELTKQLRQAKLEKEKLVDAESDMTALQTQDLIDLLEGGPEILDSFDTELFGELVEKIIIESNDSVRFCLKNGLELRESIERTVR

SEQ ID NO: 25973 - protein, 539 aa, synthetic construct
MKEDAPRVIKIPAKPEATRQAEARRQLRVAAYCRVSTKEEDQANSYEVQKEYYTDKIMSNTAWTMAGIFADKGITGTSAKKREDFMRMIRHCRQKKIDVILTKSVSRFSRNTVDCLYYIRALKQLGIAVIFEKENINSLEEDSELRITLSGAFAQSESESISANVTWGKRRAMEAGKVSIQYKKLYGYRKGEDGQPEIIPEQAEIVRWLYERYLTGASLRMIKDELEQQGVKCFEDSPEWTISRIRSILQNEKYCGDVLMQKTFRQDFINRKAIKNTGQLPMYLIENHHEGIVSREKYDAVQAEMARRNAAKSPSKNAVTGMASYASKYALSERLVCGECGTLYRRCTWTRNGEKRVVWRCVSRLDYGKKYCHNSPTLDEAPLQQAILAVLNTAMADKNSLIRQITAAMETELIPFPGGTMSLGDIECRLRVLEQQFQTLLEKATDDPAAYGGQFKEILDEQTFLKEKRSVILANNNEQTKANQRIMDAAQTLENASPYITEWDESAVRQLVETVKILSTDEVAVTLKGGIEICQKIMY

SEQ ID NO: 25974 - protein, 497 aa, synthetic construct
MNAIYARQSVDRADSISIESQIEFCQYEMRGEQYKVYTDRGYSGKNTDRPAFAEMMNDIESGVIGKVVVYKLDRISRSILDFSNMMEKFGKHRVEFVSTTEKFDTSSPMGRAMLNICIVFAQLERETIQKRVADAYYSRSQKSFYMGGRVPYGFRLIPTTIEGIKTSMYEINAEEAEQVRLIYELYSKPECSYGDIIRYFQAHGILKNGKPWGRTRLADVLRNPIYVRADLSVYEFYRDQGAIMANDPSDFIGTNGCYYYKGQDSVGRKQMNLEGNHLVLAPHEGIIPSDLWLKCRAKCLEAQQIKPSQKAKNTWLAGKIKCGICGYALVDKHYSTTRSRYLLCSNKMNSKACEGPGTIYTDEFEQIIYNEMRKKMAQFKTLRRCKGNYINPELTALNVQLTQVETEIGSLMDRLSAADDTLFRYISGRVKELDGKKQELMKRISELKLHKEADYTEIYNHLTMWDELSFDDKRQTVDQLIRVIYATNDSIKIEWRI

SEQ ID NO: 25975 - protein, 485 aa, synthetic construct
MPTSDLKIAAAYIRVSTDDQEEYSPDSQVRLIREYARKNGYLLPEEYVFQDDGISAATARKRPAFNRMIALAKEKERPFDAILVLMFSRFARNREESVLYKGLLRKQGISVISVKEPAVDGPFGTLIESIIEWFDEYYLINLSAEVKRGMSEKFLRGEAMGTAPFGYRIDSANKTFTVDPERAEIVCDVFRSYADGAGLRDIAVQLGDAGITTRRGNRPDSRFVEYMLRNPVYIGKIRWTPGHKTRYSRVHIADGVEVVDGKHPPIVSIDLWEAVQRRMDQRKAAYGRYQRQAPAAWMMRGLVRCSACGATLIMAGRSSSCPFLQCHSYAKGACHTSHSLSLRRANAAVLTGLRHSVGTLTFHMVPHLTSAPSRTADYGRLLEQERRRLARCKDAYQAGVDTLEEYRDNKARLEERIRRIEEQAASAAAAPESFDKAAYGKKAADILRFLETSADEGAKNEVLRSIVDHITYEKASRHLAIYFYT

SEQ ID NO: 25976 - protein, 512 aa, synthetic construct
MLADYLEKIRTKTNVLVLKAVIYARYSSDMQRSESIAAQIRFIREFAKNNNIIIVSEYIDEAQSAKRDDREAFQQMMKDSKSAEWQIVLVHKLDRFARNRFDSATYRIHLRKNRKYLISAVEQFDDSPESAMLEAVIEAMSEYYSKNLAREVMKGLTENALKGKNCGGTPPLGYDLDEHKFYKINAFEAQGVKLIFKLFLDGKTYSEIISILNAAGYRTKCNRLFSRNSLYEILRNEKYKGIFVYNKTQSRDEITGKRSGHRYKSEDEVIRINGVVPQLISPEDWDVAQSILNNRKKAYGNNAKETYLLSGKIKCGKCGGSYVGRRVFNSCGVKYIYYACNEKRNPNFKCDNSSVRRDWIEDMVVKKVKEFVREFNGKYFEDIQSEYIKEVTDCKKKEIMALRSKLNSIDADIQRLVDAISKCSLESLINKLELLEQQKKEIQADIDKFEIPDNNFSIEQIKKLLSKAEQMLEEESTPLKELINLVVKEIVVNESDIQIYMNCFDKTMTHKR

SEQ ID NO: 25977 - protein, 535 aa, synthetic construct
MPRKKSATGAPVCLVAYYRYSGGSRQNEQSIEGQRHDCEAYARSHGLIITKEYIDRHISGKTDDRPAFQQMISDSDRHAFDAVICWKTDRLARNRYDSAIYKNRLRKNGVKILYAAETVVDGPEGIILEGLMESLAEYYSAELSQKLRRGQRESAMKCIALGGNRSFGYDIGPDKHYCINPQQAPAVRYIFEQYAAGFTAADIVAHLNANGIRTSRGNAFNKNSILRIITNEMYLGVYKYADIRIEGGVPAMIDRDLFDRCQRQLAFNRAHSGGTGPRADYILSGKLFCAACSRPMKGVSGISRSGEKYCYYACPGHTEKKGCTKSNVEKSALECAIVRATAQYILAPDKLQQILDQVLALQAHQTAPKPDPEKQALEAELSEVLHKQNNLLTALENGSSARLVQRLQDLEQQESTIRVRLAAIPDPPVPPRFTRDELEFMLSQFQRDESEQTLSYQRRLLDTFVSSVTLSDEQAVVCFNLTAPGTHSPERLTVPFSINKNPAEPSDLTPDSAGSTALRLVEAMGVEPMSEKSSV

SEQ ID NO: 25978 - protein, 424 aa, synthetic construct
MRPKVTIIEPTQYQGNNNPKTIPAKTRVAAYARVSTEQDEQQSSYEAQLDYYTRYIQSNPDWEFVSVFSDEGITGTSTKNRDGFNQMIDLALSGGIDLILTKSISRFARNTVDTLQAVRKLKAVGVEVIFEKENLHTLDPKCEMILTIFSSLAQEESRSMSENIRWGHRKSMADGKVSLPYSSFLGYRKGADGRPEIVEEEAAIVRMIYSMFLDDYTINDIARYLTSQSIPTPRGKTVWSVSTIRSILSNEKYAGNALLQKTYTVDYLTKEVRKNCGELPQYLIEYSHDPIIDPETFNQVQAKIEAQTPYRRKIRGNSPLSNTIVCGVCGGFYGHKVWHNHENTDRYDVWYCNAKYGSSDKCPSPVLREDEIKSAIEVVLRKLGKERTKYTDALWRKTVEVVTVYPGGKLEFRLKSGETASYQL

SEQ ID NO: 25979 - protein, 447 aa, synthetic construct
MQITKIPAKPKEYKTLRVAAYARVSADKDAAFHSLEAQTEYYEKYVSNHPDLTLVGIYSDNGISGTIVERPEFQRLLEDCRAGKIDLVITKSVTRFARNTVILLQTIRELKALGIDCYFEKEQMHSISPDGELLLTLLAMYAEEEARSASENQLWRVRKRFEQGKPWVGNMLGYRLIDGKLIIIPEEAEIVRQIYADYLSGMGKNAIANKLSRSGITTPTMKSWSYTGICKILCNEKYVGDMILQKTYTPDFRTKKAKINHGNVRQYFVEGSHEPIIDQVTFDAVQHEMERRKEKWNPDKSSKTINENMFSGLIVCGICGSLYKRKHQHCQSYSSYLWLCNKYYRRGKTACPSQKIPESILNSKTKEILNVDSFTHELLEEKLTRIIVPEHNHLIYEFKDGSSVDVFWQFPSRSLSWNSEMRQAARERTLAKSRKEKKEHETKGYNH

SEQ ID NO: 25980 - protein, 498 aa, synthetic construct
MTAVIYARYSSDNQREESIEGQIRECTAYAEKNGITVVKHYIDRALSAKTDNRPEFQQMIKDSEKRLFDIVLVWKLDRFARNRYDSAHYEYQLERNHVKLVSATEPISDSPAGIMVKSMLTGMAEYYSAELSEKVVRGMTENVLKGKYNGGTIPIGFKVDEEKFFQIDPLKAPFVAEAFQRYNEGATMKELMNWLNDSGVTTNRNQKFTYNSVQKLLTNKRYIGENHFKDIVMPDSIPAIVDKDLFEEVQLKIKKNSRAPARHKAEDDYLLTTKLFCGMCGAMMFGECGTGRNKVVHHYYKCATAKRFKTCKKKTVRKEWLEDLVIAETMKLIQDDAVIDAIVAEVMELQDQENTTLPLLEKQMREVENGIENMLNAIQAGVLTNSTKSRLEKLEAQQKELEVRIAEEKIARPRLSENQVRFWLTRFRKLDPNVKSHRETLINTFVNAVYLYDEKVLITFNYKDGTKTITFDEIAAKDASEGNGSDLGCFAPPRTPAL

SEQ ID NO: 25981 - protein, 509 aa, synthetic construct
MPFDDYKESVAIYLRKSRMDPDSEDIDETLARHEDTLLKLAKQMDLNIVEIYKEVVSGDGLFTRPEMCRLLQNVEQGNYSAVLCMEIDRLGRSSQKDGGIILETFKDNDVRIITTSKTYDLNDDVDEQVVEMHSFIARQELKAIRRRLNRGIEKTVEMGYHICEPPYGYRRTYIDKRPTLEICEEEANVIRMVFDMYVNQHMGTQTIADNLNKMGYTPRKNDHFSRNTIQFYLQNETYIGQIIWNKRKHIKKKFPTDKHRTVLNPEEKWIVSEGKHPAIISKELFEQAQEIHQFRTHPPTAHGIIRNPFAGLIYCKNCGELMQRQYSKISGNRLLCLHSGCIRSIRTMFVEKVILDAVKNILKNSSSAVQNSIQKTNNLQIEMLDRTIKDINTKIKQLNSQKSKLHDLLEQGVYDVDTFLDRSNAIAEKIQNSKLALAQHEKKLNSIQSVPTVQEVLPTLRYLIDEYDNLSAGEKNVIFKKLIKRMVYNRTKDHRGNDFDLDIEWRFTM

SEQ ID NO: 25982 - protein, 526 aa, synthetic construct
MPKVTMIPATINPLTHLPKVAAQKRRVAGYARVSTDSDEQFTSYEAQVDYYTKFIQSKPEWDFVKVYTDEGISGCNTKKRDGFNSMVSDALAGKIDLIVTKSVSRFARNTVDSLVTIRKLKENGVECYFEKEGIFTFDGKGELLITIMSSLAQEESRSISENITWGQRKSFADGKVHLAYKRFLGYEKGEDGRPTIVESEAKIVQLIYRLFLDGKSQASICRYLEDLGIPSPGGKDKWSKTTVTSILQNEKYKGDALLQKSFTVDFLEKRMKPNEGEVPQYYVEGSHPAIVDPDEWDHVQTEFARRKALGRAYSGKSVLSAKLVCEDCGGFFGSKVWHSTDRYRRTIWQCNGKFKAEERCHTPTVNMETVQRLFAQAYNRMMENREQIIKDCETMRRALTDFAELDAEIERQLEETQVVAELVKAAVKENASTAQSQEAYLRKYEALTERYEKAAAELERLQNLRTTQSQQDKAMALYIRTLKKQPVVLREWSDTIWTVMVEKAIVHRNGAITFVFENGTEVKVGE

SEQ ID NO: 25983 - protein, 433 aa, synthetic construct
MSGRITAVSKPPKLERKKRVAAYARVSSGKDAMLHSLSAQVSHYSDLIQRNSDWLYAGVYADEAKTGTKDSRADFQRLIADCHAGKIDMVITKSISRFARNTVTLLQTVRDFKAWEVDIFFEEQNIHTMNADGELMLTILASYAQEESRSASENQKWRIKRNFEEGMPWNGAMLGYRLKDGRYEIVPKEAALVRRIYNEYLAGDGYQAVAKRLTEEGVPSRFGGKWNQSVVSKILSNYTYTGNLLLQKTFRENHITKKTVINHGELPKYHAENTHEAIIDMKTFHAVQTEKARRAAQFNKKPAPRTTYPFTSLLVCDNCGKNYRRKTTKTGIVWVCGTFNTLGKSACASKQIPETTLQQVTAEVLGVKAFTREQLHSRIQSIRVCNGNILIFCFKDGSEVTRTWKDRSRSESWTDEMKEAARQKALERSKHNA

SEQ ID NO: 25984 - protein, 498 aa, synthetic construct
MKAVIYARYSSDSQREESIEGQLRECTAFAEKNGITVLRHYIDRAYSAKTDNRPEFQNMIKDSGKRLFDIVIVWKLDRFARNRYDSARYKATLKKNGVKVVSATEIISEGAEGIILESVLEGYAEYYSADLSEKVVRGMTDNALKCKFNGGMMPIGYVIDAEQHFQIDPLTAPFVLEAFKRYDGGETISSIMNWLNEQGLTNTRGQKMTFNSVGHILHNRRYIGEFRYRDVIVPDGIPAIVPQDLFDRVQEKLAKNKKAPARHKAEDDYLLTTKLFCGYCGAYLCGESGTSRTGKVHHYYKCVSVKKKRTECHKRPVRKEWIEDLVVGETMKMVMDDKAIEAIVSMLMDLQDRDNVNVPLYEQQLREADTAISNLLNAIQQGILTRSTKGRLEELENRRDELENRLACEKLAKPKVSAEFMTFWLHRFRKLDVRQQSHRKMLIDTFINAIFLYDDKMVITFNYKEGTKTITFAELQEAISNKNGSDLDCLAAPFHNPL

SEQ ID NO: 25985 - protein, 523 aa, synthetic construct
MNENVTLIPARIRAGNRISKEENKPKLRVAAYCRVSTDSDEQAGSYEMQVQHYTEYIGRNKEWELAGIYTDDGISGTNTKKREGFNEMINDCMAGKVDMIITKSISRFARNTIDCLKYVRQLREKNIAIIFEKENINTLEASGELLLTIMASLAQQESASLSQNVKLGLQFRYQEGKVQVNHEHFLGYTKDTKGNLIVDKKEAKVVKRIFREYLEGASFRDIAMGLERDHIKTGGKRYKWHMSTVRGILSNEKYIGDALLQKTITTDFIEKTRIKNDGTVPQYYVKNSQEAIIPRDVFTQVQEEMLRRANMTSGRDGQKRRIYSSRYALSSICTCMKCGDIYRRVVWNSRGKKYIVWRCCTRVENGPSACSAPTIPEEQLQQAVVDAMNTVLECSKDVKDILEENILEVIGQDNSDKIEAINKEIDEKQKKLLELVHGKKDYSKCADEMEELRQKKQLELVKHANTEGIRQRINELAVYVDSQEPQISEYDDKLVRKYIEQIQVYDDRFVVCFKAKMEINVLR

SEQ ID NO: 25986 - protein, 521 aa, synthetic construct
MARITKIEATKSFIEKKKIRVAAYARVSTRSDEQLLSLETQKEHYDNFISANSEWEYAGLYYDEGVSGTKVEKRDGLLALLKDCEDGKIDRVITKSISRFSRNTADCLEMVRNLARLNIYMYFEKENIDTEHMSSELMLSILSSIAESESRSISQNNKWSIKHRFEEGTFIISYPPYGYENEEGRMVIVPEEAAVVRDIFNMTINGMGTHVIARELNERGVQSRKGTKWHPSTVRGILQNEKYTGDVIFQKTYTDDNYNRHINYGEKNMYLCKNHHEPIISHEIFDKATAVIHQRAKEKSIETGIGKYHHLYAFSGKIICGECGSTFKRRQHYKPSGNYVAWCCNTHITDNDDCSMMYIRDEDIKTAFLRMIRKLQTAHAKVLKPFIEGLRGANNKERLHQVLALEEQIEKNVEQTTVLTNLLSSGYIEPEIFHAEKNQLTSEADRLAREKQLISKSINGDLTHLDEAQKLLRFVSKKAEITEFEDEMFLEYVDTMTVHSRDEITFNLKCGLNITERLVVV

SEQ ID NO: 25987 - protein, 458 aa, synthetic construct
MRMIDDARAGKLDMIITKSITRFARNTVDSLMYLRILKEYNVDVYFEVENVHSLGANEMLLTILSSVAQQSSEDKSESIKWGYQRQFEKGKVYAANMYGYKSNRGTLDIIEEEAEVVREIFSKYLSGMSESKIARYLTENKVPKKNGSTKWDSGTIGRMLQNEKYSGDALLKKTFSIDFLHKKRYKNEGQKKMYFVENSHPAIVTKEVFKAAQVERTKRNMKSNDEKEVVESHHQNRYSSKNPLSNKIICSECGALYRRTVWTKRNKEKEPVWRCSNRLKNGKAICPNSVTLKEKPLLDALTSLINGKTKSKEKTRLELAKELSEYLNPKDIVEKKQKLNCELENVNSQINELLDKGMLLVARGVQDESQIEEPLAQCYQTKQMLKKELQKLDDKYNALKQGRQEKLLKTLEKNSNEHTVMTQEDLAVFIDRIVVKKDKIEIETIDDQKCELLLNQIS

SEQ ID NO: 25988 - protein, 408 aa, synthetic construct
MAHAQKQVRIIEPLERFVNRINLVGCYARVSSDSEDQLNSYNNQVDFYESYVNSLENSKLVKIYTDEGITGTRMDKRDGFLQMIEDCRNGLINTIITKSISRFARNITETLSVVRELKSIGVSAYFMTEKIDTAKMGSEMMLAVYDACAEIESKAISNAQKWAFRTRAKEGRYNQPKLPYGYQRIDGEVKVIEEEAKIVEDIFNKYVNKDFSVTKLVDYLNKHYFKKKKWSQSTVSSMLKNERYCGDMLLQKKYSPDVFPYKLVTNKGELAQYYVYDVFPKIIDRELFEKANEKLVNNKLKFNKNQTDGNREYLLTSKIKCEHCGGTFKRRVLRNKEYWSCSNHVTSAKKCEVKMIGTDEIDDAFLKIFYKLKGNIHVLEAYKKHIVNFTTNDDDRCELDLVNRELKK

SEQ ID NO: 25989 - protein, 539 aa, synthetic construct
MYQSNNHSTYAALYTRFSRDEPDGESNSIANQKKLLLNYAHSRGIVNTKFFVDDGFTGTNFNRPDFKAMIAECESKKISTIIVKDMSRLGRNYLMVGYYTEIYFPENNIHFIAINDDVDSVKGDNEFTPFRNIMNEWYVKDTSKKVKSVIHNKGMSGERICNNVIYGYKHNPDNPKEWIVDEEAAQNVRTIFQLFLNGKGTSQIAKYLHSEKILVPSVYAREHGKISARATPADPCLWDSKTIREMLKRQEYVGDTVNFKTKKVSYKSKKKIYLDKSEYVIFPDTQEPIIDRDTYERVQKIMESRKKVPIVREPDPLGGYIFCADCGSRMYITRSTVFPKKNCYHCGRYKRSSELCSSHYIRECVINQLILNELQKVFSIVKNDRERFLNVAIQSYANRTSYDVKKLRKDKQLCEQRIQELDVLIKKIFEQSVLGTLSKERLATLAAGYESEQAEIKNKLSAISKEIEITDSKQLNADRFIAIVDKYTNIDSLTPEIMSEFIDKVMVHKPIYDGNNKRHQTIEIYFNGIGAFDYDSCNS

SEQ ID NO: 25990 - protein, 514 aa, synthetic construct
MSMNAVIYARYSSHNQTEQSIEGQLRDCYDYAKRNDLTVIGEYIDRAISGKTDDRPDFQRMIEDAPKRQFERVLVWKFDRFARNMFDSVTYKHELKKHGVKVISAMENIGEGDESVLLEAMLEASAEYYSLDLKKKIARGMRESALKGKFVGGAVPWWCSVNAEHKLIVIDERAAIVKEAFARYDSGEGSKSIVDDFAKRGLRSNRGMPVTLSWLLSILKNRKTIGEYTYNGIEIPGGLPAVVDKPLFDRVQERIARKRRTGGGEATSKTEYLLQGKLFCGLCGSPITAECGQNRKGVVYNYYACSLKKKKHQCKKANERKDFLEWYVVEQTLDYVLTPDRTDYIAEAIVAEYERQFDKSGIKALEQKIALTEGEIQKTMDLCIQATSDAMRNRFMKRCEELDAKKADMEIDLSKLRVAASITYTKEEVRAWLRQFCAGDSFNPAFRRRIIDVFINTVYLYDDKLIIYYNLRDSRQVSYIEAIGASSEIENLRPVPDNKKTAVECSTADKNGGA

SEQ ID NO: 25991 - protein, 510 aa, synthetic construct
MSSVDKIAVVYARYSSHGQTEQSIEGQIAAAQKYAEQHGYTIIHIYADRAMTGRNDDREEFQRMLSDTATHQFGVILLWKIDRFGRNREEIAFNRYRCKKNGVRVERVAEDVPDGPEGVILDSVLEGMAEYYSLQLAQNVRRGQRESAKKSQTVGGCKIIGYNVDPDTKRYEVDPKTAPFVTEVFKRYANGETISEIVAWLNAQGVRTTRGGEFTVNSLHRLLKNEKYTGVYIFHDIRNEGGMPALIDRATFDKAQEMLKVNRRAPARVWSKTEYLLTDKLFCGHCGTMMVGESGHGRNGTKHNYYTCWNRKKKKTCDKKPIRQDVIEPLVLRAIGKLLENPATLENIADQVWAAYERSDTSGDTIKALDKQIADVDRALSNVMKAIEMGIINEMTKARMDELTDQKQALSAARAEAGLAGGFKLTRDMILFFLQDMAALDRSNRDSQKRLIKTFVNAIYLYDDQFNIAFNYTDNGKMTVRMQEIDDAASGDVFGRCAQSPAKSRLSRLR

SEQ ID NO: 25992 - protein, 518 aa, synthetic construct
MPKKEANQPIKAVLYARYSSDRQREESIEGQIRVCEDYAKKNNMVIVHTYADRAMTGRSDQRPEFQMMIQAAATQAFDVVLVYKLNRFARNRYDSAKYKHKLKKYGVHVVSAMENIADDPSGILLESVIEGMAEYYSAELAENVMRGMTENALECKWSGGLVPLGYKLDADHHLVIDEAGAQIVRRIYQMVLDGRTPTGIINELNAANCRTSTGRPFGKSSLTTILRNEKYIGTYTWNHIRKENAIPAIIDRKTFEAVQKTLQYMKNNHVKVCSENFLLTGKLFCGQCGSNMVGTSGTSKYKNTYYYYACTKHLKKDGCTARNIRADKLEELVCSVTTRILSSKEAVHAIARQAVEAQKKQKESLTVQSLKNQAAEINKKLKNCVQAVESGLISVTITNHIKEYEKRLTELNEAISREELLSGKLKLTEKHIEFFFYSIAQKIKTADKYKSILLSSLVRCVIVYDDYIEIQYNYKNELPLLQNPVRVKSSNLNGMVTQEGFEPTTHRLEGGCSIQLSY

SEQ ID NO: 25993 - protein, 522 aa, synthetic construct
MRAFIYCRFSSHKQQELSIEGQRDICQEYADKHNITVVGQYADRARSGKTENRADFRRLMRDAATGVVDCVLVWRYDRFFRNRAESALYRKQLESAGVHLISVTEYIPEGSAGIITQGMIETVAEYFSAKLSEDVSRGMNKAAQHCQIVGRAPLGYRAGPNKRWQIDPVGAELVRRIFEWYASGKAMGQLAAQLNEEGHRTTNGTLYTRSSFNSILRNEKYIGVYSYGGEVRIEGGCPRIIEDELFFTVQRRLSANRHRPGAYKAEVPYLLSGKLFCGLCGAPMTGTAGTSHTGARHYYYICNNRRAKTCKKKNVRLDLIEEAVLQSALDILTDENIAYISTEVERRCAENSDSAALLASLNAQLEEVQRRLKNIGNAIAQGIITETTKELLEEAEADRTALRQQIDRAKVQAALVVKAEAVACWLDGFRRGDRTDPDFRRQVFGALVHSVFVYDDYLKIIFNVDSAGAAVVPYEAAQAAAPSEAPPGSYLDTLGAPYQANPNVLLFEGAFGFVFYFPIMKV

SEQ ID NO: 25994 - protein, 684 aa, synthetic construct
MSILQTIKTIIRVVLYLRLSDEDKNKLSKEELSQSIKNQEIMLRDYAEEQGWEVVGVYNDDDWSGSDATRPDFNRMIEECKNGNVDIVLCKTQARFARDMELVEKYVHNLFHEWNVRFITVVDRIDNARKETKKTSQILGLTDQWYLEDTSLNIRETLKSKRKDGQLTSSFATYGYMKDPENKNHLIIDPISAEVIKRIYDEYLSGTGLDKIARRLNEDKILSPYEYKLLNGSKLKIPVIKDYVNYGYIEKTGTYMLDVSFTNKEEYILKDLVSFNYITTDMKNFNNKCDIVLKKYTNNRTKIYYSENDNIDINNFNIDDCILLNENYVIPKTAKVIISHTKELDRTHTINYQFEITLKENREHEDYYINICGKATDEIKKSDFIHNIRKKFKWSSSTIRTLLTDEVYIGNMVQFKSTTVSYKNHTVVWNDDETRIRKDNTHEPIIAKDIWYTVQERLENTARSCKSGTVHPLCNKVYCSNCNQIFTKTGNRRSDGTGYLCCKDKKTNWSNCDNKASIREDQLHQFILEKMNEMLKKFYEEDDLKEMQNEVIEQDLYKDKLNSLEKELQSINKELQGKSTYFQKLYEDRTNGILREKEFLILMNKYKNDNEKLEKRQKIVKKEISSTLAKKETVKTKKNIFKKYRHIEELSIEIVEDFIDKILIGNYDETTNSRDIKIIWNFTI

SEQ ID NO: 25995 - protein, 462 aa, synthetic construct
MKAEIDRIIRVALYIRVSTEEQALHGYSLQAQEDELLHFAKEKKYKVVGTYRDEGFSARKPALKRKVMQELLDDVRAGKIDRILFIKLDRWFRNVWEYHQVQAVLDENNVTWQATMEDYNTATADGRLKVNIMLSVAENEADRTSERIKFVFNSKVNRGEYPYGRVPIGYKAEIVDGLRKLVKDPELEAAITAFWEYALKYNSVRRAGFLVNAEYGTTRAAKEWLRTGKLEIYCGTFEGIPDFCPAYVSRENWKKIQDRKNLIKKAQAWNVYLFSGLITCPSCGHTLKATYKSYPNDRSIKYNAYRCNHGRDNTGCTYRSSVSEKKTEKYLLEHIREMIEEYISETEVGASSKKKKRIIKFDVAKAKEQLRRLNVAYFAGNMPDDEYTAMAAKLKEDIAKALESEYEAEKAPDIGKLRAFLDTDFEAIYRTLEKDDQRRLWRSIIKEIRVEDNHVVGVTFNV

SEQ ID NO: 25996 - protein, 463 aa, synthetic construct
MSEKIKRCAIYIRVSTSEQMMHGKSLEAQREYLERYAKEHNMIVVGIYADEGKTARKELKKRKAIHALLEDVKAGKIDMILFWRLDRWFRNLSDFYKVQDILDEYDVHWLSASEPGINMETRDGRLQLNVVLSIGQNEVDTTSERIKFVNEASIRQGKLIFGEANMGFGYKSGIVDGVKRMIKDPETEEATEAFFKYLLSHQNKSETVRYMQKHYYPDFSYSMLRTMVSSEFYKGTYRGIPYCPAYITEQEWLQLQELSRKNIKQTPSGRIYLFSGLIRCPVCGQKLAGTGCSSIINRKTKEKRTYCYYRCNRAILDRLCTSRHRVSQNLIEKYLLENLSEEYKKYQIRYTKICEQKKKIKDTRTPEKLNKELDRLNLLFQKDRITWEYYSTEYDRIEKELKELSAIQPEAEKDFTYLEELLRSDFKKIYEQLTPENRRTFWRSTIGEIHLNEDYTVESVDFL

SEQ ID NO: 25997 - protein, 521 aa, synthetic construct
MKKVTKIEGVQNNSTQKKKLRVAAYCRVSTGSDAQLESLEAQKTHYERYINSREDWQFAGLYFDEGITGTKAEKRPELLRLISDCESKKIDFVITKSISRFSRNTTDCLALVRKLQSLDIPLFFEKENINTGSMESELFLAILSSMAEGESTSISENAKWSIKRRFQNGTFKLSYTPYGYDWNGENIVVNPEQAEIVKKIFADVLSGKGTQAIADELNADGIASKKNSKWTATTIRAILANEKYTGDVIFQKTYTDENFNRHINYGEVDQYMAPDHHEAIISHADFDTANALVSQRALEKGVKKGSDKYQKRYAFSGKIICGECGDTFKRRIHTCTTYKYVAWACNTHLKDKSTCHMKYIRDDDIKATFVTMLNKLIYGHRLILVPYLKALENSSGDEAVQRIQHLERLLEQNSEQRETLTKLMAQGYIDQILYNQETNALLLQAETYRSDIEAITICMTGDTAKVTETNLLLHFVSHAEMLTAYSEELFESYADHIEITGRNEIKFVMKCGLTFTERIGD

SEQ ID NO: 25998 - protein, 668 aa, synthetic construct
MAYAKAKKHLKIWTKKKAALYVRVSTRYQVDKDSLPFQRKKLKEYCKFLGLEDHVIFEDDGYSAKNTERPHFQEMMSRVRSGEFSHLIVWKVDRVSRNLLDFAAMYQELKDHKVTFISMNEQFDTSTAIGEAMLKIILIFAELERNMTSERVTGIMLDRAEQGLWNGARMPVGYRWNDETKFPEPDPEEVKIVQLIFDKYEEWKSSIKIARYLNNNNFKSKRGGQWTSKLIHDIIRNPFYIGTYRYNLRESGRGPLKPESEWIVRENNHPAIIDKAQFDRCNKIMDQNGSSRDTSDLRARKYVHTFSGHLVCGKCGANMIASKDRARANGWRPSMYRCAQRSRMLDCGNSRTINESYIGPFIFNYIANLARVQKNFKNIATPEKLERELLKGETFDGVAGILPEGLNLTFQALSFRQVGNGTYIPDIDFLGDSDGASDRDQIELLKSEIEKSKNAVTRLTDVYLFDPDSMTKEEFATKKKELAKKIEGMERQLVDLLDDSGNDDLADMSFIKKASAFLVAQRIVSKSFVDYVGMAQELDNEILKDFIDQIVDQIVVLDGRVQSITFINGLKHEFRYTAPAELPVCKKCGGRIGSTCGCRTRTFDFSGKRYQRIKVGDPRDMLRGKKNPVCPECFAQEGRWHHWNCKIETCPICGGRLAECEHGPNNKN

SEQ ID NO: 25999 - protein, 463 aa, synthetic construct
MRRKTTAPVEKILLRVAIYIRVSTDKQVKDGDSMRDQLATGQKYIDSHENMILVDTYIDDGISGQKLKRDDFQRLIDDVRAGRIDLIIFTRLDRWFRNLRHYLNTQDILDKHGVSWTAIEQPYFDTSTPHGRAFVNNSMIWAELEAQNDSDRILGVFDDKVDNGEVLSGSTPLGYTIVNKHLVSDDDAPTAVAIFQYYRKTGNLSMTLRYMESEFGLVRSAASLKNMLTNTKYIGEFRDNKEYCPAIIDRDLFYDVQRLLKINIKSGKKHDYIFSGLVVCDDCDHIMSGCQQRAKGRVRADGTRIVYKYSVYRCRQGVNLHRCPNRKLVFETTLEKMLLERIRPELENYIAEYEVANLPALRTDAKRRSVEGKMQKLKDLYLNDLITMDEFKLDREKLLVQLEKINAEDSRPVKDLSYLKNFLKMDFESVYDSLSIPERRELWRSIVKEIRVDHDKNIHIIFL

SEQ ID NO: 26000 - protein, 464 aa, synthetic construct
MARSVTVIPARNRQRETGRRAVQEKKIRVAAYCRVSTDQEDQLHSFEAQVDYYTKYINDHENYEMAGIYADEGISGTNIKKREQFKRMIADCEGGKIDLVITKSISRFARNTQDCLAYSRKLKNLGIGIIFEKENINTLDSTGELLFTILSSLAQDESRNISENCKWGIRTKFKNGEMHLNTFKFLGYDKDENGKLVINKEQAKTVRRIYRDFLIGINPAQIAKELTEERVPGCNGQTKWYPSTIVGILKQEKHMGDALLQKTYTADFLTKRQVKNNGEIAQVYVKDSHKGIIDKQTWNAVQEEFERRERFMEAHGTDRYSYGADCMPFCEKVFCGECGSLFTRHSWRSRGIVQWQCKNHRKDGKVACTNAYVDNADLEKGFVKAFNRLVTDRDKHMERWDQMKTDGSPLEKIRAEQMMEATENEPLGRFVPEIAQLVLAEVTVLGAKKYEFFFQEGSRVKVSV

SEQ ID NO: 26001 - protein, 498 aa, synthetic construct
MEIQIREGNREQKRKLRVCAYCRVSTDADEQENSLENQIRHYETVIKANPSYEYAGVYSDFAISGFKEKRPGLQKMLADAQKGKIDLILTKSVSRFARNTSIVLEATRKLKELNVGVFFELQNINTLSGEGELMLTILAAFAQAESESGSAGAKMVYQRKYEAGIPVQYLERSFGYTKDERGVYIADESEAVWVRKIYEMAADGYTPAAIKRYLNENGVKTVGGTKWSDSTVFRLIENEIYKGDYIMHKHFVNEERKLVRNRGEVDAWYIEDDHEAIVSPELWQKAQDAIEAKRDYLAEGSVIEDFTEENYPYMNRIFCAKCGHPLYRRIYSNGNRLNWGCSGTKRHGKSFCEGINIPDGVLRKAWHFDGNMYIDEKPSVKGTKEFTYLKESSWKRRHKKKVPEAIPENTEEAYPYRKKIFCGLCGSRLVRHVNPKSHKVIWICNGAKRKGVAFCRGTRIPDSVIRGWGEIKKDIYIQRKDDKNGKKRYSYTSKKPTA

SEQ ID NO: 26002 - protein, 582 aa, synthetic construct
MRVSVNLNAQKPDTTTNAVIYARYSSHGQTEQSIEGQLAKGHEYAAAQGYTVVHEYIDRAMTGRNDNREAFQKMLSDTGKHQFQVVIVWKVDRFGRNREEIAFNKHTCKKNGVRVEYVAESLPNSPEAVILESVLEGMAEYYSIQLSQNIRRGQLESAKKCQCVGGSVPLGYTLDSDKHFVIDPQTAPVVKKIFDLYAEGATISEITGQLNEQGIRTIRKQLFTKNSLTKLLKNEKYIGVYTYKDIVRVEGGVPAIVDKSTFDRVQELLKINRRAPSHTWTKVEYLLTDKLFCGHCGSPMVGESGFSHTGAKYSYYGCIKRRREKACDKKPVRQDWIEALVLDETVKLLHDDELMEYIIDRTWEYYQVTDKVQEEKAVLEAQLAEVDKAINNLVRAIEAGIFNAATKSRMDELDAQKAALTASLADLELTSGIRITRDHIEYFLLRLRDLDVKDRECQKRLVQTFVNAVFVYDDGRVKITYNYSGQSSTITLNQIASAEKGKGFVCCLPCSTFSPRFRVGNRGIFCFWGKQDANILPISAALCYNGSENGRGGRKNEKAACCVPDGARLLGLCGVRGRNAGR

SEQ ID NO: 26003 - protein, 515 aa, synthetic construct
MSYLIYLRKSRKDLENPFMTTEEILNRHECILLDLAKKMNLSIGDIYREIVSGDSISARPVMQKLLREVESGMWEGVLVVEVERLARGDTVDQGIVQRTFQYSETLIITPQKTYNPSSESDQTFFEFGLFMSRQEYKTIKRRLKSGVMSAVHEGKWPYNSAPYGYRRYKLANQKGWSLEFDDQERPIAELIYHLFCDEKRGLGYISDYLEARNIKSRTGGRFTESFLREFLRNPANDGKVFYGRRKVVTKIVNGSSVRTRPRADEYIEVTGLHDPLIPHDLFLKSQERFRVSAPRNPSSYAVKNPLSGILVCSECGHKLQRRPASTSKRGASYDVLMCKTRGCPTIGSAVEVVEREVLRALEDIVRGYEADVPSVPSLIPQKEELLHNAILHRADLNKQQERIYTLLEQGIYSTDVFLDRSKAMESQMQEAEHSIEIFKKELEEEKIKYDNWKSFVPTCKQLLKLYWTLTPDARNAALKEVIDRIEYKKLTRNPKGMYDVATFELTLYPKIPSKS

SEQ ID NO: 26004 - protein, 544 aa, synthetic construct
MAETAKKISMIPAKVQYDRNVKLSEKKMKVAAYCRVSTELEEQDSSYEAQVEYYTSKISENENWKNAGIYADDGKSGTNTKKRADFNAMIQDALAGKIDMILTKSVSRFARNTVDSLVTIRKLKEKNVAVVFEKEGINTLEGTGEILITILSSLAQEESRNISENIRWGVVRKFEKGKVIVNCTKFMGYTKNEDGDLVIVPEEAEIVKLIFRLYLEGYSTGKIAKHLEEQGIKTATGQDKWHSTVIDKMLRNEKYMGDALLQKTYTVDFMTKKKVKNTGIVPQYYVEDDHEAIIPKELFYRVQEEMMRRASLCKAAVTRKKNQRSRYSSTYALTGMLICGKCGQEYRRVTWARNGKKKVVWRCSNRLTNGVKKCGESETLEENALNRAVMEAIHRITSDDMEFMEHFRQNIIHVIGSYGTAKESGEYEEKIKEKQEEMVALIAENAKTGSYTPEFDERYRIIAEEINALKEAQKTARNEKRMAESYEQRIQDIDHYLSTSTCQIPEFDNDLVRRLISTIKVESSEKLLIQFQSGIVMEQEIRYE

SEQ ID NO: 26005 - protein, 538 aa, synthetic construct
MVKKVTVIKAAKAQKHTQEERRLKVCGYARVSTGSQAQATSYTAQVEYYTEKIESNPLWEFAGVYADEGISGTNVKHRDEFQMMISDCEDGNIDLILTKSITRFARNTVECIQTIRKLKEIGVGIYFEKENINTLSEKSELFITILASVAQGESENISSNNRWAIQKRFQDGTYIISTPAYGYGKDEDGNLVIIESEAETVRWIYESYLNGMGVYVIAKALNQKGIPTIRGAEKWQDGVIQDILKNPIYEGDMLQQRTYTETRFPFVRRVNNGQRNQYLIKDSHPPIVTHEEAEAVRNLMAYRVDVLHMNKSDYTKRYLFSGRIICGECGKTFRRQKIYIGKPYEKIIWTCSGHVEDKESCCMKAIREDVLHRDFTDMWNKLYTNQGTILEPLLKGLTELVAARQDSEEIRQLDKEIKDISGQRQILNQVMRKGYMDSALFMESSSKLGWQLTECRRKKTLLTRKLRRTKEIVRTEQLIQLIAEQDGLREEFDEQLFKMTAEKIVVSKEHDITFCLYNGLKLTERGGGQDAVAHANRL

SEQ ID NO: 26006 - protein, 612 aa, synthetic construct
MRAAFLIRCSTKKQDYERQVNDLTRLAKKFGYTSSDNMIFGEHITGKDDASKRDRQSIQRLKDAAINKEFDVVLVSEVSRMSRDPMSGRLYVRQLINMDIPVYFRDIDTWTIDPVTGKKVRDAETIIGAAFDAAWKYIKSMKTQIASGRRDELDNNQMSIGQPFFGYKRYGGRDKGKKNSWVINDDAAKVVVDVFEEYVKDGATLKSTALAITAKYGEQFNKKFSIGTIEHILTFEPYCTGIKVVSLTDPDTEDVDEFEVEIPTIITRAMFDKATTKRATNRTARTPYPKQATYILSKLLKCPICEHSLTPQKRGGDKGDKYRLMNGKVAIRWSCMSGINNATDCSSRITISNEKLEAIIWGLIKQELIGFANLNDEDRVAKVEELTDKITNLEMNIANFTSHISNMDRLIERAYSAYMDAPDSVMDIAKDKYYKTLTKCENERAECKGKIEALSAEKLRLENMRTFFNQPTLPKDAIEKAESDPIKMRNLVMELIDKIYPYRITTYVSPATNRIMRNGIVLLEVYTINGIYNVLYDGNQRNNKVAYYISGVYATFQNGRNKFDAYDTGEYFVISNATLVTNTEDVDLLVTFNELIKICMQNGWEIDYTYKM

SEQ ID NO: 26007 - protein, 541 aa, synthetic construct
MRIAIYSRKSKFTGKGESIGNQIEMCRDYIATNYNGEEHFIQVFEDEGFSGKNLDRPQFKKMMEIENVIPFDLIVVYRLDRISRNVGDFASLIEKLNKKNTSFVCVKEHFDTGNSMGRAMMNIAAVFAQLERETIAERIKDNMYLLAKEGHWLGGTTPLGYKSIEVTNGKRTHFELIIDESQIDLVNIIFSKYKQLGSINGIETYLFVNGYKTQKNNYWHKSNVKRILTNPIYCIADIDSLNYFTELGCNVCFTLDDCNGKKGIYPYNRFSGQKREMQSYDRWIITISEHQGILTGKEWVAIQQQLKANSKDGFGGKANERRSTSNTSLLSGILFCSCGAYMRPKKYPSGNTFYICENKMDKKITECNNSNINADELDKIVLNELFSFDIKDGVVDSQIQNLKEQITNIDNDLQKQIGRLKKQIETNKNTVNKFMNIVALSIENNTPEQVVEVYNQKINELLNQNKITQKRIDELQDTNIIQAKMNDRLNSLTDAMAYLKENFDKLTIVEKRGFVKEIVDRIVWDGNNINIFIKGISELSE

SEQ ID NO: 26008 - protein, 573 aa, synthetic construct
MAKVKLPDKPRVAIYTRVSTMHQIDKDSLPMQRQDLINYARLILNTEDYVVYEDAGYSGKNTDRPKFQEMMQQVRLGMFTHILVWKIDRISRNLLDFATMYSELKQLGVVFVSKNEQFDTSSAMGEAMLKIILIFAELERNMTSERVTAAMLSRAANGQWNGGRVPLGYDYDPETKTFTINESEAAVVKIIHDKYEQERSLVSLARYLNGHGYRTRTGCTYSPSTLLIILRNIFYCGDYRYNVLKDGDRQKRKKESEWITVKDHHPAIISREQKEEIARILKENRRLECERRGIYSKKKNVHVFGGLVICGNCGHAMTSTIRPADQDGVRWSVYVCPTKRRSEYLCKGRATSEVVLGEFVFNYILNMLNVQKNFDSINSVEDMEKMLLSGSTFRDVDGIERAGLDDLYNMLASGLTEKAPFDSSVEVRKKPVVSDIELENLNTEKTRIERAAERLQNLYLYSDDSISQKDYIIQREKLMSQLAEVNEQIGMVMSNADEKDVSDEEFVHAASKFILTQKLEGRTYIYYKRLATTVSREVLRSFVMSIIENITIYDGRVQTIVFKNGLSHTFILK

SEQ ID NO: 26009 - protein, 525 aa, synthetic construct
MKLDSIGNYCMYLRKSRKDIEAEKHGEGETLKRHFDTLMSLANRLKIIIREDAIYKEIVSGDTIASRPVMQQLLADIETGKWDGVLVVEVERLARGDTIDQGIVAQTFKYSNTKIITPMKIYNPNDEGDEEYFEFGLFMARREYKKIRQRMQNGRVASVQEGKFVGNVAPYGFSRKKIKGDKGFILVENPEEADTLKLIFELYANLNYSYNRIADHLNSLGIKPRHAKNWTVATIRDILHNETYRGILHWGARKNVKVIKKGIVTMTRPRNKGDYTVSQGLHTPLISQELWEKVLERHRVTAPKCPHKTALQNPLAGIVICGKCGEKMQRRPYKDRQPSLICTNRKCDNISSDLEIIERKIIEALKEWLGDVAINFEKVEEENALQVKALERALTKTKLELEKAELKLKRVCECFEEKTYTREVYLQRSQTVSEEIRKLREDVVNQEKELEETRVKYKSEEDFVPQAQYVLDTYYMTNDPEERNIMLKNILEKVVYTKTERAIRKDSDPTNFIIELYPKISKINS

SEQ ID NO: 26010 - protein, 514 aa, synthetic construct
MQMEYAMYLRKSRADLEAEAHGEGDTLARHEHILMELAKSRALPIGAIYREIVSGERIANRPVMQQLLAEVEDGRWKGVLVTETSRLARGDTIDQGIVAQAFKFSGTLIVTPAKTYDPTQEADEEWMEFGLFMSRQEYRMIRRRQLAGTRASKKEGHYVPGRPPYGYERYKLDGRGWSLRPVEPQASVIRTIYDMYLSGKGFSEIANELNAMKIRTPLDKKWVPATTRAILQNPHYAGFIPSAMKVNTKIVQKGKLITKRPVNKNCELYEGIHEAIIPRDVWYSVQQRMKDTVTPRVPRKYQQMNPLAGLVYCDQCGKLMSRHPYRREDKVRFGCENPSCSTVSSLFEDVESLVLQSLREFLHEIELSSPTLLDTKSEEIALQNIEKQLTDINHRLQRTYELLEDGVYSKETFLQRQSAISQDQTALLNTKHEIERKLHNKQTDIEAQKNSAPLIRHVLDVYPTLEDPKEQNLLLKQVIRRIDYHKTVRVYGKAKSDLHLTIHPKIAIPQTSNI

SEQ ID NO: 26011 - protein, 421 aa, synthetic construct
MKLRKIEPLKPKQKKLRVCAYARVSTDSLKQGESFENQVSTYERVIKSNPEYEFVSVYADQGMTGRSENRPEFQRMIADCKAGKIDLIITKSISRFARNTTTVLKYTRELKEIGVGVLFEENNINTLSSEGELMMTVLASFAQEESRSISENNKWTLKKKFERGEGMVNTARFMGYDKDETGDLVINKEEAKVVRLIFKMYLLGIGCHRIAKALNEEGVPTIAESSWHASTIKGMLTNEKYKGDFHIQKTYIPEGTHQSVKNNGQVQSYYVTEDHPAIISAEEWQQVQELMEYHRKQRNIGKGEKYQKRYPMSGMLVCPYCGKSLRRRYVYNRKVEWLCATYIHKGKEACKGIRIRDTELTGLSFSEPMVVEEVMINGEKHYGYTSKRAYDAGERAADRIEKESSSVLPRVNGPRRTVIKL

SEQ ID NO: 26012 - protein, 524 aa, synthetic construct
MKRVLCLYRVSTIGQVDHDDIPMQRIACREFIDQHPDWILVEEISEKGVSGYKTKTEDRDALARIKEKALAKKFDILLVFMFDRIGRRDNETPFVVQWFVENGIEVWSTKEGEQRFDNHVDKLLNYIRFWQASGESEKTSIRIRTKHLQMIQEGLYRGGLIPFGYRLEFMGRTNKKGQPVRDLVIDEAESKIVKEIYHKSVSDGWGANRIANWLNERGIPTKRQKTFWRATSIRALVRNPIYTGRIRFGGDLSESFDHLRIIDDDLFGLCDQTIEGRCPRHPDKRVGHLRSTSNGLLTGILYCGSCGERMCFNHNTTVRILADGTKRSYERDVYRCYRKIHSRRTCQGRSTYSAERIEKDILAVVHTYFENIRSKPTLQMLAAAGNRKRNIQQDAITQAEAALKKAQIELAALEDAAVKAITGETNMDLELINSLFPKRRMNLDKAMQEVERLRAELADSEKLESAANHELNMILSWADTFDAASRETQRSIIAMLIDKVVVNTNYHLDIHFRITAQQYLGKAS

SEQ ID NO: 26013 - protein, 522 aa, synthetic construct
MAKTVRAIPATISRYTAAPINSRKKRRVAGYARVSTDHDDQVTSYAAQVDYYTNYIKGRDDWEFVGIYTDEGISATNTRHRDGFKRMIRDAMDGKIDLIVTKSVSRFARNTVDSLTTVRKLKDKGIEIYFEKENIWTLDAKGELLITIMSSLAQEESRSISENVTWGHRKRFADGKVCVPFGHFLGYDRGPDGNLVINREQAKTVKLIYRLFLDGYTFHSIAKELTARELETPAKKKRWYPGTVESILTNEKYKGDALLQKRFTVNFLTKETKANEGEVPQYYVENNHEAIISPQVFDWVQEEIKRRREGRSRYSGVSIFSSKIKCGQCGGWYGAKVWHSTDKYRRTIYRCNDKFKSHCKTPHLTEDDIKEAFIRAANQLIENKAEILNSITLLKERLTDTEALEEDRDKLSTDLNLLADRVQQLIAENARVAQNQDDYDQKYSELVSRYEAAKKQYDKTCDAIQYRKARSRQMDSFIKELQEQELIKEFDARLWGSLVDFITVYSKDDIRVTFKDGTEIRA

SEQ ID NO: 26014 - protein, 557 aa, synthetic construct
MRTIRKIERSILNLKQRKKAAAYARVSMESERMHHSLSAQVSYYSSLIQKNPDWEYAGVYADYGISGTGMKKRQEFRRMLEDAEAGKIDIILTKSIQRFARNTVDLLRTVRHLKELGIEVWFEKENIHTMSGDGELMMTILASFAQEESRSISENIRWRIKKQFEQGNPNGRFRVYGYRWEGDNLVVVPEEAAVVRRIFQNFLDGKSRLETEREFAAEGIKTRSGCRWMDSNIKGVLTNITYTGNMLFQKEYVTDPILKKRKKNRGELPKYYVENTHEPIIDKETFDYVQQEMARRKELGALANKSLNTTCFTGKIKCGICGRSYMHNLRTDRGFEEFWDCGSHKLKGRNCGAKGSIPQAVLVKECTEVLGMDDFDEQAFLDQVEKIVVPEYHVMVFCMKNGRKIIRHWVSTAKKDCWTEEYKNRQRAWMKNYMANGKGTRFSAFTTRIRCALCGSSFRRCKVKNDRPVYWRCSKGGQCESVSIQEDDLKRVAAEVMGLKSFDGDVFREKVEYIEAGKQNCLIVHFKDGRIEETSYTPSGRRSKARGKESREKWQRQ

SEQ ID NO: 26015 - protein, 588 aa, synthetic construct
MAKKKKPAGGNAIIYARYSSHNQRDVSIEQQIEACRKHAAELGLTITDTYEDRAISGRTDNRPAFQRMMHDAENGKFSYVLAWKSNRMGRNMMQAMVNESRLMDCGIKVYYAEEDFDDSAAGRFALRSMMNVNQFYSDNLAEDVRRGLMDNASKCMANGKQPLGYKRGEDGKVVVDEPAAAIVREVYTRVASGELFTDIARDLNRRGIKTADKGEWNKNSFHRLCSNEKYRGIYIYGDVRIEGGIPTIIDDTLWYKVQEALRVKKLKRNGRHRPGDEDYLLTGKLRCGKCGGYMIGMSGRSKTGEIHYYYTCQNRRVGRTCDKKNIRRDVIEPAVTQAIKDYCLTDDAIEWIADKTVEYWEKADRNLQLDSIEGDLAAVQSSISNVMKAIEMGVVTETTRDRLIELEKQRTDLKSKLALAKEEVVHVDRKKLISSLLLFRNGNIHDRQYQEDLFKTFLISVYVYDDDDNGHLKIVFNAFGDNNTVDLPIDFGETDNQSGFSDGAEKFDYALHRSTKKNQLNMFGWFFSLFPPMNRNAPLSRFTASVQKPQIETAEHFILWFCETLFEQQNQDRPANASPFGRGGIAKQ

SEQ ID NO: 26016 - protein, 404 aa, synthetic construct
MIIKKVMPKIPVAKKRVAAYCRVSTFRNEQDESFETQQKYYEELIQSHPDWELVKVYADRHSATRVKNRPGFQEMAAAAEAKKLDIIICKSISRFSRNMVDCQQYAKWFRTLGVTIIFEEQNIRTDDPTCDFVLSILAAVAQDESHSISENEKAAYASRFARGEYNLGNNRILGYDCVDGELVPNKDAWIVKEVFRRFIEGESYRQIAKGLEELGAQSLHSKKGFGVETLRYMVSNETYVGDKRLQKKAPLDYLTKKPNPNQKMESNYLWDDHEAIIDRETWDRAQEILEKRKELAKVGIHKTNREHHFLYGKVFCGECGAPFLRRTLKAAGGFKTQSTYKAWNCRNRQKGKGNERCGNRFIKEEELIDAILRELEWLNMDQERFEKEVSKVLVYPDHIEVEKN

SEQ ID NO: 26017 - protein, 514 aa, synthetic construct
MSTEYAIYLRKSRADLEAEAHGEGDTLARHEHILMELAKSRALPIGAIYREIVSGERIANRPVMQQLLSEVEDGRWKGVLVTETSRLARGDTIDQGIVAQAFKFSGTLIVTPSKTYDPTQEADEEWMEFGLFMSRQEYRMIRRRQLAGTRASKKEGHYVPGRPPYGYERYKLDGRGWSLRPVEPQAGVIRTIYDMYLSGKGFSEIANELNAMKIRTPLDKKWVPATTRAILQNPHYAGFIPSAMKVNTKIVQKGKLITKRPVNKNCELYEGIHEAIIPRDVWYSVQQRMKDTVTPRVPRKYQQMNPLAGLVYCDQCGKLMSRHPYRREDKVRFGCENPSCSTVSSLFEDVESLVLQSLREFLHEIELSSPALLDTKSEEIALQNIEKQLTDINRRLQRTYELLEDGVYSKETFLQRQSAISQDQTALLNTKHEIERKLHNKQTDIEAQKNSAPLIRHVLDVYPTLEDPKEQNLLLKQVIRRIDYHKTVRVYGKAKSDLHLTIHPKIAIPQTSNI

SEQ ID NO: 26018 - protein, 548 aa, synthetic construct
MANKTVKKIEATKPTLSAQYSTFTRKRKVAAYARVSTAKEEQENSFEAQVSYYTQKIQANPEWVFVEVYSDEGITGTNTKKRDGFNRMIEDALAGKIDLILTKSVSRFARNTVDSLVTIRQLKEKGVEVFFEKENIYTLDAKGELLLTIMSSLAQEEARSISENTSWGRRKSFADGKVSLGYSNFLGYDKGPDGELVINEEQAKIVRRIYSEFLAGKTPGGIAKGLTADGIETPGHKKVWQASTVLNILKNEKYYGAAILQKEITVSYLTKEKRPNTGELPMYYIEKDHEPIVSPETFQMVQEEMRRRREAGSNMQCVSIFSSRIICGDCGGYYGRKIWHSSTKYTAWHWHCNAKFQKRKYCETPTLKEESLEETFVEVFNSLIADKDEIVENYRLCIDAVTDDSEYCRQLGDLNNGCGEVQTLIRSLLMTYSRQDTADDIHEKLKEYEERLDTMARLKQELDLKIAACAAKRVQITGFLNELVKHDAPLAKFDPLVWQAVINYATVNRDCTITFTFRDGTEKTVPIKNGVRPYTKRNKPQEVDGNDG

SEQ ID NO: 26019 - protein, 498 aa, synthetic construct
MEIQIREGNREQKRKLRVCAYCRVSTDADEQENSLKNQIRHYETVIKANPAYEYAGVYSDFAISGFKEKRPGLQKMLADAQKGKIDLILTKSVSRFARNTSIVLEATRKLKELNVGVFFELQNINTLSGEGELMLTILAAFAQAESESGSVGAKMVYQRKYEAGIPVQYLERSFGYTKDERGVYIADEEEAAWVRKIYEMAADGYTPASIKRYLNENKVKTVGGAEWIDSTVFRLIENEIYKGDYIMHKHFVNEERKLVRNRGEVDAWYIEDDHEAIVSPELWQKAQDAIEAKRDYLAEGSVIEDFTEENYPYMNRIFCAKCGHPLYRRIYSNGNRLNWGCSGTKRHGKSFCEGINIPDGVLRKAWHFDGNMYIDEKPSVKGTKEFTYLKESSWKRRHKKKVPEAIPENTEEAYPYRKKIFCGLCGSRLVRHVNPKSHKVIWICNGAKRKGVAFCRGTRIPDSVIRGWGEIKKDIYIQRKDDKNGKKRYSYTSKKPTA

SEQ ID NO: 26020 - protein, 464 aa, synthetic construct
MARSVTVIPARNRQRETGRRAVQEKKIRVAAYCRVSTDQEDQLHSFEAQVDYYTKYINDHENYEMAGIYADEGISGTNTKKREQFKRMIADCESSKIDLVITKSVSRFARNTQDCLAYSRKLKNLGIGIIFEKENINTLDSTGELLFTILSSLAQDESRNISENCKWGIRTKFKNGEMHLNTFKFLGYDKDENGKLVINKEQAKTVRRIYRDFLIGINPAQIAKELTEEKVPGCNGQTKWYPSTIVGILKQEKHMGDALLQKTYTADFLTKRQVKNNGEIAQVYVKDSHKGIIDKQTWNAVQEEFERRERFMEAHGTDRYSYGADCMPFCEKVFCGECGSLFTRHSWRSRGIVQWQCKNHRKDGKVACTNAYVDNADLEKGFVKAFNRLVADRDKHMERWQQMKSDGTPLEKIRAGQMMEAVGNEPLTRFVPEIAQLVLAEVTVLGAKKYEFFFQEGSKVKVSV

SEQ ID NO: 26021 - protein, 523 aa, synthetic construct
MRFFSYGRKSVFSDKSDSIDNQFRMNREYCESKFSGQVDSWQQFSDEDFTGANTSRPDLQRMLSFIKGGFCDVLVVYQLDRLSRDVRDFANIYALLEEHGVMFISIKENIDTTTPIGRAMMYVTVVFAQMERETIAARVTDNMLGLAKKGYWTGGNPPVGYVRKHIVVNGKKHCSIEVDPDGARYVTQIFDTFLAYNCSLQGMETRFKNQGIRTQSGKFFSTTQLHKMLTMPYCVEATPEVYDFYAAKGCIMDPGSPREMWDGSVGVIIYGRSTEKNKKHQAQPPEKWTVCLGKHKPFMPAEKWLAVQSRFTQNKCIKEAKWPVPLLKGVLRCKCGNLMQVSRKKKVDGTCSSWYYCRKRMRQGVNACDMGQIKCDLLDEEVLELFRGITADPAMIQKFVKAEAPDEVPDLKAAQARVSACERKIGRLAASLALAEDSVASKYIIAEMERLDVELGALKREASLAEMESHRAAASAKDAKATAVEIAKLIHGLEGFDDKEKNAIARAVIQECTWDGERLFITL

SEQ ID NO: 26022 - protein, 584 aa, synthetic construct
MAYRKITDIRDTIGMRAVFYARVSTAEEEQLNAIELQIEENRGCIKDHGWKLVGEYIDRSKSGTMVKGRDDYQRLYEDLYEDLFDIVVIKDQERLQRNTLDWYLFINRVVQTGKLLFMYMDGKFYSPDDALITGVRAIIAEEFSRNLSKKLHNYHDHRIEKARQGQEIALQGSGNVYGWDKKDGKYYINPEQARVRRLMCEGIMARKGSTLIAKELNDAGYRNTVGKPWKPMDIPKFVYDCKNVGTMIINKERHDFESKQTIKLPKEEWVYVENALPPIVTQEEWDLICKIHEERVIATGSDRRGKKTSGYSFSGKLVCGICGAPYWRKQRVSKDEYWVCSTKQTKGRRTRKRDSTMGKAGEINPLGCDNENISYNSLMEIMGVVSERLQANTDTIKQDMINWLTKLRKQLLEANGGHTEADLQRELSRKSKLLDAYLDGILNKQEYQKKAEELDERIIQLKTETEKNKANSGDIAEIDKVLANIDEEVARYVDGNEKLKVEYLLEHLEQVQIFPDKVIVIVPILSEGIVVEKTQYVSREKRCRQDYLYENDRWSGKADKRRDIHVWIRWKGFVKGTLKSGLPD

SEQ ID NO: 26023 - protein, 526 aa, synthetic construct
MGKKQKTNGGDAVIYARYSSHNQRDVSIEQQVEACRKHAAELGLTVTATYEDRAISGKTDKRPSFQRMMRDAEQHKFAYVLAWKSNRIGRNMMQALVNESRLVDCGVKVFYAEEDFDDNAAGRFALRSMMNVNQFYIENMAEDVKRGLYDNAKKGLVNGSLPLGYKRGADGKPEIDEPKAAIVREIYTRVAAGELFASIAADLNARGIRTARGREWNKGSFHVLCHNDRYRGIYMYGDIRIPGGMPRIISDELFYDAQEAYGMKKDNRYGRARHGAENYLLTGKLYCGHCGSYMVGISGTSKTGEMHYYYACQKHRLEHTCEKKAIRRDVIENAVARVIMMYCLDDETIDFIVDSTIAYFKQKDHELHIEAMENELAAVQQAISNLMKAIEAGIITPTTRTRLLDLEEQQAKLSAKINTAKAERVEIDRDDLIAGLQLFRTGDIKNKKFLAKLFNTFLLAVYLYDDNRLKIVFSFTGNHNNIEIPLELDNDCPDSESGPYETEVRMSHLECRRRGSNPYSVSRKGF

SEQ ID NO: 26024 - protein, 493 aa, synthetic construct
MVLLDTYCIYLRKSRADAEAEARGEGETLARHEHALLDLAKRGNLTISHIYREIVSGDSIAARPQMQQMIQDVTDKAYTGVLVMEIERLARGDTIDQGVVAQAFRESGTKIVTPLKTYDPNNEFDEEYFEFSLFMSRREYKTIKRRMQAGRIASIKEGNYLGTNPPYGYKKVQPEPKVKTLEIVPEEAEAVKIMFDMYLSGDGARAIAARLNQLQIPPRKASMWEPVSVRKILRNPVYAGKIEWHTKKDGTILSDGVHPAIISWEQFQQSLERRKRTAPQVPTGYTTQNYYHGLLFCCNCGHQMKRRPVPNGTPHMLCRRYECRGKVVSSTTEKIDEAVLEAIKYRISELTLFKDQSGEEKRAKEKQKEVQRDQLKKALEKLKSQKEKLHTLLETDVYTVDVFLERSKALEAKKEELEKALHSITDSLQEKEHLAPEQAVIWLRYVLDHFSSADACQKSKMLQRIIKRIEYKKTEKMCYRKQNSDMSLHIDFL

SEQ ID NO: 26025 - protein, 573 aa, synthetic construct
MQKNQTKKAALYIRVSTHYQIDKDSLPFQRNELINYAKYALGIDDYAIFEDAGYSGKNTDRPAYQDMMRRIRAKEFSHLCVWKIDRISRNLLDFAAMYDELKKFNCTFVSKNEQFDTSSAIGEAMLRIILVFAELERKLTAERVTSIMYSRANKGLWNGAPIPLGYKWDAKGKYPVIDEDTAVVVRYIYDQYEKIHSTMKLSDKLNRENIKSARGGEWTGTTVKGILRNPFYKGTYRYNYKTQTGRIKPVEEQIIHEDNHPGIIDKEQWDRVNKILDENSTRSVAQLRSNVKYTHIFSKLLRCGQCGHTMGGGLDRARSDGYRPSRYYCTSHTRKAGCTNGVYSDVYLGPFVFNYIANLVRAQRALTDSQKPRDLERMLLRGKFFDNVAGIEQQGLLDTYNTILYGSGEDVMLQPSPEIAAQSASELELLDRDQKKYERALERIEQLYLYSEESMPEKDYVLKRNELKTMLDNIAERRAEVNSRLGLAPASSDFLEKATYFYLTNSLNQKRSLDFRKMVDTFEPKILQDFLCSVIDHIVVVDGHVASISFKNGLTNKFIYKAPKPPKNASTEP

SEQ ID NO: 26026 - protein, 527 aa, synthetic construct
MAYCLYLRKSRADIEAEAHGEGETLARHEKLLLEVAKRGHYNITQIYREIVSGETIAARPVVQKLLQEVEDGKWEGVLVVEVERLARGDTIDQGVMAQAFKYSGTKIITPLKVYDPSNEFDEEYFEFGLFMSRREYKTIKRRLVRGRNASAKEGKWVSGLAPYGYERVRIKGDKGWTLRPVEEQADIVRFIFKLYTSGEEGDNGEVRRLGTYTISKRLDSLGVAPPSSAQYWNDRTVQCILQNPAYIGKVRWGVNKSKKRIVNNSIEVERYKAPADEVIYVDGLHSAIVDEAIFQKAQDLLKRSGPPPVPKRNSVVNPLAGILACGKCGRSIVLRRGRIDILICHNRICDNVGSKYEYVEERLLQALSSWLDGYRLEWSDKLPADEQAILDLKQKALRKTVAELETLHKQLDRTHDLLEQGVYDTDTFLVRSRSLTERIAAAEEDISTLTAEVQADKERAASRLNVIPKVEKLLEVYPVLPSAQAKNEMLKEVLEKVEYTKNERSGRNGPFDNFELVLYPKLPPKIE

SEQ ID NO: 26027 - protein, 441 aa, synthetic construct
MKRAAIYVRVSTKEQKEKGLSVDSQLLALREYCSNNGYVIAGEYNDAGISARKKYINRPALLQLINDCKEGKIDIILFTKLDRWFRSVADYYQVQTLLDSYKVPWRAIWEDYETETSTGLFKVNIMLSVSQNEADKTSERTKEAVKYRRLRGDFVGGKCPRGYRRENKKLVFDEKTYDAINAMFRTYLSCFSIAKATEAVAEYGLHIATSQICRMLKSPAYAGNASGSECPAYITWDEHLLILTNSTKRNRTPKRSDRVYLFSGLCRCGYCGGRMVARVNRWVKNGQQLYYPFYSCAAHNDKRNLDCPGVNLAETKIEAYLMEHLEAELKMCQSEFELEQENKATYENKIKALEQKLKRIGVRYEDGDIPFEEYKDKRFAIKKEIAGYKDKIDNARSVPSLPDNWKDLYNSLTPDNKRGFWLNILKEIDITKEAINIVFPV

SEQ ID NO: 26028 - protein, 588 aa, synthetic construct
MRIVNKIEAKTPQMPRRKRVAAYARVSMESERLQHSLSAQVSFYSSLIQSNPVWEYVGVYADNGITGTKAKAREEFNRMIADCEAGKIDVILTKSISRFARNTVDLLNTVRRLKELGVSVQFEKERIDSLTEDGELMLTLLASFAQEEVRSLSDNVKWGTRKRFEKGIPNGRFQIYGYRWEGDHLVVHEEEAKIVRLIYDNYMNGLSAETTEKQLAEMGVKSYKGQHFGNTSIRQILGNITYTGNLLFQKEYVMDPISKKSKINRGELPQYFVENTHEAIIPMEVYQAVQTEKARRRELGALANWSINTSCFTSKIKCGRCGKSYQRSNRKGRKDPNANYTIWICGTRRKTGNTHCQNKDIPEQMLKEACAAVLGLDTFDEIIFSEQIDRIEIPAPNEMIFYFKDGHIVPHRWESTMRKNCWTDERRAAKGRYVQEHQLGPNSSCFTSRIRCDSCGENYRRQRSRHKDGSFDSVWRCASGGKCNSPSIKEEVLKNLCADAMGLESFDETAFREQIACIHIVAPFQLSIRFFDGHTFEAAWENKRKMPKHTEQRKQHMREVMIQKWREKRGESNDDTGDDQPVHGNADQ

SEQ ID NO: 26029 - protein, 523 aa, synthetic construct
MAKVTTIPATISRFTATPINEKKKRRTAAYARVSTDSEEQLTSYSAQVDYYTNYIKSRDDWEFVSVYTDEGITGTNTKHREGFKRMVADALAGKIDLIVTKSVSRFARNTVDSLTTVRQLKEKGVEIYFEKENIWTLDSKGELLITIMSSLAQEESRSISENCTWGQRKRFADGKVTVPFKRFLGYDRGPDGNLVLNKDEAVIIHRIYSMFLQGMTPHGIAARLTADGIKSPGGKDKWNAGAVRSILTNEKYKGDALLQKSYTVDFLTKKKKVNEGEIPQYYVEGNHEAIIQPEVFELVQQELKRRKQGRGPHSGVHLFSGKIRCGQCGEWYGSKVWHSNSKYRRVIWQCNHKYDGEEKCSTPHLTEDEIKTMFISAANKLIGKKAAINSPLRASLDIAFDTSALEAETEKLQEELMVASDLIQKCIYENAHVALDQTEYQKRYDSLTARFDTAKARLEENEATIADKKSRRAAIEAFLDTLTQADLMEKFDPALWCGLVDHVTVYARDDVRFTFKDGQEIRA

SEQ ID NO: 26030 - protein, 498 aa, synthetic construct
MENKRAVIYARYSSDRQREESIEGQIRECTAFAKRSNLDVINIYTDRALSARTDNRPSFQKLIRDSNKRIFDYVIVYTLDRFSRSRYDSAVYKNKLKKNGVKVLSAKEHIEDTPSGIILESVLEGYAEYYSAELAQKVKRGLTDNVLEHKWTGTCIPFGYKKDDANHLVPDAVTSPLIPRIYEAALGGKSRVEIARWLNEKGYITTYGRRFRPEQVTKILKNRIYTGTFTWDGKQYPAFTTPLITEELFDKVQKTFRKNTRKNPDDYVLTGKIYCGRCVSTMTGMSGTSKSRKTYYYYRCSSMNHSARQAKEPCGAKNVSRDMIEKLIYDKTLQILNTPEWRKEIAHQAMLAQSDDSEELKIKAMEQELSDAKRKITNIITAISNGISSEELAKTLHDLEARKKELESQISHEQLVKKDLTLTEDAIEFYFVQLARKSAGGSDLNVFWDFINHIVVYDDYIEVFYNYVANKKIANPVIIQCSPRNVLVDHQGFEPRTP

SEQ ID NO: 26031 - protein, 462 aa, synthetic construct
MIRMARSVTVIPARNRQRETGRRAVQEKKIRVAAYCRVSTDQEDQLHSFEAQVDYYTKYINDHENYEMAGIYADEGISGTNTKKREQFKRMIADCEGGKIDLVITKSISRFARNTQDCLAYSRKLKNLGIGIIFEKENINTLDSTGELLFTILSSLAQDESRNISENCKWGIRTKFKNGEMHLNTFKFLGYDKDENGKLVINKEQAKTVRRIYRDFLIGINPAQIAKELTEEKVPGCNGQTKWYPSTIVGILKQEKHMGDALLQKTYTADFLTKRQVKNNGEIAQVYVKDSHKGIIDKQTWNAVQEEFERREQFMKDHGTDRYSYGADCMPFCEKVFCGECGSLFTRHSWRSRGIVQWQCKNHRKDGKVACTNAYVDNADLEKGFVKAFNRLVTDRDKHMERWDQMKTDGSPIEKIRAEQMMEATENEPLTRFVPEIAQLVLCEVTVLGAKNMSSSFRKAAG

SEQ ID NO: 26032 - protein, 498 aa, synthetic construct
MEIQIREGNREQKRKLRVCAYCRVSTDADEQENSLENQIRHYETVIKANPSYEYAGVYSDFAISGFKEKRPGLQMMLADAQNGKIDLILTKSVSRFARNTSIVLEATRKLKELNVGVFFELQNINTLSGEGELMLTILAAFAQAESESGSVGAKMVYQRKYEAGIPVQYLERSFGFKKDERGVYIADEEEAVWVRKIYDMAAQGYTLAAIKRYLNENNVKTVSGAKWLDSMVLRILENEIYKGDYIMHKYFVNEERKLVRNRGEVDAWYIEDDHEAIVSPELWQKAQDALEAKRDYLAEGSVIEEFTEENYPYMNKIFCARCGHPLYKRIYSNGNRLNWGCSGTKRYGKSFCEGINIPDGVLRGAWHFDENMYIGEKQTDKGTKEFTYLKESSWKRRHKKKEPEAIPENTEEAYPYRKKIFCGLCGSRLVRHVNPKSHKVIWICNGAKRKGVAFCRGTRIPDSVIRGWGEIKKDIYIQRKDDKNGKKRYSYTSKKPTA

SEQ ID NO: 26033 - protein, 501 aa, synthetic construct
MEIQIREGSREQKRKLKVCAYCRVSTDADEQENSLENQVRHYEMVIKANPDYEYAGVYSDFAISGFKEKRPGLQKMLADAEKGKIDLILTKSVSRFARNTSIVLEATRKLKELNVGVFFELQNINTLSGEGELMLTILAAFAQAESESGSAGAKMVYQRKYEAGIPVQYLERSFGYTKDERGVFVADEAEAVWVRKIYKMAAEGYTPASIKRYLNENGIKTVGGVQWVDSTVFRLLENEIYKGDYIMHKHFVNEERKLVRNRGEVDAWYIEDDHEAIVSPELWQKAQDALEAKRDYLAEGSVIKEFTEENYPYMNKIYCAKCGYPLYKRIYSKGNRLNWGCSGMKRYGKSFCDGINIPDGVLRGAWHFEENTYIDEKASDKGVKEFSYLKERSWKRRHKKKQPPSFPENTEAEYPYRDKIFCALCGSRLVRYVETKNHKVTWICNGRKRKGKDFCDGTRIPDHILKGWGEIKKDIYIQRKDDKNGKKHYSYTSKKPSGIGA

SEQ ID NO: 26034 - protein, 463 aa, synthetic construct
MARSITVIPARNRQVSGHRAEPQKKIRVAAYCRVSTDQEDQLHSFEAQVDYYTKYINDHENYEMAGIYADEGISGTNTKKREQFKRMIADCGKGKIDLVITKSISRFARNTQDCLMYSRKLKNLGIGIIFEKENINTLDSTGELLFTILSSLAQDESRNISENCKWGIRTKFKNGEMHLNTFKFLGYDKDENGKLIINREQAKTVRRIYRDFLWGLNPAQIAKELEEEQVPGCLGQTKWYASTVIGILKQEKHMGDALLQKTYTADFLTKRQVKNNGEVAQVYVRDSHKGIVDKETWNAVQEEFERREKFMQKHGTDRYSYGSECYPFCEKIFCGECGSLFTRHSWKSRGIIQWQCKNHRKDGKVACTNAYVDNADLEKGFIKAFNRLVGEREKHIERWNSMKLDGTPLEKIRAGQMMEATESGQLQQYVPEAAQLVLEEITIFGAKKYEFAFLEGSRVKVSV

SEQ ID NO: 26035 - protein, 536 aa, synthetic construct
MNEMESVNKKKILRVGIYERLSDEDRDKQNKSDDSESIKNQRHLLLSEIERRPNFVLVDEYCDEDLSGAGTYRPEFERLIRDCENNKIDVVLCKSQSRFSRDMEIIEKYLHNKFIEWGVRFISLADNADTDNKGNKKSRQINGLVNEWYLEDVSNNIRTAFNVKMKQGEFISPFASYGYEISQEDNNKLVVDPVASETVKDIYNLYLTGLGFTGIAKYLNAKEIPCPSLYKYRKGIKLNVISNRPREDIKWTTNAIKTILMNELYIGNLVQGKRTTISYKNHKIRRKEKREWIRIENTHEAIIDKETFNKVQIAMKERTKPMKKNGIVHVFSGKVFCLECNHYMRKKNSSRHEYLVCSNNRDGYDDCINKTAIRYDQLEELVLKEINKKIKKYYDKEQLKKLDSNNKKNSYSNKLQSLEKQKKEIENEITKTRNYLKNLYEDKVNGIISTSQFKDLISDYNKNEDKFSNQIKKINNDINYYKMKEETSKNNNKIFNKYKRINKLNKIVIDEFIDKIYIGKMNNENNTRDIKIKWNF

SEQ ID NO: 26036 - protein, 568 aa, synthetic construct
MKQSSKKISTGTAALYCRLSRDDNMDSESNSIQNQKKILQKAAKDKGYTDTIFFVDDGITGTTMKRPGFQKMIAAIEAGYISAVFVKDLSRLGRNYIEVGKLTEEFFPLHDVRLVAVSDGVDSDEGEDDFTPFKNIMNEYYAKDISKKRRIVNKMKGNAGIPLSPPPYGYIKNPDDPRFWVIDPEAAEVVRCIYRLALEGNGPLQIATALGTMGALNPSAYRTSKGISKGGSKSTLEPTKWNHTTVKKILTLQEYCGDVINFKTYSKSYKMKRRIENPEENRAIFLNVHEPIIDRVTWERVQSLQTTRRRRPTVTKESSAFCGYLKCPECGGNLTFHFNQNNHDIKFFSCNNHNSGLRKCSSTHYIRLDFLEQVVLYEVHRLACFANEYENDFIKAMVGRSAKVAENDRVRKKRELDGLLARDRELDMLFERLYEDNVSGKIDDARFAKMSKRYEQEQGENAGRIKALRLELKKLEDKRMDVDTFLETVRRYTDATAITKRMVAELIQYIEVYPAVKEDGVTNQRVTIHYNCIGAFEVPDRRKIPERDILLETRKGVALSYAPTQIAI

SEQ ID NO: 26037 - protein, 565 aa, synthetic construct
MTCNPIRFDSTEPERLGKDEKIMKSNQQKITALYCRLSQEDELEGESNSIKNQKSMLEKYAADNGFGNCRFYIDDGYSGVSFERPDFKRMIADMEKGEIGTVITKDLSRLGRDYLKTGTYIEIIFPQNDVRYIAVNDGVDSEKGCNEFIGIRNYFNDFFAADTSKKIRAVQRAKAERGERIGSKLPYGYMKSEDNRLVPDPDTAPVVKRIFDMYVNGVGTRTIAMTLERDKIMSPSAYAYYKYGRKENGLKLNNPYLWSDVTLRGMLVNEVYIGTTANYKTTTKSNKLKKQIHNDRKDWLVFENTHEPIVDKSTFEMVQKWFAGRRKPNKSGKTDVFAGLVYCADCKSRMYLRRVLKYPKENNYLCKTYQRYGNNHCTAHRISEQDLHAVILQKLREVTAYVRENPEEFYEIASRNARAEAEREMKTYLREKEAAEQRIAELESIIRCLYEDRVLGRISVERYESLSAGYETEQLELKTKLNEMNAFLDENEKREQLIQDFIENAKKYIDIQELTPEILRAFISRIEVHEKAKWHSTECGNDIVIYFTVERKEQLNIQHKDIKTA

SEQ ID NO: 26038 - protein, 541 aa, synthetic construct
MRIYIYSRKSVYTGKGESVENQIEMCREYISAKIPESDKAEIVVYEDEGFSAKNTNRPQFQKMLRDIKLNKPEYVVCYRLDRISRNVSDFSSLIEDLNSYNISFVCIKEEFDTSKPMGKAMMYIASVFAQLERETIAERVRDNMLMLARTGRWLGGTTPTGFTSEKIQEIIIDGKIKTSCKLKDNPEELKTIDCILEKFLELRSISGVSKYLIKQGIKSRTGKIFSLLGIKEILQNPVYCIADEDAWEYFTEHHSDVCFEKTECSNKYGLLTYNKRDYRKKNAPRQGMDKWIVAIGKHKGRISGKKWVAIQNILKDNIPTGTKPAIMHNDYSLLSGLIFCDKCQSRMFAKQRSGKGGNRELYYYICNNKLRGGLKLCDCQNLNGQQADDIVCEYLMQYTDENSGIYKLLEKLKQDLQGQTQKSPLSVLDDKITKCNSEMDNLINTLSHGNLGTAFIERVNARIMELDKELSSMKEEKKRLQKDVSVITDREIQVDMLSTALSSFKDNFHTLTIEEKRTLIKLMVKKIVWDGKDLHIFIDGE

SEQ ID NO: 26039 - protein, 516 aa, synthetic construct
MAQGQKQVRIIEPLERFVNRINLVGCYARVSSDSEDQLNSYNNQVDFYESYVNSLENSKLVKIYTDEGITGTRMDKRDGFLQMIEDCRKGLINTIITKSISRFARNITETLSVVRELKSIGVSVYFMTEKIDTAKMGSEMMLAVYAACAEIESKAISNAQKWAFRTRAKEGRYNQPKLPYGYQRIDGEVKVIEDEAKIVEDIFNKYVNKDFSVTKLVDYLNKHYFKKKKWSQSTVSSMLKNERYCGDMLLQKKYSPDVFPYKLVTNKGELAQYYVYDVFPKIIDRELFEKANEKLVNNKLKFNKNQTDGNREYLLTSKIKCEHCGGTFKRRVLRNKEYWSCSNHVTSAKKCEVKMIETDEIEEAFLKIFYKLKENIHVLEAYKKHIVNFTTNDDDKCELDLVNRELKKVSSSINTLVRYYQKDLISLEDYKKKHNELLVDKSVFEMQKCKLNEKIYQRFEVIQTQIIIECLESVKEITALDEEIFNTLVDLIEVGTLDIQFTLKNDLKLKVERKQF

SEQ ID NO: 26040 - protein, 555 aa, synthetic construct
MNYIIRDDKEHETTAPKVKVIAPRKKFQPSYNDRQNREIRVGAYCRVSTDSDEQELSYETQCEYYENYIGSHENWELVAIYSDEGITGTSTNKRSDFMRMIDDARAGKLDMIITKSITRFARNTVDSLMYLRILKEYNVDVYFEVENVHSLEANEMLLTILSSVAQQSSEDKSESIKWGYQRQFEKGKVYAANMYGYKSNRGTLDIIEEEAEVVREIFSKYLSGMSESKIARYLTENKVPKKNGSTKWDSGTIGRMLQNEKYSGDALLKKTFSIDFLHKKRYKNEGQKKMYFVENSHPAIVTKEVFKAAQVERTKRNMKSNDEKEVVESHHQNRYSSKNPLSNKIICSECGALYRRAVWTKRNKEKEPVWRCSNRLKNGKAICPNSVTLKEKPLLDALTSLINGKTKSKEKTRLELAKELSEYLNPKDIVEKKQKLNCELENVNSQINELLDKGMLLVARGVQDESQIEEHLAQCYQTKQMLKKELQKLDDKYNALKQGRQEKLLKTLERNSNEHTVMTQEDLAVFIDRIVVKKDKIEIETIDDQKCELLLNQIN

SEQ ID NO: 26041 - protein, 584 aa, synthetic construct
MGEKKRVRMLLRVSSNQQLEEDGDLGIQRQLVKEFIAQHEEWHLDSKEYFEGSNSGYSNAVENRDILQQALRDAQRNEYDILAVYKDDRIGRRMWEIGAYVMQLKSYGVDIYTVKDGCISPESDDIMGQMMLALRYGNAQKSSSDTGMRVKDTAQKLVQQGKFVGGKAPYGYKLELSGEISKHGRALHHLVIIPERAKAVKHIYELSLDKEYGSSKIARELNLDEEYKELAPSEVWRGGTVTSILTNPIYAGYTAYKRREKKENGKSKRLDSSEWILSEEPNPELQIISPDDWNLVQIKRKQRGMKYRTAPQNKGVKVIARNEGMLPLIDVIYCGYCGCKCTNGSKYNYWTIKDTGERRASRQAIYKCQDAWQGVPHYKVYQFKAEKIEKIVFQAIAEYIDKLQENEDIFEQISENGRKAKKEKAKELSREQERLKHIQQKISVMEDKIPEAMLGEYPVPVDKLVDLIEKQRQEKEQQEKVIAEKQKELDGADVSFNEWDSLRMQIPPCKDVFLNADNPTKRVLVNKLIEKISVKEDEVVIRFKININEIRSKALKKSGSMVPENKLEDKSVILDSLKIYPNPE

SEQ ID NO: 26042 - protein, 535 aa, synthetic construct
MKKKQPNTRHGRAAIYARYSSHNQREASIEQQVKACRELAVRLGLDVVETYEDKAISGKSDRRPSFQRLLRDAEKGYFDCVLAWKSNRMGRNMLQAMTNEARLKDWGVRTFYAEEDFDDTAAGRFALRNMMNVNQFYSENMAEDITRGMMDNASKCLSNGALPLGYKAGENGRIVLDKAQAAVVQEIYTRVACREPFVDIAADLNRRGIKTKRGGPWTKSSFYTICRNERYRGIYIYDDVRVEGGVPRIVSDGLFYRVQEVLKVKKTPQSARHHTGAEDYLLTGKLFCGKCGRPMTGVSGTSRSGEMHYYYTCQKRRREHACDKKNVIREQIEKSVAQAIKQYMLTDEMIQHMADATMAYNARQEKDLHLQDLQGQLAAVKTSAANLLKAIEMGVITETTKARMVELEQEQGRLNAQIENARAELVPITRDNFVSLLHIYRDGDINDSKYLASLFETFLVRVDLYDDHFLIWFNPLGQKPPADIPITSIENGDVDEFFDECRSKNVFDWGGKWSTKIKAPAVPRRVFLFWCSVSC

SEQ ID NO: 26043 - protein, 576 aa, synthetic construct
MKKNFKMPGSGSETPIRVAIYVRVSTVYQIDKDSLPMMKQDLTSYCKYILNTDDFVIFEDAGYSGKNTDRPAYQKMMSQIRQGLFTHLLVWKIDRISRNLLDFANMYAELKDLGVTFVSKNEQFDTSTAIGEAMLKIILVFAELERNMTSERVTATMINRASNGVWNGGRIPFGYSYDKPTQVFSINPEENKIYNFMAETYEDTQSIVHTSRRLNEAGYRSRNGNMWSPVAVWTILRNPWYKGVYRYNYYKIPGRKAIKDESEWVIVENHHPASIDPDRFDRIQATLDKNARYRNTPGRKTAQKNVHVFSGLVWCAECGSAFTASPGKLHVSGYRPSKYGCPNVRKTKTCHAKYTSDVVLGEFLLNYILNILNAQKQFAYIHSTDDLQKRLLHGSTFSNVDHVDPDGLASLLNMLEKCSGSDPVLLKRPRSKPKMDPELKRMMADQKKQQRALDRLNDLYLYSDDSISEREYLVRKQQITDRLQEINEAIGMMSQEPWMRTMNDEEFIRQASSFILTQKLADKQYIYYENLAESLDPEILKNFFVSILDSIILRDGRPETVVFRNGLSHTFTYKDS

SEQ ID NO: 26044 - protein, 550 aa, synthetic construct
MAKKKKPAGGIAVIYARYSSHNQRDVSIEQQIEACRKHAAELGLTIIATYEDRAISGRTDNRPAFQRLMHDAEKGKFSYVLAWKSNRMGRNMMQAMVNESRLMDCGIKVYYAEEDFDDSAAGRFALRSMMNVNQFYSDNLAEDVRRGLMDNANKCMVNGRQPLGYKRGKDGKVVVDEPAAAIVREVYTRVASGELFTDIARDLNRRGIKTADKGEWNKNSFHRLCSNEKYRGIYIYGDVRIEGGIPTIIDDPLWYKVQEALRVKKLKRNGRHRPGDEDYLLTGKLRCGKCGGYMIGMSGRSKTGDIHYYYACQNRRVGRTCDKKNIRRDVIEPAVAQAIKEYCLTDDAIEWIADKTVEYWEKADRNLQLDSIEGDLAAVQSSISNVMKAIEMGVVTETTRDRLIELEKQRTDLKSKLALAKEEVVHVDRKKLISSLLLFRNGDIHDRQYQEDLFKTFLISVYVYDDDDNGHLKIVFNAFGDNNTVDLPIDFGETDNQSAFSDGVEKFDYSLHRSTKRHPNTSDVFFCSLFLFTEKAKKSDTANAVSLFLR

SEQ ID NO: 26045 - protein, 520 aa, synthetic construct
MPRKKAPAAEAPRLVAYYRYSGGSRQTEQSIEGQRRDCEAYARAHGMTILREYVDRHISGKTDDRPAFQQLVADSAAHTFDAVICWKTDRLARNRYDSAVYKKKLRDNGVEILYAAESNISGAEGIIIEGLMEALAEYYSAELAEKARRGMRESALKGKALGSSRPLGLTVDADKHYIIEPTGAEAVRYIFEQYAAGLSSSSIVERLNVMGLRTSHGGPFNKSSINRIIQNEMYRGVYVSKKFDVRIEGAIPAIIDNDLWERAQKMFERNRQSRTPHASRADYILSGKLYCGECGCLMKGVCGRSSGNGQMYHYYACPGRSIGRACTRKNIPQDELEAMVVNAVADLLLEPALLEQIADAIVELQQAEAARPDPEKQALEKSLSDVRNKIQNILSAIENGTSSAALSARLADLEQQESTLSYQLSSLDAKKPLTFTRDQILFLLQQFRVSPSERTKAYCRRLVDTFVDHIELTNTELILYFNISDETIDKNKKAPRSNHSEESSTEKRLVRVARIELTAS

SEQ ID NO: 26046 - protein, 519 aa, synthetic construct
MRNVAIYVRVSTMHQAEQGYSIDSQLVDCRKKAHDLGAITINEYVDKGKSGAFLDRPELQRMLNDIKTEKEYYDALIIYKLDRLSRDSMGLAYIIKILQQKNIKIISTDGAQYGTNPQDVLTMQIMGSIAQFDNALRKERSIRGKIEKRKQGKLDKITKYGYTFNDEKQNLDIKEDEAIVIRKIFKWFTEDNLSAFRISKKLNSEKIPAPQPKINRKIINKDNIWFESTIRTMLKDETYAGIRHTMIYKFEKISLNNMKKTKRPPEEWISVPVPSIISRETWDKANNIMNRKNTNPRRTQRTWILQGLVFCEKCGQIMNIKQTPKIGKIKENEEKYNFYFKCRTNILNWFGSDKKCPNRQVPIYALEDSVWETLLNIFYSKETLEKYLKETQLKDNVYNLLDKLIEDRNKLSKNKNKIVEWFADGKIDQEIADNKINDLNNKINDLDKKISNLQSTNKSKKSFSINNLYDIFHKIKNPNREQKKEIIHSVVEKIFVERLDNKRSNAYTKPVLKIRIILC

SEQ ID NO: 26047 - protein, 514 aa, synthetic construct
MAKRKFNKGGEVRLVAYYRYSGGSGQTEQSIEGQRRDCEAYARLHNMTIQKEYVDRHISGKTDDRAAFQQMIADSDKGAFDMVICWKTDRFARNRYDSAVYKKRLRDNGVEIVYAAESNISGAEGIIIEGVMEALAEYYSAELAEKMRRGMRESALKGQAISRCRALGLKTDEHKRFVIDEKTAPTVRFIFEHYAAGESAMSIVEQLNAKGLRTSQGNPFNKSSIPRIIQNEAYRGVYISKSYDVRIEGAIPAIIDDELWERAQTMLKLNRQLKAKNEPKADYILSGKLYCSCGSLMRGMSGHSATGEVYRYYTCPNKDCHLRNIPKDDLEGKVMQSIVDHLLQPESMEALAEAMVEVQKADVEKPNAERVAIEQSLSDVRRRSKNILDAIENGTANAQLCARLDDLTEQEQTLSFQLSSLEKEKPVVFTKEQYLFLLEQFLMEPSERTPEYGRRLVNTFVTSIVVSGRELVINFNVSDETVNKNKKTSQTNLQKESSSGMRLVRVARIELTAS

SEQ ID NO: 26048 - protein, 545 aa, synthetic construct
MMQATSVQPQKTVRIIPATIDTKAAITQSYRQLRVAAYCRVSTKQDEQLNSYEVQRTHYEERIRTEPKWSLVGIFADKGITGTSMKKRDEFNKMLRLCYKGKIDMIIVKSISRFARNTLDVIKITRKLREINVDVYFEEQGIHSIDPTSEFYITIYGSIAQSESENISANVKWGKAQRAKQGNVPFQYKHFLGYTKNADGEIEIVPEEAEIIREIYERYLSGESLHGIKCYLEAKEIPTPAGCSVWRQETIRSILSNEKYKGDAIINKTYVSDCISKRIKANNGERNKYYIENNHPAIIDAGTFARVQEEIARRSGKPKVKQKGTKTELSRYSSKYALSELLICGECRTPYRRCTWTAKGKRKIVWRCINRLDYGKKYCHHSPSIEESLLQDAVMRAIMQTAKQNIEVLKTLKIHIGMGLTDEVTEDKTLDIQIRIAEIDAEFQKMLKAVSADNADGIDEERITELMNEKQRLTVQLEQYASVRQKRESAKSRLDEIYAILDGLQNHPMEYDDKLVRQIIECIVVESKEKIKVVFIGGTEIEMTL

SEQ ID NO: 26049 - protein, 517 aa, synthetic construct
MKTITEITRQKPTPPQIRLAAYCRVSSDSSDQLHSFAAQIKYYSEYCKRHPEYKFVDIYADEGITGTSMEKRDDFRRMLRDCKKGLIDRIIVKSMSRFARNTEEMLTALRALEQMEVSVYFEEQGLDTKSMNSEMFATFPGMVAQQESVSISQNMRWSYKKRMESGEFNCCAPAYGFDLINGKLVINETEAAVIRRIFDLYLQGVGMQTIANILNNEGVRRQYGREKWHHTTVNYVLNNERYKGDALLQKQITTQTLPFKKQLNHGEQPMYYVENSNPAIVSRETYEAVQALIKSRQPSCKRKAKNYPLTRTLLCPDCGHTFRRQVVNGTAYWLCAAKATNKTDCAWRRVKEDEVYATFSLMIRKVQANREYLLGTLIRQLEEMQYRTTGSQQRIKEIDREIEDLTAQNLVLSRLHGKGVLNAADYTAQSDVLENKITELRIERRAKITDSDENEMLDELKMLNDILKGVEIGIGFDAELFEQTVDSITVESSELLTFHLVGGISLSEKIREKGRCY

SEQ ID NO: 26050 - protein, 535 aa, synthetic construct
MKQPYNTALYYRLSRDDENFGDSVSIETQKTILQQFARDNQFHVVDEYIDDGWSGTNFDRPAFQRMIDDVDAGRINCIITKDLSRFGREHVMMDYYLEFVFPEKNIRYIAVTENEDTEKGLSDFVPFKNLFNEWFAKDTSRKVKAALRAKHAAGQRICTYAPLGYKKHPEIKNAIVVDEETKWIVEKIFELAYHGSGAASIAHRLIEEKVPTSGWLNYTRYGTFAHIYADAPEEKQYDWSIGQVKEILKDETYIGNSIHNKQTNISYKNKKKIRKPKEEWFRIENTHEPIISKDVFYHVQEQIASRRRKQKDGTTKIFSGLIKCADCGWSLAYGENRQNKTPYGHYHCSNYGQGTGKCSMHYIRYDTLYTYVLLRVQHWTKAVREDEERLLESILKAGDKERAAAMKKHTAELAKAEKRKTEVDRLFAKMYEDRVSERITEYNFNMLSQKYQMEQLELDEKIQKLKAALSESKQSVEDARKWIEIVKQYSEPTELTAELLNNMINKIVVHEAVKYDNGFREQKIEIYYRFVGKID

SEQ ID NO: 26051 - protein, 684 aa, synthetic construct
MSILQTIKTIIRVVLYLRLSDEDKNKLSKEELSQSIKNQEIMLRDYAEEQGFKVVGVYNDDDWSGSDATRPDFNRMIEECKNGNVDIVLCKTQARFARDMELVEKYVHNLFHEWNVRFITVVDRIDNARKETKKTSQILGLTDQWYLEDTSLNIRETLKSKRKDGQLTSSFATYGYMKDPENKNHLIIDPISAEVIKRIYDEYLSGTGLDKIARRLNEDKILSPYEYKLLNGSKLKIPVIKDYVNYGYIEKTGTYMLDVSFTNKEEYILKDLVSFNYITTDMKSFNNKCDIVLKKYTNNRTKIYYSENDNIDINNFNIDDCILLNENDVIPKTAKVIISYTKELDRTHTINYQFEITLKENREHEDYYINICGKATDEIKKSDFIHNIRKKFKWSSSTIRTLLTDEVYIGNMVQFKSTTVSYKNHTVVWNDDETRIRKDNTHEPIIAKDIWYTVQERLENTARSCIGGTVHPLCNKVYCSNCNQIFTKTGNRRSDGTGYLCCKDKKTNWSNCDNKASIREDQLHQFILEKMNEMLKKFYEEDDLKEMQNEVIEQDLYKDKLNSLEKELQSINKELQGKSTYFQKLYEDRTNGILPEKEFLILMNKYKDDNEKLEERQKIVKKEISSTLAKKETVKTKKNIFKKYRHIEELSIEIVEDFIDKILIGSYDETTNSRDIKIIWNFTI

SEQ ID NO: 26052 - protein, 567 aa, synthetic construct
MVVAVYCRVSSEDQAERGTIEIQKDFAAKYVNLYGLDVFDYYCDDGITGTLPLEMRPEGKRLLADAANKRFDVVIFHKLDRLGRKVRVILNAVHDLDELGVSIKSMTEPFETETPTGKFLLTTLAGIAELDRDTILSRMWSGAQYAAKQGRWLGGVIPYGYMVADKKLVISTDPIPNCRLSEEDVIKIIFRMAAKEKANCAEIADYLNSIKIPTRYMLNGISGKRYKKTAEIWRPSRISEIIRSTTYKGLHQYGKNATHKNSKIITRSVPAIVSDEIWQEANNTMKDNRVSCKRNTKNLYLLQGMIRCGLCGLAYSPTFYKARNTSYYCCTCKGQQKTKFYNRDTCIGKPVRVDWLDNLVWSKCLELLKEPEKIYDAKPSTNKEPPNIVPTPTEFELIKNRIQELSTEREKLLDLYRKGIIIESDLTTQINKLYLEETELNNKIIKIDSQPKQELKRSKASTVMVLKEFIEMIKNTDINQLPFELKREVVKMLIDKVFVYTKVDPDKFYPSINVIISWRFDAAPFNIDYIENYTLITFLLQRKKLKTQLQPTLPITLTPVLNCNTRQ

SEQ ID NO: 26053 - protein, 604 aa, synthetic construct
MKKVFVYHRVSSDQQLDGSGIARQAELLEGYLERTGICAEMDDPAPVVLSDQGVSAFKGLNISEGELGAWMEQVRNGMWDSSILVVESIDRFSRQNPFDVMGYINALMAHNVAIHDVMANIVISRSNSKDLPFVMMNAQRAYDESKYKSDRIRKGWAKKREQAFNKGTIVTNKRPQWIEVENDKYVLNHKAAVVKEIFALYQTGMGCPTIAKQLQTKEGEQYKFNRPWTGELVHKILTNRRVTGKIFISEIIRNHDDIENPVTQKKYDMDVYPVVINEEEFELVQELLKSRRPNAGRVTVKKDGQEEVLIKSNLFSGIARCTECGGPMYHNVVRAKRTPKKGDPKIEEYRYIRCLNERDGLCENKAMTYETVERFVVEHLLSMDLNTVIKEQEFNPEIEVIRIQIDQVKDQITNYENGIERRKSAGKAVSFEMREELDDAKLELEQLLARQASLATVQVDLPVLQDVNVTELYNVNNVDIRTRYENELNKIVSNIRLKRNGNFYTIDIIYKQNELKRHVLFIENKKKEQKLISEVIIENVDGAKFYYTPSFVISVKDGEIRFQQTKEDLTIIDYSLLLNYVDAVDRCDAVGVWMRNNMSFLFTK

SEQ ID NO: 26054 - protein, 457 aa, synthetic construct
MAKKVTVIPAKQVRANSTKAAPDVRKTRVAAYCRVSTDAEEQLNSFDNQVEYYTRYINENPAYEMVGIYADEGISGTNTKKRKEFQRMIADCEARKIDLVIVKSISRFARNTQDCLTYSRKLKNLGIGIFFEKEHINTLDATGELLFTILSSLAQDESRNISENCKWGIRSKFQEGKPHINTYKFMGFDKNEEGRLVINEEEAKVVRRIFREFLEGYNPADIARRLNEDGVPGVSGKPKWITPTILGMLQQEKYMGDSILQKWVTTDFLMHSLRRNTGQVAQYYVENSHPAIIDKDTWNAVQEELERREMYCQNYHLSMYAYRADKNPLNGKIVCGHCGHTFARKSWANRGIAYWTCKSDTCKGNIKEEVLHKAFITAWNHTVKNKDRFMERWQQALDGEDSLVRLRAKQMIDLTNEGTINTLVPELMLMVLEKIMVHDLEHFTVSFLDGTEKEILV

SEQ ID NO: 26055 - protein, 497 aa, synthetic construct
MKIHVITPTSETPEKLRVCAYCRVSTESEDQENSLDNQRKHYEGLIQSNPDYEFVNVYYDFGISGFKEMRPGFQQMMSDARKGKIDLIIVKSVSRFARNTVTILKAARELKELGIGIFFELQNINTLTEAGELMLTVLAAFAQAESETYSQLSKMGIQRKYEKGEPIQRLQYSFGYAKDDNGEYVLNPVEAPWVKKIYKMIADGYSSADVKRYLNDQGVKTVKGAEFTESSVLRIVESEIYKGDFIMHKYFVNADRKIVKNEGQVDSWYIENDHPAIVSRRLWQKAQDALAAKRAYLAEGSVVGENTEELYPYKNHIFCSKCGFPLYRRVYSNGNRVNWGCSGQKRYKNEFCTGINIPDSYFRKLGDFEDNLYFRESKDSLGKSSFKYCTETAWSRKHRKKEPIAVPELNEKNYPYFKKMYCKECGSRLVRYIESRQHVKWICNGNKRKGTVFCKGVRVPDSIVRGWEIDTDVLVEGKVGKDGEKSYSYTCKTGQSK

SEQ ID NO: 26056 - protein, 515 aa, synthetic construct
MKEAVIYARFSSSKQREESISAQLRECHAFAEEEGLTIIHEYIDRAMSARTDQRPSFLQMIQDSDKKLFSYVIVYQLDRFSRSRYDSAVYKHRLQKNGVRVLSAKEHITTDPTGILLEALIEANAELYSAELAQKVTRGMLQNVLEGKWPGGHLPLGYRLDGDHRLVPAPEDAPTIQLIYEWYLQGLNEARIIRKLNAEGYQTSVARPFTRTSIHRILRNPIYIGTFRYKGKLYPHFAPPLLTEPLFYQIQALLDRHEHKHVVPHGQDFALVGKAFCGLCGQHLVGTSGTSHVGVRYLYYMCSSRTHILDRKTHTPCKFRNIRADWLESQVYCVTLQILYDPVIRKDIAKNCAVQQKDLLTESPRLKQLKTVRKELQQKLDNSIQAIESGIFSKTISDNVCRYEKDIKKLDAKIRGEKLLSRPVSISEEFIEYYLEKVYKQKKDDGQMSEIFQTFIHRITVFTNYIAIQYAFCENLPIPETPVIMRGSNKSKMVRLEGFEPSHPVPETGALSPEL

SEQ ID NO: 26057 - protein, 512 aa, synthetic construct
MSTEYALYLRKSRADLEAEAHGEGDTLARHEHILMELAKSRALPIGAIYREIVSGERIANRPVMQQLLSEVEDGRWKGVLVTETSRLARGDTIDQGIVAQAFKFSGTLIVTPAKTYDPTQEADEEWMEFGLFMSRQEYRMIRRRQLAGTRASKKEGHYVPGRPPYGYERYKLDGWSLRPVEPQAGVIRTIYDMYLSGKGFSEIANELNAMKIRTPLDKKWVPATTRAILQNPHYAGFIPSAMKVNTKIVQKGKLITKRPVNKNCELYEGIHEAIIPRDVWYSVQQRMKDTVTPRVPRKYQQMNPLAGLVYCDQCGKLMSRHPYRREDKVRFGCENPSCSTVSSLFEDVESLVLQSLREFLHEIELSSPTLLDTKSEEIALQNIDKQLTDINHRLQRTYELLEDGVYSKETFLQRQSAISQDQTALLNTKHEIERKLHNKQTDIEAQKNSAPLIRHVLDVYPTLEDPKEQNLLLKQVIRRIDYHKTVRVYGKAKSDLHLTIHPKIAIPQTSNI

SEQ ID NO: 26058 - protein, 570 aa, synthetic construct
MKEDKKIRVAIYIRVSTLYQVDKDSLPMQREDLTNYCKYIFNTEDYEIFEDAGYSGKNTGRPAFQEMMIKIRKKEFTHILVWKIDRISRNLLDFSNMYEELKKYGVTFVSKNEQFDTSSAMGEAMLKIILVFAELERKLTSERVSATMISRATKGLWNGANVPIGYKWDPDTKFPIPDPNEAKTVQLIYDMYIKAKSCLALAKHLNTENIPTKRGGKWTSKTVNDILRNPFYKGTYRYNYRESARGRKKNENEWIIIDDNHEGIIDKAVWQLANDILDSNAGVLKTKYRQYKHIHIFSKKLTCTKCNNGYIATKDKARNDGYMPSKYRCAGKMHKHICDAKLVSDVVLGPFILTLIKNIINAGNMSIDTIQELEDILLTGDPFKDVLSINKEDLEILYIALFHVPAASKNITYKSTLESLPKGNEEMERDFLKKKLEKFKKDKMKYTKALERLEDLYLFSEESMSKVDYLLKKKQYESKLDEIEQNLKQFYRMNDKTRNIKDMTFVLNYEEFIFNQMLGKKELDFKHLMTNTNNNVIKDLIDTIIKTIYMHDKTVVSVEFNNGLHLHFNY

SEQ ID NO: 26059 - protein, 512 aa, synthetic construct
MQRAVIYARFSSDMQREESIDAQVRACKTYAKNRGYIVVDTYADEAKSGRDVTKRDAYNQMLADAMEDKFDIIIFHKIDRNSRNELNYFTFKDKLEKLGIRYEYAAQPIDALSPEGQMMETMMVGMAAYYSRNLAKETKKGLNENAYKALFNGGCPPLGYKIVDKKYVIDEQEAAAVRLIFELYLNGQGYAAICRELSAKGYTTKAGKAFAKNSLHDILCNEKYIGTYTFNKIPRKKGGRNSHAAERPEDFISIENAFPAIISKDDWALVRAKMDRNRHRAASYTAKENYLLSGKVFCGHCGSAMVGHRIRKRYCYYGCTRKEQTPTSKCPQKMIRAEILEHWVLQILERVVFTVGGMRRIADAIVDAYEAEQKEQAGSQATLLQRKAVAEKKLNNLYKIFEEGNADEFDRQRLNQIKAELREINKSICETSVKPAKLLSKQKIAAILAAMKDEIFVKKNSYYVQQAVDLLVDHVTITDKVLKITLSTQNVCAYLVPRTGIEPVRVSLPEGF

SEQ ID NO: 26060 - protein, 489 aa, synthetic construct
MLKNIPAVVYARYSSSNQREESIEDQLRECYKFADREGYNVIGQYCDHAISGRTDDRPEFLRMICDAEKQLFKAVIVYRLDRFARNRFDSVLYKSRLAQYKVNVVSATECIPEGSDGVLIEALHEALAQKYSDDLSQIIRRGLYGNAEHCKSNGPLPFGYKANPTTRLVEIDEETAPIVKQIFTMIAEGSNYNQALAYCTRMGYPKTKNALYHILRNERYKGIYIYANKRTEGGIPCIVSEELFAAANATRQKHINKPNAGSYKYLLTGKLYCKDCENLYSGGYGTSRWGKKSYYYVCSGKKRKHICAAANINAPKIESMVVDALYMFILNEDIISAIIDAALECQERNSPHKNNIMVINRRIAEIEKKLNNLLKAIEAGVLTETTMSRMQELEEKKKSLQRSLMKEKLKAPKISRSQLEFFFEKLRGEDPHARKFQKCLIDTFVNRIYPDGNTVKMVVNLGAPDDETLTYSKLSACFAGFDKRNFWWR

SEQ ID NO: 26061 - protein, 505 aa, synthetic construct
MPKTEEKQAVKAVIYARYSSDRQREESIEGQLRVCEDYARRNNMTIIHTYADRAMTGRSDQRPEFQMMIRDAATMAFDVVLVYKLNRFARNRYDSAKYKHKLKKYGIKVVSAMENIADDPSGILLESVIEGMAEYYSAELAENVMRGMTENALEGKWPGGVVPLGYKLDEQHHLVIDGPKAEVVRLIYQLALEGHNQKYIIDELNRRHYTNSAGGPFSYNTLRTILRNEKYIGVFTWGTVRRENACPAILDKATFEAVQEHLNFRTKHHIRSCNEDFLLTGKLFCGCCRSKMIGVSGTSKTGAIYYYYACAAHLKKKCKTRNIRKDAIEDLVCEVTTRILSSKEAVEAIARQAIEMQKNKKGSLELQAIKNQIADINKKLQNCVKAVENGLISDTITNHINEYEKELTRLKDDAARVKLLDGDIELTQQHIEFFFWSIAQKIKAADKYKSILLSSIVRNVIVYKDYIEIQYNYKNELPILQNPVKVESSYLNQMVIHPGFEPGTP

SEQ ID NO: 26062 - protein, 464 aa, synthetic construct
MARSVTVIPARSPKARTGHKAVQEKKIRVAAYCRVSTDQEDQLHSFEAQVEYYTKYINEHENYEMVGIYADEGISGTNTKKREQFKKMIADCEGGKIDLVITKSISRFARNTQDCLAYSRKLKGLGIGIVFEKENINTLDSTGELLFTILSSLAQDESRNISENCKWGIRTKFKNGEMHLNTFKFLGYDKDENGKLVINKEQAKTVRRIYRDFLIGINPAQIAKELTEEKIPGCLGQTKWYPSTVVGILKQEKHMGDALLQKTYTADFLTKRQVKNNGEIVQVYVKDSHKGIIDKQTWNAVQEEFERREKFKKDHGTDRYSYGADCVPFCEKVFCGECGSLFTRHSWKSRGIVQWQCKNHRKDGKVVCTNAYVSNADLEKGFMKAFNRMVTDRDKHMERWQQMKTDGTPLEKIRAEQMMEAVGNDPLTRFVPEIAQLVLCEVTVLAAKKYEFFFQEGSRVKVSV

SEQ ID NO: 26063 - protein, 502 aa, synthetic construct
MEIQIREGNDRQKKKLKVCAYCRVSTDADEQENSLENQIRHYEEIITSNPDYEYAGVYSDFAISGFKEKRPGLQKMLADARKGKIDLILTKSVSRFARNTAIVLEATRKLKELNVGVFFELQNINTLSGEGELMLTILAAFAQAESESGSVGAKMVYQRKYEAGIPVQYLERSFGFKKDERGVYIADEKEAIWVRKIYEMASQGYTPAAIKRYLNENKVKTVGGAKWLDSTVLRILENEIYKGDYIMHKFFVNDERKLVRNRGEVDAWYIEDDHEAIVSPELWQKAQDALDAKRDYLAEGSIIEEFTEENYPYMNKIFCAECGHPLYRRIYSKGNRLNWGCSGTKRFGKSFCKGINIPDGILREAWEFDGNMYIGEKLTAKGTKKFTYLKEISWKRRHKRKEPEPIPENTVEAYPYRNKIYCGLCGSRLVRYVDSKNRKVIWVCNGKKRKGKEFCSGTRIPDSVIQGWGEITKDIYIQRKDDKNGKKRYCYTSKKPKGADRA

SEQ ID NO: 26064 - protein, 465 aa, synthetic construct
MPEKILRCAIYIRVSTFEQSVHGKSLQAQKECLEQYATDNNMSIVGVYADEGKTARKELKKRKAIHALVEDVKRDKIDVIIFWRLDRWFRNLSDFYKVQDVLDDHGVRWISVSEPGINMETRDGRLQLNVVLSIGQNEVDTTSERIKFVNEASIRQRKLIFGDANMPFGYKTGVVDGKKCMVKDPETEHMVEDFFNYFRIHNSKKGAVRYMQEVYGIDFSYGMLRTMLSSEFYKGTYRGYPYCPAYLSEKEWNEMQTISKRNIKSTPSGRVYLFTGLMRCPVCGQKLVGTGCSSIINRKTGEKRTYCYYRCNRALKDHICTYRHRVSQNLIEKYLLENLEREYEKYKVRTNQISEELKKQKKAKDPKKLRKEMERLNLLFQKGRISFEYYDTEYNRLEEEYVHSSNPCQQKEEARNTRYIEELLQTDFRQMYNSLSLENRRSFWRSTIQEIYLNDDNTIKAVDFL

SEQ ID NO: 26065 - protein, 557 aa, synthetic construct
MIFRQKCRKIHLFTCFIYMEVKMDKAALYLRLSKEDVDKINKGDDSESIVNQRLLLMDYAISHDIQVVDVYSDDDYSGLYDDRPEFDRLLHDSKLGKFNIVIAKSQSRFTRNMEHMEKYLHHDFPLMGIRFIGVVDGVDTQNTANKKSRQINGLVNEWYCEDLSNNIRAVFHQKMKAGQFLGGYAPYGYLKDPNDKYKFVIDEYAADVIRRIYALFLEGYSVKAICHILEDEDVLNPTLYKKKQGLTYKNAKSDEFGAKYNLWSETTVKRILTDDVYIGRLTQGKYQKASYKDKKIVPVPKDHWYITENHHEPIIDNETYYKVAALRSKRRICVDSQYGDKKKVHIFAGKLCCKECGHTMIKSGGVRGRKDDWYLRCQLSNKSRRKECTSHNIRYSTIENVVLEKIQELVKCALEDKSKLNSLLNIISDSDNKETLQNKKKELRKLDSDIENVSKSVKALYFDRISQQIEENMFFQLKADFENELQNLKSKKKIIDLDIEKLEYETDSKSDVIEVVRRHTNYSKLTHEIVNDFIDYIEIGEKNKETEEQEIIIHWNF

SEQ ID NO: 26066 - protein, 500 aa, synthetic construct
MNGVIYARYSSENQREESIDGQLRECTAFAQHNDIQIVGEYIDRAFSAKTDNRPSFQKMIKDSAKGEFDVIIVWKLDRFARNRYDSAHYKNILKKNGVKVVSATEAISSGAEGIILESVLEGMAEYYSAELAEKVSRGMKENALKCKYNGGSVPLGYYIDESKHFQIDSSVAPFVVECFEHYADGMTMKQLRDELNMKGVKNSRGGKLSIDVISRMLTNRKYLGEYTFQDITIKDGIPAIVSTSLFEKVQDRLTKTKKAPSSHKADDDYILTTKLFCGKCKSFMVGESGTNAQGKKYRYYKCVNHKKHQGCDMKSIRKDLIENMTIKYIREFLNDEDLINTLIDLAYDAQHKENEQLPLLRKQLAQTEKGIKNIVDAIEQGISTKSTRERLLDLEQRKNDIEMSISKESIENPMLTKKQFKFWFDQLKKLDISKSEQRQKLVDLFVNSIIIYDDHIKFFFNYKEHTETITFDELNNCSDLPDSPRPNNKRHPLGCLLFFI

SEQ ID NO: 26067 - protein, 531 aa, synthetic construct
MEQYCLYLRKSRSDVEAENHGEEETLARHEKILLELAKRREYNVTQIYREVVSGETIAARPVMQQLLSEVEHGIWSGVLVVEVERLARGDTIDQGIVAQTFKYSDTQIITPMKTYNPNNEYDEEYFEFGLFMSRREYKTINRRLQRGRLSSVKEGKCVCSIAPYGYDKVKLKGDKGFTLAPNPNEADVIKLIFELYTKGELQPDGTYKRLGVALIARKLNEMKIPARKSEYWVPASIKDMLRNPVYAGKIRWNWRSQNKRMQSGSISISRPRSEEDNCIIVNGLHPALITEETFDLAQEYLAKNPPRPTKRNAPTKNPLAGIVVCAFCGRKLVRRPYTSASCPPTLICSVPHCPNVSSFLHLVEERILKSLEEWLRNYKLQWNLSNNKPSELISESEILRQSLNDINSQIAKLNKQMIKAHELLEQDIYTTEVFLERSRAITERLNQLSYDKAEIEKRLGIETIREKSMKEIIPKVEKLLDVYHELPSAKEKNDMLKDVLEKVVYKKTQNTRWSGSPDDFEITIYPKLPKS

SEQ ID NO: 26068 - protein, 510 aa, synthetic construct
MSYFIYARKSRKDAELEALGIDVLERHITTLLELAKTLSLPIGAIYREVVSGDSIDARPVMTQVLSEVEACMWDGALVMDVDRLARGDTIDQGRVQRAFFYSNTRIVTPNKTYDPANEYDNEYFEFSLFMSRREYATIKRRMQRGRERSSSDGYYVGNVAPYGWERVIAPDGKHYSLAPHQTEAPVLDLMYDLCGNKQYGYQKACTYMSNMGILARSGKPFTPSTLKGIISNPANIGKVRWGHRKTVRAVKDGRVVKSRPKATDYILSDAAWAPRISTDLFKRANQPKGCFSSPVRNDRPIQNLFAGLVRCSQCDRLMVRKKAQTKTPYDMLICQYTECSTVGIRIDELEEALLGWLKDYIAKYEFADTHEEDTAAIAAKELIVTNFETEHQTLLKQRESLFDFLEQGIYTKEIFIERSNALEQRIRDCMNNITAAREDLHTTIARQENRKNFVPKCKNLLSEWDSLTISEKNSALRQLIDRIVLTKTKRNKKNQKNSEFTIDVYPKVPK

SEQ ID NO: 26069 - protein, 477 aa, synthetic construct
MRDSKSKTVIIYNRVSTIMQDKNESLTEQTDECIRYCKTNGYEIYKILKDVKSGTKDDRAGYLELKKHIRRRDFDILVVLETSRIARKMKELVLFFSLLNENNIEYISIREPNYNTTTPDGKFAMNIRLGLIQFERDNTAERVTDRLYFKASKGQWVNGKPPIGYKLVNKRLEIDEEKAEIVKNIYEDFLNGYSLNQINNKLQFSWGSKQVKRILTNPTYKGYIRYGTRSNRKKNNREAFIVKGWHEAIIPEDKWEKVQEMYKSLNRKASNTKPTLLGGLLKCKECGNNYIRKRGGSYDKNLYYGCNLNNLRYSDKFFYKDIPECSSATIKGDLLEKAVIDTLKKQINDLNFNDIEIDKKRQVNIKQIDSSINKFKNRLNKIYELYIEDEIPKDKYLKDKKDIEARIISLEKQKKSFGEIEVEKSNNEMIQEYFSKIDLSNIEEANRILKIIVNKIVVYKKKKTPKDDFEVEIYLNI

SEQ ID NO: 26070 - protein, 586 aa, synthetic construct
MTGFTFQSLKPQDSLSNELRSVIRDNVLQFYAKGLSAEAEEEGLTALYERLSQEDKLDGESNSIANQKKILERYCKDHGITAYRHYDEDDGYSGTNFNRPGFQRMLADIKAGRIKRVIVKDMSRFGRDYLQVGMYTDVVFPEFGVHFIAVNDGVDSTRGESEFTAIRNVFNEMYARDTSKKIRATWQSKGKSGEHLTTIPPYGYMKSPEDKKKWIVDEEAAAVVQKIFSLCASGKGPTQIAKWLKQQQILNPTTYCHAKGLPTSNKPTADPYKWTNETVSRILERVDYLGHTVNFKTTKQSYKSKKKIWNDPENWVIFENTQPPIIEESVFLIVQNIRKARRRPTKMGEMGMFSGLLYCAECGGKMYQCRATNFAENQKYFICSTYRKGKDLCTTHSIKNVVLHEIVLRNLREAISYVSEHEAEFIQDAAESDMRDRDAEFVRKRETLAKADTRIAELDRIISRLYEDNVIGKLSDERFIKMSHDYELEQSNLKSMAEVLRKDLKQQEQQKTNVKAFIAAVKKYTDLQELDAAVLRAFIDRIEVSHVDKKSRTREITIVYNFIGAFDFTRAIENARNTSKKEQRTA

SEQ ID NO: 26071 - protein, 490 aa, synthetic construct
MTDKNLLVITPHRKEPGKQRIAAYCRVSSRSDEQLNSLTNQINFYRSLFENDDTVVFVGIYAEEGLSGTQAESRPQFMKMIEDCRSGLIDCIRTKSVSRFGRNTVDTLIYTRELRSLGIDVFFEKENIHSTESSGELMLTLMAAFAESESETMSENIKWGKRRRYEQGITGSITLNGMYGFRQNKGIVTIVENEAELVRRIYKDFIDGYSYCEIADRLIADEVPTRMPGASWAKTTVQNIIRNEKYCGDCLFQKAFIANPITHQQVRNNGELPKYLVEDCLPAIVDKETWKLAQAVAARHTPHRQAPNERYPFTGKLFCGVCGKPYYYYHYTTTNKKPLAAYRCMSHKTQSAVEVPGQTYTPPHKATFNYNASAKLIAYRERYCKPPKERQMLCTDVRIPTDLPQKAFCRAWNLIVAKKLRYQATLRSTVDNAEDILVRYRAEEMCLLIDEIGKINEFSYPLMLKTLDRVVVNANGKLTFIFQSGIKITV

SEQ ID NO: 26072 - protein, 548 aa, synthetic construct
MANKTVKKIEATKPTLSAQYSTFTRKRKVAAYARVSTAKEEQENSFEAQVSYYTQKIQANPEWVFVEVYSDEGITGTNTKKRDGFNRMIEDALAGKIDLILTKSVSRFARNTVDSLVTIRQLKEKGVEVFFEKENIYTLDAKGELLLTIMSSLAQEEARSISENTSWGRRKSFADGKVSLGYSNFLGYDKGPDGELVINEKQAKIVRRIYSEFLAGKTPGGIAKGLTADGIETPGHKKVWQASTVLNILKNEKYYGAAILQKEITVSYLTKEKRPNTGELPMYYIEKDHEPIVSPETFQMVQEEMRRRREAGSNMQCVSIFSSRIICGDCGGYYGRKIWHSSTKYTAWHWHCNAKFQKRKYCETPTLKEESLEETFVEVFNSLIADKDEIVENYRLCIDAVTDDSEYRRQFGDLNNGCGEVQTLIRSLLMTYSRQDTADDIHEKLNEYEERLDTMARLKQELDLKIAACAAKRVQITGFLNELMKHDAPLAKFDPLVWQAVINYATVNRDCTITFTFRDGTEKTVPIKNGVRPYTKRNKPQEVDGNDG

SEQ ID NO: 26073 - protein, 493 aa, synthetic construct
MTGIIYARYSSDNQREESIDGQIRECKEFAEKNDIRIIDTYIDRALSAKTDNRPSFQQMIKDSSKGLFDVIIVWKLDRFARNRYDSAHYKNILKKNGVKVISATEAISSGAEGILLESMLEGYAEYYSAELAEKINRGLTENALKCKYNGGSVAFGYMIDDEQHFQINPTLAPVVLKIFNDYLSGKTQKEIRDELNNKGLKNANGREFTINNISKILTNRRYVGNYIYKDVVIENGIPAIIPNDVFDKVQEMIAVNKRAPSRHKAVDDYLLTTKLYCGKCKSFMVGESGNARGRRYSYYKCVNTKRNKTCDKKAVKKDWIEDIVIYQVMKFINDDSLIEMLVNKILYIQGKESPMLKSLKKQLAQTNTAIENMLNAIEQGIITKSTKKRLDELESTKENLETEIAKENISHPLLTKEFLYSWFDGFKNFDVNKLENRKMLIDTFVNSVVLYDDRIDFYFNFKDNAKSLTLSELNTVSDLSSSSPPNIKTLHST

SEQ ID NO: 26074 - protein, 528 aa, synthetic construct
MAYCIYLRKSRADRELELQGFGETLKRHRDTLIELAKKKNLPIGEIYEEVVSGDSIAARPQMQRLLNDVSDGKWEGVLVMEIERLARGDTSDQGIVTKTFTYSNTLIITPMKTFNPTDEFDQEYFEFGLYMSRREYKTIKRRLHAGMEASCKEGNYIHHTPPFGYSIVKNKKSKGYRLEPKPGEAEIVKLIFQWYTKGILKEDGSYELLGTARIADKLNSEYSIKPLGGVWTIPTISTMLRNEHYLGYIVFGKKKRKKVVENGIIVDKWTRNESYGLYKGKHPALVSQDTFNLAQERLSRNPRRPSKTITNPLAGVIKCGMCGRSMYRRPYQKRGQSASLICSEKTCHNVSSAFYLVEDALLTAIKEWIDGYEIKEEANKYDTSVLESKTKLLEEQQKQLITYKNQLTKVFEAYENGIYDSDTFLNRQKTVSESISSTEEAIVRLNKEIANEREIISHQEEIIPKAKKILEIYKTSDDVQLKNDLMKSILDKVVYTKTANGHFKDQRQDDFKLELFPKLPKNKGNSSE

SEQ ID NO: 26075 - protein, 513 aa, synthetic construct
MIENYLEKIKQRLKVVVLHAVIYTRYSSDNQRSESIDAQIRLIRKWAQEHNIVIDKIYADEAQSAKRDDRQQFQQMIADSKKQKGWQLVLVHKLDRFARNRMDSVAYRVELRKNKKYLISTTEQFDDTPESCLLEGIIESMAEFYSKNLARETMKGLTENALKAKHCGGTPPLGYELDALNFYKINEFEAQGVKLIYQWFLEGKSYTDIIAGINSLGYRTKRKRMFTRNSLYEILRNEKYTGTFVYNKMESRDEFTGARSRHKYKPESEIIKVENMIPEIISKEDWNTVQIILNSRKNAHTNRAKEEYLLSGKVQCGECGGSYVGKRTTNSRGNVYLSYICCRKRNSNYKCKNHCVNRDWLEEYVLKIVDNYISHLSHKQQHCIYKLCLERVENSHQSEIEVLKKEVRNIDKELFRIADVITIASSSTLIEKLTSLEQQKAEIQLQIENLATEKRKSLSEQEIGLFLINFRKMLKERSAPYLKELVYLIVNKIIVNQENVIVYLNVPNVKVNK

SEQ ID NO: 26076 - protein, 526 aa, synthetic construct
MARSTTKQPAKPKRGAKSQIIGDGVDYSRYSSHSQKDLSIEQQIAKNEELAREYGIRLVEHYCDRAVTGRTDKRKDFQRMMRDAAKGKFKYVIAWKSNRMGRNMLEALVNEAKLQELGVRVLYVEEDFDDTAAGRFAARSMMNVNQFYSENMAEDIKRGLEDNASKCKVNGALGLGFKKGEDGRYALDEPKAAIVREIFVRVASLEPFVDIINDLNARGIKTSTGKAWNRSSFHRMLANERYRGVYIWGDIRIEGGVPRIVSDELFYKVREVVTTKKNPQGRHRVNGDYLLTGKLFCGKCKAPMVGISGTSKTGALHYYYTCQNRRTGSLCDKKNVRRDDIEMIVAEAIRKYVLQDETIEWIADSTIAYNKRKEADGHISILQDQLNDTNRSIKNIMAAIEQGIITETTKGRLLELEADRSSIEAKIAIAKSDIVEISRDDLIAGLEMYRDGDICNKKYQARLFDTFLVAVYVYDDELKIVFSFSGKKNTVRIPMDASAVDNIENSAQAECSFKLPSGPPEKRTTP

SEQ ID NO: 26077 - protein, 520 aa, synthetic construct
MPRKKAPAAEAPRLVAYYRYSGGSRQTEQSIEGQRRDCEAYARAHGMTILREYVDRHISGKTDDRPAFQQLVADSAAHTFDAVICWKTDRLARNRYDSAVYKKKLRDNGVEILYAAESNISGAEGIIIEGLMEALAEYYSAELAEKARRGMRESALKGKALGSSRPLGLTVDADKHYIIEPTGAEAVRYIFEQYAAGLSSSSIVERLNVMGLRTSHGGPFNKSSINRIIQNEMYRGIYVSKKFDVRIEGAIPAIIDNDLWERAQKMFERNRQSRTPHASRADYILSGKLYCGECGCLMKGVCGRSSGNGQMYHYYACPGRSIGRACTRKNIPQDELEAMVVNAVADLLLEPALLEQIADAIVELQQAEAARPDPEKQALEKSLSDVRSKIQNILSAIENGTSSAALSARLADLEQQESTLSYQLSSLDAKKPLTFTRDQILFLLQQFRVSPSERTKAYCRRLVDTFVDHIELTNTELILYFNLSDETIDKNKKAPRSNHSEESSTEKRLVRVARIELTAS

SEQ ID NO: 26078 - protein, 467 aa, synthetic construct
MAREIVHIPARRGMSNRATVTDRKIRVAAYCRVSTDHEEQINSFENQVTYYTEYINRNPNYELADIYADEGISGTNTRRRDDFNRMIADCEAGKIDLIITKSISRFARNTQDCLNYSRKLKDLGIGIQFEKEGINTMDSSGELLFTILSSLAQDESRSISENCQWGIRSLFKQGVLHLNTNRFLGYDKDEKGNLVINEEQAAIVRRIYTEFMNGINPDVISRRLRDEGVPGCMGEAKWQASTIFGILRNEKYMGDAILQKTFTSDYLTKKTVKNEGQLEKYHVKGDHEAIIGPEYWDAVQLELERRQNYMTAHSLRTMGRYTDEQPFSNRVLCGECGKVFWRRTWYRLNNTYKVWQCGNRYREKGVVTCHSENLKESDLHGAFVMAWNGILENRAEFTETWKAQAENGNALERFRAKQMLELTKMKPLKEIDLLLVGKVLDYVIVQHGGELEFHFLDGTQLAVEVTE

SEQ ID NO: 26079 - protein, 576 aa, synthetic construct
MKKNFKMPGSGSETPIRVAIYVRVSTVYQIDKDSLPMMKQDLTSYCKYILNTDDFVIFEDAGYSGKNTDRPAYQKMMSQIRQGLFTHLLVWKIDRISRNLLDFANMYAELKDLGVTFVSKNEQFDTSTAIGEAMLKIILVFAELERNMTSERVTATMINRASNGVWNGGRIPYGYSYDKPTQVFSIDPEENKVYNFLVETYEDTQSIVHTSRKLNEAGYRSRNGNMWSPVAVWTILRNPWYKGVYRYNYYKIPGRKAIKDESEWVIVENHHPASIDPDRFDRIQATLDKNARYRNTPGRKTAQKNVHVFSGLVWCAECGSAFTASPGKLHVSGYRPSKYGCPNVRKTKTCHAKYTSDVVLGEFLLNYILNILNAQKQFAYIHSTDDLQKHLLRGSTFSNVDHVDPDGLVSLLNMLEKSSGSDPVFLKRPRSKPKMDPELKRMMADQKKQQRALDRLNDLYLYSDDSISEREYLVRKQQITDRLQEINEAIGMMSQEPWMRTMNDEEFIRQASSFILTQKLADKQYIYYENLAESLDPEILKNFFVSILDSIILRDGRPETVVFRNGLSHTFTYKDS

SEQ ID NO: 26080 - protein, 578 aa, synthetic construct
MRKVSKIEPISPSLPTRKKVSAYARVSMESERFNHSLSAQVSYYSKLIQSNPEWEYAGVYADNAVTGTKSSSREEFQRMLEDCESGKIDIILTKSISRFARNTVDLLETVRHLKELGIEVRFEKEHINSLSGDGEVMLTLLASFAQEEVRSLSENVKWGTRKRFEQGIPNGRFLIYGYRWEGDHLVVEPEEAKIVRLIYDNFLKGLSAEATEKQLEEMGVKSMKGMHFPNSSIRAILKNITYTGNLLFQKEYTLDPISKKTRKNHGELPQYFVENTHEAIIPMKTYQAVQAEIARRRELGALANWGINTSCFTSKIKCGLCGASFVRNTRKNRAKTSQLGERYTFYGCGTNKRKGEHCSSGTIREDVLKEECAKVLGLPEFDEETFSERVEKITIPATGTMLFEFTDGTSIEHHWSRNAKKESWTAERRKAVSEYRRDRDTGWKCYHTFTHFIKCGRCGANYRCQTHKRVDGTVVRSWYCSSPTAVGCSKVGIREDTLKALIADVMGLPEFDEELFNQQLAYATVPADNQIVFHFRDGHEASRTFVQKRQMPRQTEERKKHMSEVMKAKWRERHAEND

SEQ ID NO: 26081 - protein, 471 aa, synthetic construct
MLADYLEKIRTKTNVLVLKAVIYARYSSDMQRSESIAAQIRFIREFAKNNNIIIVSEYIDEAQSAKRDDREAFQQMMKDSKSAEWQIVLVHKLDRFARNRFDSATYRIHLRKNRKYLISAVEQFDDSPESAMLEAVIEAMSEYYSKNLAREVMKGLTENALKGKNCGGTPPLGYDLDEHKFYKINAFEAQGVKLIFKLFLDGKTYSEIISILNAAGYRTKCNRLFSRNSLYEILRNEKYKGIFVYNKTQSRDEITGKRSGHRYKSEDEVIRINGVVPQLISPEDWDVAQSILNNRKKAYGNNAKETYLLSGKIKCGKCGGSYVGRRVFNSCGVKYIYYACNEKRNPNFKCDNSSVRRDWIEDMVVKKVKEFVREFNGKYFEDIQSEYIKEVTDCKKKEIMALRSKLNSIDADIQRLVDAISKCSLESLINKLELLEQQKKEIQADIDKFEIPDNNFSIEQIKNCYLKQNKC

SEQ ID NO: 26082 - protein, 464 aa, synthetic construct
MNSTYFRPQPELFGLRVVKYIRCSHDGQVLHGDTLEAQDALLDEFIKVNRMILVDTFVDEALTARKKFTRRKEFVRLLDGVRAHNFDMILFTKLDRWFRNIGDYHKIQEILEANGVQWKAITESYDTTTTNGRLHINIRLSVAQDECDRDSDRIKDVFSYKLKNKTYLSGSLPRGLKLDAEKHVVIDPEWHQFALDMFDHFESTCSKRGTQLFLQEKYGIRVCYDTVVRYLRNPLFMGQYRDDPEFCEKTISRERFEHIQNLAIRNVRIRHTQQFYIFSGLLICSSCNHYMTGTVTYRTLADGKEKTYKSYRCNFKAQSKLCDRSKHYREEYVEEYMLQHIRPALSSYVADFEVTAAAAAKKDPAIEIAKVERKMKKLYDLFMDDLIDKASYRSEYEKFQSQIDKLRSCPAAPVRNLDSIKKMLSDDWETVYHTFSDQEKNVFWKSFVQSITVHEDGEMDIVFL

SEQ ID NO: 26083 - protein, 581 aa, synthetic construct
MSRTTNKRPGNAKSGLSRKQKVAIYIRVSTLYQVDRDSLPMQRKDLIAYASLILGIEEYEIFEDAGYSGKNTDRPAFQEMMQRIRKGEFTHVLVWKIDRISRNLLDFAEMYEELQDLRVTFVSKNEQFDTSTAIGEAMLKIILVFAELERNMTSERVTATMISRANNGLWNGGRIPFGYVYDPDKTAFSIREDEEKVCQMIKNDYMEHKSLVHTSRMLNASGYKTRAGVEWSPTAVWIIVSSPFYAGIYRYNRYKGTERRVENPEDEWIMIQNHHPAIFSLEEHEKMLAILDENSRNRRSVGQRHQTERVHIFGGIAYCGKCGSKMVSTPGRLHVNGYRPTNYSCPKHRKTKECDNPTVSDTQVGEFVINYILNMLGAKKKFSTIENPEDLERCLLYGNTFSEVEHIDSNGLNEYFNLLSRYSSDDSYTFSVKKSRKKKAEVDPEVAALRKEKEKQERAMKRLQDLYLYSDTSMSEKDFIIRKTEISKRLEEINAMLGMVARNSEPSLSDEEFVRQASHLLISRELQNRQYIYFKNLAQNVSPEILKAYMETVLDSVLLVDGRVSSIVFRNGLTHKFKYKS

SEQ ID NO: 26084 - protein, 506 aa, synthetic construct
MYGMYLRKSRSDDPNEDINDTLAKHEKILFDLADSLNINRKEIMQFKEVVSGENIQNRPEMKKLLEYVMEGVLEGVLVVDSQRLARGDTVDQGTIIRAFSINNTKIITPMKTIDPQNEYDQEYFEFDLFMGRREYKMITRRMQRGRHIAAQEGYYVGSIAPYSYSRIKLEKGYSLEIYEEENIVFNIMKKKALEDEGSTNISNHLNELGYKPRKGEYWTKSAVEAILLNETNLGLIKWNSRKEVKVFKDGKIVKTRPRNPNYELYPGKHPAIMTQDEYDRIKFLMKKRSHPVKKDKTLQNPLAGLIVCGFCNHKMARRPYKNGRVETILCTTSRCKNVASDIHVVEQRIIDTLKDTLKNYTNYVNNYSVSVNKTYDDNKKLQLEECDKELEKLNKQIIKACEMLELGAYTVELFKERKNTLENKINTVNKRKDILAKETEAMKIEQYKKAIPQLQNAIDLYWKSSTEEKNKILKSIIDKCIYKKEKGGRWDPDAIKQFKLEIYLKV

SEQ ID NO: 26085 - protein, 481 aa, synthetic construct
MNTINKVAIYVRVSTNVQAEEGYSIDEQIDKLKSYCQIKDWTVYDVYKDGGFSGGNINRPALEKMIVDAKKKRFDTVLVYKLDRLSRSQKDTLFLIEDVFSKNDISFLSLQENFDTSTPFGKAMVGLLSVFAQLEREQIKERMQLGMIGRAKSGKPMMFTNVSFGYTYSPKTQQLTINQAEAVIVKQIFNEFLGGMSPLRLMAYLNENNILRNGKEWNYQGIQRILRNPVYIGKIKYNNVIYPGLHEPIIDEESYYKAQKLLDARQDEMRIKGKNRQFKAKYMLSGTAKCGYCGAPLRIKIGNKRLDGTRLKVYQCCNRYPRKYAVVTYNDNKKCNSGNYQKEDLEQYVIAEIRKLQLKPEKIDKLFNKVSKIDTVQINKQIASIDNKINRLNDLYLNDMIDIDKLKADAEKFKEQKRVLEKELDKDLKIQEQEKNKEDFKKTIGFKDVTKLDYEEQSFIVKSLIDKILVKKGFIKILWKI

SEQ ID NO: 26086 - protein, 529 aa, synthetic construct
MSRYCIYLRKSRADLEAEAHGEGETLSRHKTALLELARRKGITISATYEEIVSGETIAARPQMQRLLSEVGAGEWDGVLVMEIERLARGDTMDQGLVAQTFKYSGTKIITPLKTFDPQNEFDEEYFEFGLFMARREFTTTNRRLVRGREASAKEGKYVGSVPPYGYRKVKIPNDKGFTLEIIEEQAKVVRMIFEWYAEGAEVNGQKKRIGPYTIAVRLNELGIKSVAGKDYWTIYGVQHMLINPVYIGKIRWGYRKVKKTVTPEGMKKKSREFAQDGDYIVVDGLHEPILSEELFYKVQDLIAANPPTPIKYRNNNVNPFAGLIFCAKCGHCLSYRKGYGRHPGYLGCNIAGCDNKAAPFELIEQRVLSILNSWVKDYSVDKAQIKHEADLNAELTNAISLAEKEIETLQDQLDKVYSFFERGTYTEKIFKQRSSTIEQQITDIGEKIDRLKAEHQQVLERQNVQAEFVPSIKHLLEIYDTLEPVEKNKWLKQIIDRMVYEKNADGKYRNVDPGDFTLGILPRLPKKGS

SEQ ID NO: 26087 - protein, 465 aa, synthetic construct
MKGNAGDTIVKKIDLSPELVRVALYIRVSGEEQKIKGLSLEAQQERLEAYARERGWVIVGIYIDAAKTARKNIHKRTDFQRMMDSVKRDEVDILLFCRLDRWFRSVADYYKIMEVLEAHNCDWKTTDEEYDTTTANGRLYINVKLSIAQNEADIDGERIDVVFDSKIAHGTVVSGSAPFGFRVNEEKRLEVVPEDAAIVQDAFNYFETSISQRATVRYIRETYGVNWCDATFRRMLKEKLYTGVYDRGGRFNDHFCPAIISKQQFDRVQALLERNARSVPSGKVYIFTSILTCAECGYKLVGYKSSDYYYYRCNQHFQRGRCSHNHSAREDVVEKWLFEHLAEELERCQLEWEVAAAKKKASVARTDKAALKRKLTKLKELYVNDLIDIEDYKRDYQIYTAALKQIPEPSIEPPPDFAAVRRLLDNDFKTIYENLTREEKRTLWRSVIKEIRIDNDQNITGVVFG

SEQ ID NO: 26088 - protein, 523 aa, synthetic construct
MFFGIYGRKSVYSDKSDSVDNQHRMCNDYIKAHFKADDITLVTSYSDEDYTGANTKRPDLQRLLEDVKSGAINVLVVYQLDRISRDVRDFSNIYAMLEEYHVMFISIKENIDTTTPIGRAMMYVTVVFAQMERETIATRVRDNMIGLAKKGFWTGGNPPYGYVRKNILINGKKHVTIEPDPDGVAYNIWIYDSFLKNHCSLQSMETYFRKEGIKTRNGAFFSTTQLYKILTMPYCVEATPEIYDYFAAKGCQMDPDSPREKWDGSVGVMIYGRSTGVNKKHQLQPPEKWLVCLGLHKPFMPAAKWLAVQNQFSENKFDKTQKYDIPLLKGILRCSCGSIMAVSRKKKINSEVSSWYYCLRRMKNGVEACDRKQIKVDIIDQKLLNTLHSIEIDPSMIYRFVQKSELPLPDIKTINNKISSIELRIGRLASSLALADGSAASKYIVAEIERLDSDLQFLKRERAVINVEIKKRGELNESAEGKAQHIQNVMKGLNGFTAEEKNRIMRDILKECVWDGSELSIVL

SEQ ID NO: 26089 - protein, 687 aa, synthetic construct
MQSAFFFIPFFGSWRKGLFMAYVRNKKKILKFWSKKKAALYVRVSTRYQVDKDSLPFQRKKLKEYCKFLGIEDFVIFEDDGYSAKNTDRPHFQEMMSRVRDGEFSHLIVWKVDRVSRNLLDFAAMYQELKDHKVTFISMNEQFDTSTAIGEAMLKIILIFAELERNMTSERVTGIMLDRAEQGLWNGARMPVGYRWNPEIKFPEPDPEETKIVQFIFDEYERVRSTTKIARYLNHNQIASKRGGQWTSKLIRDIIRSPFYIGTYRYNLRESGRGPLKPESEWIVRENNHPAIITKEQFDRCNAIMDENGTSRDTSELRARKYVHTFSGRLVCGKCGANMIASKDRARANGWRPSMYRCAQRSRMMDCDNSKTVNESYIGPFIFNYAANLARIQKNFKNIKTLEQLEKELLKGPEFENMKVSKESLRRTFDALAFQEVGKGAYLPDINLSDGDDDYTAAEQLSILKRELDKCKTAIDRLTDLYLYDPDSMTKEEFAKKKRDLVNKIAGYEKQIEVSQATGDKDDLADLEFIRKASAFLVAQRIVSKKHVDYIQMAIDLDNEILKDFVDQVIDRIEILEGRVRSIRFVNGLVHEFTYSTPADLPVCQKCGGRIGSTCGCRTRTFDFAGKPYRRIKVGDPGDKFHGVTGAVCPECSAQAGRWHHWKCGIERCPICGEQLIACEHGPNGKD

SEQ ID NO: 26090 - protein, 570 aa, synthetic construct
MAYRKITDIRDTIGMRAVFYARVSTAEEEQLNAIELQIEENRGCIKDHGWKLVGEYIDRSKSGTMVKGRDDYQRLYEDLYEDLFDIVVIKDQERLQRNTLDWYLFINRVVQTGKLLFMYMDGKFYSPDDALITGVRAIIAEEFSRNLSKKLHNYHDHRIEKARQGQEIALQGSGNVYGWDKKDGKYYINPEQAKVRRLMCEGIMARKGSTLIAKELNDAGYRNTVGKPWKPMDIPKFVYDCKNVGTMIINKERHDFESKQTIKLPKEEWVYVENALPPIVTQEEWDLICKIHEERVIATGSDRRGKKTSGYSFSGKLVCGICGAPYWRKQRVSKDEYWVCSTKQTKGRRTRKRDSTMGKAGEINPLGCDNENISYNSLMEIMGVVSERLQANTDTIKQDIINWLTKLRKQLLEANGGHTEADLQREISRKSKLLDTYLDGILNKQEYQKKAEELDERIIQLKAETEKNKANSGDIAEIDKVLANIDEEVSRYVDGNEKLKVEYLLEHLEQVQIFPDKVIVIVPILSEGIVVEKTQYVSREKRRRKVHNHFNYVWADKKGQRKNSNLRQRY

SEQ ID NO: 26091 - protein, 518 aa, synthetic construct
MKTYTPTDYALYLRKSRADLEAEAHGEGDTLARHEHILMELAKSRALPIGAIYREIVSGERIANRPVMQQLLSEVEDGRWKGVLVTETSRLARGDTIDQGIVAQAFKFSGTLIVTPSKTYDPTQEADEEWMEFGLFMSRQEYRMIRRRQLAGTRASKKEGHYVPGRPPYGYERYKLDGRGWSLRPVEPQAGVIRTIYDMYLSGKGFSEIANELNAMKIRTPLDKKWVPATTRAILQNPHYAGFIPSAMKVNTKIVQKGKLITKRPVNKNCELYEGIHEAIIPRDVWYSVQQRMKDTVTPRVPRKYQQMNPLAGLVYCDQCGKLMSRHPYRREDKVRFGCENPSCSTVSSLFEDVESLVLQSLREFLHEIELSSPTLLDTKSEEIALQNIEKQLTDINHRLQRTYELLEDGVYSKETFLQRQSAISQDQTALLNTKHEIERKLHNKQTDIEAQKNSAPLIRHVLDVYPTLEDPKEQNLLLKQVIRRIDYHKTVRVYGKAKSDLHLTIHPKIAIPQTSNI

SEQ ID NO: 26092 - protein, 502 aa, synthetic construct
MEIQIREGNSGQKQKLKVCAYCRVSTDADEQENSLENQIRHYEEVITSNPGYEYAGVYSDFAISGFKEKRPGLQKMLADACKGKIDLILTKSVSRFARNTSIVLETTRKLKELNVGVFFELQNINTLSGEGELMLTILAAFAQAESESGSIGAKMVYQRKYEAGIPVQYLERSFGFKKDERGVYIADEEEAAWVRKIYEMAADGYTPASIKRCLNENGVKTVGGAEWIDSTVFRLIENEIYKGDYIMHKHFVNEERKLVRNRGEVDAWYIEDDHEAIVSPKLWQKAQDALEAKRDYLAEGSVIEEFTEENYPYINKIFCARCGHPLYKRIYSNGNRLNWGCSGTKRYGKSFCEGINIPDGVLRGAWHFDENMYIGEKQTDKGKKEFTYLKETSWKRRHKKKEPEPIPENTETEYPYREKIFCELCGSRLVRHVNTKNHKVIWVCNGRKRNGKDFCDGTRVPDTIIKGWGEIKKDIYIQRKDDKNGKKRYSYTSKKPKGADRA

SEQ ID NO: 26093 - protein, 464 aa, synthetic construct
MARNVTVIPARSQKVRTGHKAVQEKKIRVAAYCRVSTDQEDQLHSFEAQVEYYTKYINEHENYEMAGIYADEGISGTNTKKREQFKKMIADCEGGKIDLVITKSISRFARNTQDCLTYSRKLKNLGIGIIFEKENINTLDSTGELLFTILSSLAQDESRNISENCKWGIRTKFKNGEMHLNTFKFLGYDKDENGKLVINEEQAKTVRRIYRDFLIGINPAQIAKELTEEKVSGCLGQTKWYPSTVTGILKQEKHMGDALLQKTYTADFLTKRQVRNNGEVAQVYVKDSHKGIIDKETWNAVQEEFDRREKFMQKHGTDRYSYGSDCYPFCEKIFCGECGNLFTRHSWKSRGIVQWQCKNHRKDGKVACTNSYVDNVNLEKGFVKALNILIEEREKYMKRWNAMKSDGTPLEKIRAEQMMETVENDPLKRFVPEVAQLILCEVIVLDAKKYEFTFLEGSRIKVSL

SEQ ID NO: 26094 - protein, 521 aa, synthetic construct
MSNITIIPARPQRANSQQNETEKPKLRVAAYCRVSTDSDEQATSYEAQVSHYTEQITRNPEWAFAGIYADDGISGTNTKKREEFNRMIADCMDGRIDMIITKSISRFARNTLDCLKYIRQLKGRNIPVFFEKENINTLDAKGEVLLTIMASLAQQESQSLSQNVKLGLQFRYQRGEVQVNHSRFLGYTKDENGRLVIDPEQAEVVRRIYREYLDGYSTDKISAGLERDGILTGAGNPRWHTSTVAKILRNEKYMGDALLQKTYTVDYLSKKRIKNNGIMPQYYVENDHEAIIPKEIFMRVQDELVRRRLVKVSPNGRKHGFSSNHVFSQMIVCGECGELLRRVHWNNHGCRSIVWRCLSRLQPTGVICHARTVNEEVLKNVVVQAFNELLGSKSAYQKRLQDNLAAVLRGYEDEQALKIDKRLAELQQDLINHASRKEDYNDIADEIFRLRDMKQKNFTDTAVRNEQVKRINELNEFIEQQDSELTEFDESLVRRWIKEIIVWDERFSVELKSGVRVEIEI

SEQ ID NO: 26095 - protein, 521 aa, synthetic construct
MKTVTKIESNQRTTGSEKKLRVAAYCRVSTGSDDQLESLAEQKKHYETYIQVHENWNFAGLYYDEGISGTKKEKRSELMRLLSDCEAGQIDFIITKSISRFVRNTTDCLEMVRKLLAVNVAIYFEKENINTTSMESELVLAVLSSLAENESVSISGNEKWSIRQRFQSGTYKMNPPPYGYRWNGEQLEVNNDQAEIVKRIFAEFLSGKGVMHIARNLDSDNIAPARVKQWCQSSILRILKNENYTGNAVFQKTFTDESFRRCVNYGQLDKYLVADHHEGIISKADFESASALIDRHSVEKNVTKGSHKYQLRYCFSGKIVCGECGATLKHRTHRLGGETYEAWCCSTHIYNKEGCSMKFIRDDDIKLAFVTMMNKLVFGHKLILKPYLLTLRSSSTDSSIQRIQQLRLLIEQNTGQQETLTRLMANGFIDRALFGRELNAIMAQTDEYRAEIDTLSSSVTGDGAKLKETERLIKLVERGRIFTEFDADLFSKLVDRICAFSRNEIGFVLKCGLTLRERIGE

SEQ ID NO: 26096 - protein, 523 aa, synthetic construct
MAVSRNVTVIPAIKRIGNNKNSESKPKIRVAAYCRVSTDSEEQASSYEIQIEHYTNYIKRNKEWELAGIFADDGITATNTKKRDEFNRMIEECMAGKIDMIITKSISRFARNTLDCLKYIRQLKDKNIAVFFEKENINTMDSKGEIMLTIMASLAQQESQSLSQNVKLGIQYRYQQGEVQVNHKRFLGYTKDENKQLVIDPEGAEVVKRIFREYLEGASLLQIARGLEADGILTAAGKSKWRPETLKKILQNEKYIGDALLQKTYTIDFLSKKRVKNNGIVPQYYVENSHEPIIPRELFMQVQEEMVRRANLRGGKGGKKRVYSSKYALSSIVYCGQCGDIYRRVHWNNRGYKSIVWRCVSRLEEKGSECTAPTINEETLQAAVVKAINELLTKKEPFLSTLQKNIATVLNEENDNTTDDIDRKLEELQQQLLIQAKSKNDYEDVADEIYRLRELKQNALAENAEREGKRQRIAEMTDFLNEQSCELEEYDEQLVRRLIEKVTVFDDKLTVEFKSGVEIDIEI

SEQ ID NO: 26097 - protein, 519 aa, synthetic construct
MRNVAIYVRVSTMHQAEQGYSIDSQLVDCRKKAHDLGAITINEYVDKGKSGAFLDRPELQRMLNDIKTEKEYYDALIIYKLDRLSRDSMGLAYIIKILQQKNIKIISTDGAQYGTNPQDVLTMQIMGSIAQFDNALRKERSIRGKIEKRKQGKLDKITKYGYTFNDEKQNLDIKEDEAIVIRKIFKWFTEDNLSAFRISKKLNSEKIPAPQPKINRKIINKDNIWFESTIRTMLKDETYAGIRHTMIYKFEKISLNNMKKTKRPPEEWISVPVPSIISRETWDKANNIMNRKNTNPRRTQRTWILQGLVFCEKCGQIMNIKQTPKIGKIKENEEKYNFYFKCRTNILNWFGSDKKCPNRQVPIYALEDSVWETLLNIFYSKETLEKYLKETQLKDNVYNLLDKLIEDRNKLSKNKNKIVEWFADGKIDQEIADNKINDLNNKINDLDKKISNLQSTNKSKKSFSINNLYDIFHKIKNPNREQKKEIIHSIVEKIFVERLDNKRSNAYTKPVLKIRIILR

SEQ ID NO: 26098 - protein, 463 aa, synthetic construct
MNNVAIYCRESTEKQNIDTLVSLCEKEAKKLGYSDYKIYKDIKSGYSKDREEYTKLKEDIKDEKINVVILYESSRITRDEIEHHMFYALLKLYNVKVYTLNHGWIDLTNEDDCFLAGLLNLLDAREGRKTAKRVKDRMEEMAKNGFWTGGPAPFGYKLVDKKLIIEPEEAEKVREIFKLFLEGKTRFSLSALFGFECKRVMRMLVNPVYNGKLKFRQIEFKNKKRIEHKQFDILPGIHEPIIDDYTFKLVQDKVKNIKRETNKDTYIFKDLLICACGEKMYLYKKKYFYKREIPEITNTYLCKSSNKKIRNCSLSYVREEKLFLNVMESLENLILSFAINDIDTNKDGFEKQLRYYQKELSSLSTKEEILVRQLMNGKLSEKLYEKFMSELSENKEFIENKINSLTKVINSREAKKNNKIILKKYFNKIKKEKDPEKLNAFFKLIIDSIEFINDYRFYIHLKF

SEQ ID NO: 26099 - protein, 520 aa, synthetic construct
MKRITKIEENNALSVKTKTRVAAYCRVSTASDEQLISLDTQKAHYEDYIKSNSEWEYAGVFFDEGITGTKKECRDGLNSLIDSCEKGLVDLVITKSISRFSRNTTDCLELVRKLMALNVTVIFEKENINTDTMESELMLSILSSLAESESVSISENNKWSIQKRFQNGTYIISYPPYGYENAGGEMIVVPEQAEVVKKIFEDTLAGKSTHAVAKELNDSGVRSKKGGKWTPGAINAIIRNEKFTGDVIFQKTYTDSQFSRHTNDGELNKYLCENHHEPIVSHEIFEKANEVLNQRGKEKGNGERTERYQNRYGFSGRIKCGECGGVFKRRIHYKPSGSYIAWCCTHHIEDRNSCSMKYITDDGIKTAFLTMMNKLIFAHQMILKPLLHSLQGFDDKDRLLQIQEYETKLEKNMEKRQVLTSLMAGGLLEPALFSKENNALILEEKHLQEEKKQMINSVSGDRTKIEALETLIKFASGSEMLTEYSDEIFLSYVEGIIVLSREKIVFELKCGLKLKERLVG

SEQ ID NO: 26100 - protein, 506 aa, synthetic construct
MPKKEANQPIKAVLYARYSSDRQREESIEGQIRVCEDYAKKNNMVIVHTYADRAMTGRSDQRPEFQMMIQAAATQAFDVVLVYKLNRFARNRYDSAKYKHKLKKYGVHVVSAMENIADDPSGILLESVIEGMAEYYSAELAENVMRGMTENALECKWSGGLVPLGYKLDADHHLVIDEAGAQIVRRIYQMVLDGRTPTGIINELNAANCRTSTGRPFGKSSLTTILRNEKYIGTYTWNHIQKENAIPAIIDRKTFEAVQKTLQYMKNNHVKVCSENFLLTGKLFCGQCGSNMVGTSGTSKYKNTYYYYACTKHLKKDGCTARNIRADKLEELVCSVTTRILSSKEAVHAIARQAVEAQKKQKESLTVQSLKNQAAEINKKLKNCVQAVESGLISVTITNHIKEYEKRLTELNEAISREELLSGKLKLTEKHIEFFFYSIAQKIKTADKYKSILLSSLVRCVIVYDDYIEIQYNYKNELPLLQNPVRVKSSNLNGMVTQERFELPTP

SEQ ID NO: 26101 - protein, 527 aa, synthetic construct
MIKAVIYARYSCDNQREESIEGQLRECKEFATRKGYTLVGSYIDRAMSAKTDNRPEFQRMIKESAKELFDVVIVWKLDRFARNRYDSAHYKATLRRNGVKVVSATEVISEGAEGIILESVLEGYAEYYSAELSEKVIRGMTENALKCQYNGGYIPVGYKVDENKHYQIDELTAPFVKEAFLMYVNGRHIKKIVEYFNENGIRSSRNKPMTKTTVSTILQNRKYIGEYQYRDIVVSDGIPAIISRELFALAQQRTEQNKYAPSASRSEIKYLLTGKLMCGDCGSVYAGESGTGRTGQKYHYYKCVKAKKRDGCERKAIKKDEVEEAVIEATVENIFVDEVIEEIADRVISWQEKESTLVPLYQRELAEVEKSIANLLSAIEQGIITSATKNRMAELESLKIDLEVKIAREEIQTQILTKDQVKFWLKNMEKLDLASIDNRQRIINTFVNSIYVYEDRFEVNFNCREGFETIPLDIERFVSRLEIVGEPYLCNKIDAHLEKLVFTSFFCVLRVKISGVKPWMLFRKKRI

SEQ ID NO: 26102 - protein, 521 aa, synthetic construct
MKKVTKIEGVQNNSTQKKKLRVAAYCRVSTGSDAQLESLEAQKTHYERYINSREDWQFAGLYFDEGITGTKAEKRPELLRLISDCESKKIDFVITKAISRFSRNTTDCLALVRKLQSLDIPLFFEKENINTGSMESELFLAILSSMAEGESTSISENAKWSIKRRFQNGTFKLSYTPYGYDWNGENIVVNPEQAEIVKKIFADVLSGKGTQAIADELNADGIASKKNSKWTATTIRAILANEKYTGDVIFQKTYTDENFNRHINYGEVDQYMAPDHHEAIISHADFDTANALVSQRALEKGVKKGSDKYQKRYAFSGKIICGECGDTFKRRIHTCTTYKYVAWACNTHLKDKSTCHMKYIRDDDIKATFVTMLNKLIYGHRLILVPYLKALENSSGDEAVQRIQHLERLLEQNSEQRETLTKLMAQGYIDQILYNQETNALLLQAETYRSDIEAITICMTGDTAKVTETNLLLHFVSHAEMLTAYSEELFESYADHIEITGRNEIKFVMKCGLTFTERIGD

SEQ ID NO: 26103 - protein, 550 aa, synthetic construct
MRAFIYCRFSSHKQQELSIEGQRDICQEYADKHNITVVGQYADRARSGKTENRADFRRLMRDAATGVVDCVLVWRYDRFFRNRAESALYRKQLEAAGVHLISVTEYIPEGSAGIITQGMIETVAEYFSAKLSEDVSRGMNKAAQHCQIVGRAPLGYRAGPDKRWQIDPVGAELVRRIFEWYASGKAMGQLAAQLNEEGHRTTNGTLYTRSSFNSILRNEKYIGVYSYGGEVRIEGGCPRIIEDELFFTVQRRLSANRHRPGAYKAEVPYLLSGKLFCGLCGAPMTGTAGTSHTGARHYYYICNNRRAKTCKKKNVRLDLIEEAVLQSALDILTDENIAYISAEVERRCAENSDSAALLASLNAQLEEVQRRLKNIGNAIAQGIITETTKELLEEAEADRTALRQQIDRAKVQAALVVKAEAVACWLDGFRRGDRADPDFRRQVFGALVHSVFVYDDYLKIIFNVDSAGAAVVPYEAAQAATPSEAPPGSYLDTLGAPQNTSQEVAGYFLLLFSGKAGAWCAIGGEKSSCISGCQKNSCRAGHCSPMPVCL

SEQ ID NO: 26104 - protein, 581 aa, synthetic construct
MYGLNSDFQKRDVAIYARVSTEHEAQLSALENQIDWYKPILEARPDWTLTAQYIDEGITGTSAEKRPRFMQMIEDARQRKFDMIITREVSRFARNTVDTLQYTRLLKEYGVEVFFINDNIKTFDGDGELRLTIMATLAQDESRKTSIRVKAGQQTSMQNGVFYGNGNILGYDRVGKEMVINPEQAKTVRMIYDMYLSGMGVTAIQYELEKAGRLTAMGKERWFSSYIAKMLRNSFYCGIITYHKEYTPDFLKQKKIKNYGDLEYVQVQGTHEPIVTVEEYEQVQKLMDAKSVVMKNHNKGKRRVGRMQHTTAFGRLMICQCGNKFNLRFHSRDGRTDGVDYQCYTSVNRGSVAKRLNKGISIEHSCESPYIQGWKLEMMAEQVFDRYIENADKVMDLSYAMLEKHIADQEELPDNTDVIQRKQGEIEKLMNKRTNLIEMRAEGDIDKEMFRSKKQEIEDRVAKLTEEIKGLQPEKEPTSNEDYSAKLLELRERLKEYTGFDYSVIPESIVEAFVERIWVSKDEFRWYLRTGSKEKGEFDPDNHIKIGSFTLTIDDAKKYIYSFSTRRRVYKWVDLNVSVWI

SEQ ID NO: 26105 - protein, 521 aa, synthetic construct
MKRITKIEGNMANSFIKQKTRVVAYCRVSTDSNEQLVSLQAQNAHYETYIKANPEWEYAGLYYDEGISGTKKENRSDLLRMLSDCETGRIDLIITKSISRFARNTTDCLEMVRKLIDLGVHIYFEKENINTGSMESELMLSILSGLAESESISISENTKWAIQRRFQNGTFKISYPPYGYQNIDGQMIVNLKQAEVVKYIFAEVLSGKGTQKVANDLNQKGIPSKRGGRWTATTIRGILTNEKYTGDVILQKTYTDSHFNRHTNYGEENMYLVENHHEAIISHEDFEAVDAILNQRAKEKGIEKRNSKYLNRYSFSGKIICSECGSTFKRRIHSSGPRKYIAWCCSKHISNITECSMQFIRDEDIKTAFVTMMNKLIFGQKFILRPLLQGLRNQNNAASFRRIEELETKIVNNMEQSQVLTGLMAKGYLEPALFNKEKNALEAERERFLAEKDQLTRSVNGNIAKVDEVDRLLKFATKSKMLTAYEDELFEDYVERIIVFSREEVGFELKCGITLRERLVN

SEQ ID NO: 26106 - protein, 523 aa, synthetic construct
MAVSRNVTVIPAIKRVGNNKNSESKPKIRVAAYCRVSTDSEEQASSYDIQIEHYTNYIKKNKEWELAGIFADDGITGTNTKKRDEFNRMIEECMAGSIDMIITKSISRFARNTLDCLKYIRQLKDKNIAVFFEKENINTMDSKGEIMLTIMASIAQQESQSLSQNVKLGIQYRYQQGEVQVNHKRFLGYTKDENKQLVIDPEGAEVVKRIYREYLEGASLLQIARGLEADGILTAAGKAKWRPETLKKILQNEKYIGDALLQKTYTVDFLSKKRVKNNGIVPQYYVENSHEPIIPRELFMQVQEEMVRRANLRGGKDGKKRVYSSKYALSSIVYCGQCGDIYRRVHWNNRGYKSIVWRCVSRLEEKGSECTAPTINEETLQTAVVKTINELLANKEPFLQALQKNVATILNEENDNATNDIDSKLEELQQQLLIQAKSKNDYEDVADEIYRLRELKQNALVENAEREGKRQRIAEINDFLNEQSCQLEEYDEQLVRRLIEKVTVFHDKFAVEFKSGVEIDVEG

SEQ ID NO: 26107 - protein, 548 aa, synthetic construct
MNVTRIPKKTISVIEPKRSLIVNKEQYHQRRVAAYCRVSTDSEEQLTSYTNQKKVYTEMIAAKPEWEFAGLYADEGISGTRADKRPQFQKMINDCLAGKIDYIITKSVSRFARNTVDCLDHVRMLRARGIGIYFEEQNIDTLQIDSELYLVIYAGFAQSESESISKNVTWSFRKRFQDGKPVFNYKCLLGYRKGEDGEPEIVPEEASIVERIFNMYLSGETINRISTKLREENLQIPGKRFSFSASMIKGILRNERYCGDSILQKTVTIDCIGKVRRKNTGEAPMYYVQNSHVGIISRELFHKTQEELARRMSREPNSTKAATTATGKYSRYALSNVMICAECRSRYKRVTWTSRGKKRVVWRCINRLDYGKRYCKSSPTVDEEALHAAIVRAVNRFNEEDEATYLALMRATIGEAIGLNGNSDEIDLLRRKIDGLNRKMVSLINESVESGEGIESHEAEFKELSDTIELLQGRIKKLEDALLSDQGNDGRILQLQQIIADRASRKMEYDDTIVHQMIECVKVYPDGRLDIIFGGGYLIEEALNEENK

SEQ ID NO: 26108 - protein, 513 aa, synthetic construct
MPQAKLISPITRQEIRKVRVAAYCRVSSNSADQQNSYANQIRVYTSLIQRKKEWELVEIFADEGLSGMKAQNRTEFQRMIKMCEQHQIDLIVTKSVSRFARNAKESLEYVRKLKLLGVGVQFEKEGIYTLALGDEMLLNTFSAIAQEESKAISQNQRLSIVKRMQSGEYVDSNAPYGFRLVEKALVVYEPEAAIVRMMFENYLSGQSTSEIARDLNSRGIKTKTGKSLWRSTKVAYILGNERYCGDCKYQKTYRDTTVPFKQFRNRGQEDMFYASMTHAPLIDRETFDKVQTLLKKRQDIFGKSTAQNIYPLTSRIQCSECGSYFRRRQVSGTAKWGCSKHIQDRTQCDSNYYSEDRIYDAFIAMVNKLRFSEYDILGQTLLRLESAELKQKRKNTAAREISRSIADLNAKLVMVEQLHAKGYLKDEVHKAQVQDINDQLRQLKRERQCEFSSGITDIIEEVTRLKKLLEELEEPLDRFDEKLFAEIVQAIRITRRDEMTVTLIGGLRFTEML

SEQ ID NO: 26109 - protein, 487 aa, synthetic construct
MPDRDLKIAAAYIRVSTDDQEEYSPDSQLRLIREYAKKSGYLLPEDFIFQDDGISAATARKRPAFNRMIALAKEKERPFDVILVLMFSRFARNREESVLYKGLLRKQGISVISIKEPAVDGPFGTLIESIIEWFDEYYLINLSTEVRRGMTEKFLRGEAMGTAPFGYRIDSANKTFVADPERAEIVRSVFRAYAGGAGFRDIAVELGAMGVTTNRGNPPDNRFVEYMLRNPVYIGKIRWTPDHKTRYSRVHVADGVEVVDGKHPPIVSMELWDAVQRRIDQRKAAYGKYQRQTAADWMLRGMIRCSACGATLILSGKNSPCPSLQCHNYAKGKCSTSHALSLRKANAAVLAGLQDAVDRLDFDMVPRRSAPVKSAAAVDYGRLLEQERRKLSRCRDAYQSGVDTLDEYRENKARLESNIRRLEEQAAGMVALRKDFDKAAYAKKVASVIRYLQTDADEAAKSEALRSVVDHITFHKASQHLAIYFYT

SEQ ID NO: 26110 - protein, 560 aa, synthetic construct
MINRYERLNQELKMVETKRKVAAYCRVSTDNEDQANSFESQQRYFRQYIERNPDWELYEIFADEGISGTNTKKRKEFNRMIACAKNGDFDLIITKEISRFARNTLDSIYYTRELKKHGVGVIFMNDNINTLDGDAELRLAIMSSIAQEESRKTSERVKWGQKRQMEQGVVFGRSMLGYDVDGGKMTINEEGAKVVRLIFHKFVNEGKGTHVIARELREEGISPMRVKEWSNTVILRVIRNEKYCGDLVQKKTYTPDFLSHEKKYNRGQEEFVIIKDHHEPIISRELFDEANRILDAKSLSQEGKAKHSNRYPFSGKIKCGCCGSSYVARYKTRKDGSRYKAWRCNEAAKHGSPHIDKAGNQVGCTGLSIRNEDATHIMYLVTKSLKYNRNKIINNLTAVIQSIIAMDTTGTDVLKLQEQIKKIEGKRANLIDLYMSNLINKDEFTATRASCDAEIEELQSIIESVDKQREMIEQQQQRLKEIEDAIKEIVSGVEYEDEFYKHILDKMVVQDKDNIDVYLNLLPMKWSYTVAKASKKAVASEWNISEASLPMSVSRAFSSG

SEQ ID NO: 26111 - protein, 495 aa, synthetic construct
MDKVQKYLIYARVSPRGSDFEGDTSIPMQIEYCQEFIRGQHGEVVKVVSDEFASGKDMHRPAFQGVIDELETGTVEWDCLCVYNLSRLTRAPKDMYYIMELLGSKGKRFASATEPDFDFSTLHGELLMGIITHVNQYARKISAKGTRDRMLNLARNGYWPSGRVPFGYCRRSHKDNTLYIDPRKAAIVRDIFESYAADIRPIDLMHKYPEINRAQFFRLLQDQNYIGKLEWGGLCVPGKHDAIIDPDLFQRVQEKRAEKKDGPRPKAQKYNYLLTGLVYCHCGRLMTPASANSRSGKYHYYQCTDTINCKTRVSAERLEEAALDRIRDIKPDPVAIRVACEEVERERRKYLEEEIKPSEENVRIALRTAKAEQDKLIALLVNDNLSPATLTVLDKKIGAISQEVERLTGKLAFYEDQKSQIDSASFDMAGTVISMLERLVQAANASHDPEMLKMVYKTYLDKIQNEKNEHYRFFFKFPSCSSKSNKWWAVRDSNT

SEQ ID NO: 26112 - protein, 505 aa, synthetic construct
MNGVIYARYSSENQREESIDGQLRECTAFAQHNDIQIVGEYIDRAFSAKTDNRPSFQKMIKDSAKGEFDVIIVWKLDRFARNRYDSAHYKNILKKNGVKVVSATEAISSGAEGIILESVLEGMAEYYSAELAEKVSRGMKENALKCKYNGGSVPLGYYIDESKHFQIDSSVAPFVVECFEHYADGMTMKQLRDELNMKGVKNSRGGKLSIDVISRMLTNRKYLGEYTFQDITIKDGIPAIVSTSLFEKVQDRLTKTKKAPSSHKADDDYILTTKLFCGKCKSFMVGESGTNAQGKKYRYYKCVNHKKHQGCDMKSIRKDLIENMTIKYIREFLNDEDLINTLIDLAYDAQHKENEQLPLLRKQLAQTEKSIKNIVDAIEQGISTKSTRERLLDLEQRKNDIEMSISKESIENPMLTKKQFKFWFDQLKKLDISKSEQRQKLVDLFVNSIIIYDDHIKFFFNYKEHTETITFDELNNCSDLPDSPRPKKEIPDERYLFLFISIYKT

SEQ ID NO: 26113 - protein, 463 aa, synthetic construct
MSFFTPNPQLFGLRVVKYIRCSHDDQVLHGDTLEAQDLILEDFIKVNQMILVDTFIDEALTARKKFNKRKEFVRLLDGVKAHAFDLIIFTKLDRWFRNIGDYHKIQEILEANGVQWKAVTENYDTTTTNGRLHINIRLSVAQDECDRDSDRIKDVFAYKLKNKTYVSGSLPRGLKLDAEKHVIIDPEWNCFALDMFDRFEATCSKRDTQLFLQEKYNIRVCYDTVARYLKNPLFKGQYRDDPDFCPATISPERFERIQKLAIRNVRIRHTQQFYIFSGLLICSSCNHYMCGTVTYRRMADGSEKMYKNYRCNFKAHSKLCDRGKTYREADLEEYMLAHIRPALSDYIAKYEVTAASAVQKNPVTEIAKIERKMKKLYDLFMDDLIGKEAYRSEYGKFKAQIEELQKCSTAAPMRSLDSVKKLLSEDWEAVYHTFSDQEKNTFWKSFVESVLVYEDGSMDIRFL

SEQ ID NO: 26114 - protein, 523 aa, synthetic construct
MAKSVTTIPATLSRFTAAPINSTKKRRVAAYARVSTDNEEQLTSYEAQVDYYTNYIQGRDDWEFAGVYTDEGITGTNTKKREGFKSMVADALAGKIDLIITKSVSRFARNTVDSLTTIRKLKEHCVEVYFEKENIWTFDSKGELLLTIMSSLAQEESRSISENCTWGQRKRFADGKVTVPFKRFLGYDMGPDRNLVVNPEQAKLVKRIYGMFLLGKSPFQIASTLTEEGIPSPGGKDHWNASNIRSILTNEKYKGDALLQKTYTFDFLTKKKKTNEGEIPQYYVRDNHEAIIDRETFEMVQALMATRTKGNNRRSCVSVFSSRIMCADCGGWYGPKVWHSNDPYRKVIWQCNHKFDGQKCATPTLTENEIKELFLRAANQVIDQKEQFIAIYEQVLSRSLDTTALESELSDLEAEINIAAELIEECIKENAHVALDQAEYQKRYNGLVARFDKAKARHTEVTDLIAERTGRRHQIETYLKELRSREPLTEVRETDWLAMVDYITVHSKKDIRVTFKDGTEIKA

SEQ ID NO: 26115 - protein, 590 aa, synthetic construct
MKTVEKIERKLPVLKARKRVAAYARVSMESERMQHSLSAQVSYYSALIQKNPEWEYAGVFADYGISGTGTKKRDEFNHMLAECEAGNIDIILTKSIQRFARNTVDLLNTVRHLKELGIEVRFEKEKINSLSGDGELMLSILASFAQEESRSISENVKWGTIKRFKQGIPNGKFSIFGYEWQDDKLVIIPEEAEIIRWMYAEYMKGASRIEIGRALMDRGIYTRQGKPWVDSNVKVILTNITYTGNMLFQKEYCEDPITKHRRKNYGEMPQYFVEDTHEAIIPMDEWQAVQAEFKRRRDLGPFGNKSLKLSAFSTKITCGCCGKHYRHSGKRNTAGEVYYIWTCQTKNQKGASACPSKNVPEKMLQNAAAEVLSLDKFDEDAFSQQIEEVIVIGDDTLTFRFYDGHEVTTKWQSTAKTDWWTDERRKLWGERHKRKDTNPNRNTFYEFTGFIKCGCCGANYRCQSGKRKDGTPTRSWYCTGPKDQCHNPGIRDETMKRLVTDVLGLGEFDEAAMDAQIEKATILDHTVTFHFRDGHIESRDFLDKRHGTPWTEERREKARESMKAAWTGERREAMSERIKKIRSEKKWPNP

SEQ ID NO: 26116 - protein, 489 aa, synthetic construct
MLKTVIYARYSSDKQNEQSIEGQIHECEQFAKTHDMVIIKHYIDRALSGKTDDRPSFLQMIKDSSSGLFDAVLVYKTDRFARNRYDSAVYKAKLKKNGIKIFYAKENIPDGPEGIILESMLEGFAEYYSAELSQKVKRGIKENIRKGLSFGGACPFGYKIVNKKYVIDDEQAPYVKKIFEDYAKGRRAIDIFNELNTLPNYAGKGRKWNRSSLNRMLTNKKYIGIYELEDVCVKDAIPPIIDEALFNKVQSRILFNRRHTTRAKVNYLLSGKLFCGLCEHSMTGKTGTSKTKAKYHYYVCSHRHCKQKKYHKELLEDIVIQYTVKDILNPKHFKMIAKKCLEIQQADNKTNDMLLILKKQLTAIKTKINNLMNAIEAGIITTSTKDRLEQLEQEKYKLELEISTQQLNSNRLLSEKQIIYMLNVFYNKRVDVSFYNQIIDCFIYKIYIYSDKICIVYNLNNSDKDVTYSDINELYKSSHLNSCGSPYVN

SEQ ID NO: 26117 - protein, 510 aa, synthetic construct
MSYFIYARKSRKDADLEALGIDVLERHITTLLELAKTLLLPIGAIYREVVSGDSIDSRPVMSQVMAEVESCMWDGCLVMDVDRLARGDTIDQGRVQRAFFYSNTKIVTPNKTYDPANEYDNEYFEFSLFMSRREYATIKRRMQRGRERSSSDGYYVGNIPPYGWRRVIAPDGKHFSLAPDPTESPVLDLMYDLCGNKQYGYQKACTHMAEMGILSRSGRPFTPSTLKGIISNPANIGKVRWGHRKTVRTVKDGKISRSRPHSSDYILADAVWPPRISADLFQRANQPKGSCSAPVRDDRPIQNIFAGLVRCSQCGRLMVRKKAHTKTPYDILICQYTECPTVGIRIDELELALLEWLRNYIDKYELTDALPEDVENVAAKEAIVKNFEKEHETLLKQRESLFDFLEQGIYTKEIFIERSNALERRVKECMEHIISAQNDLHATLALQANRKNFVPRCKNLLGEWGRLTIPEKNSALKVLIEKIMFTKTKRNKKGQDRSDFEIDVFPKVPK

SEQ ID NO: 26118 - protein, 526 aa, synthetic construct
MRKGEVYLKKVTKIAKSQDVETKKRKIRVAAYCRVSTSSDAQLESLETQKVHYETYINSRDDWQFAGIYYDEGITGTKKEKRPELLRLMADCKAGKIDFIVTKSISRFSRNTMDCLELVRDLQTLHIPIYFEKENINTGSMKSELFLSLLSTLAENESVSISENSKWSIQKRFENGTFKICYPPYGYDWDGEQMVVNTEQAKVVREIFTMLLSGKSTQAIADDLNQRSVASKRSGHWTATTIRDMISNEKYVGDCLFQKTYSDSHFVRHHNHGEATQYLVKDHHAAIISREDFKTAQSLVRQRAIEKGVIQGSGKYQNRYAFSGKVICGECGDTFKRRMHGYAGHKYVAWCCSTHLRDKNKCHMRFIRDETLKQAFIIMMNKLIFFHKIILFPYVQALKTDPDNEFLKRIQEIHTQLAQTSEKREILMKLLSQGIIDPIIYNKETNELLLQSDTYQKEIEFLNHTVSDSMALVTEATNLLHFVEKASAMTAFDETLFEQFVDHILIRSRNEICFILKCCLTLTERR

SEQ ID NO: 26119 - protein, 522 aa, synthetic construct
MGTVMIIPAKKQMGNTIKKSEQKKLRVAAYCRVSTDSDEQETSYEAQVSHYTEYIHNHPEWVLAGIFADDGISGTNTKKREEFNRMIDECMAGNIDMIITKSISRFARNTLDCLKYIRKLKDKNIPVFFEKESINTMDAKGEVLITIMASLAQQESQSLSQNVKLGLQYRYQQGKVQINHNYFLGYTKDENGHLIIDPEQAEVVKRIYREYLEGYSLEKIARHLENDGIRTGAGKTKWHSSTINKILRNEKYMGDALLQKTYTIDFLTKTRVKNTGIVPQYYVENDHEAIIPKEIFMQVQAELVRRRVVHISPSGKKRNFSSNNCFSQIVYCGECGDLYRRVHWNNHGHKSIVWRCITRLEPTAADTNCTNRTVNEELLKEISLKAMNKILLGSDSFIQQLQENLAKAITKSDTLSPEGIQKRLEELQQELITKASNRQAYDAIADEIFRLRDQKEKAENNLCSQKEVVDRIKELQEFIKKQPSNLTMFDESLVHKLIERITVFPTHFTVEFKSGISVDINE

SEQ ID NO: 26120 - protein, 535 aa, synthetic construct
MKKKQPNTRHGRAAIYARYSSHNQREASIEQQVKACRELAVRLGLDVVETYEDKAISGKSDRRPSFQRLLRDAEKGYFDCVLAWKSNRMGRNMLQAMTNEARLKDWGVRTFYAEEDFDDTAAGRFALRNMMNVNQFYSENMAEDITRGMMDNASKCLSNGALPLGYKAGENGRIVLDKAQAAVVQEIYTRVACREPFVDIAADLNRRGIKTKRGGPWTKSSFYTICRNERYRGIYIYDDVRVEGGVPRIVSDGLFYRVQEVLKVKKTPQSARHHTGAEDYLLTGKLFCGKCGRPMTGVSGTSRSGEMHYYYTCQKRRREHACDKKNVIREQIEKSVAQAIKQYMLTDEMIQHMADATMAYNARQEKDLHLQDLQGQLAAVKTSAANLLKAIEMGVITETTKARMVELEQEQGRLNAQIENARAELVPITRDNFVSLLHIYRDGDINDSKYLASLFETFLVRVDLYDDHFLIWFNPLGQKTPADIPITSIENGDVDEFFDECRSKNVFDWGGKWSTKTKTPAVPRRVFLLWCSVSC

SEQ ID NO: 26121 - protein, 519 aa, synthetic construct
MRNVAIYVRVSTMHQAEQGYSIDSQLADCRKKAHDLGAITINEYVDKGKSGAFLDRPELQRMLNDIKTEKESYDALIIYKLDRLSRDSMGLAYIIKILQQKNIKIISTDGAQYGTNPQDVLTMQIMGSIAQFDNALRKERSIRGKIEKRKQGKLDKITKYGYTFNDEKQNLDIKEDEAIVIRKIFKWFTEDNLSAFRISKKLNTEKIPAPQPKINRKIINKDNIWFESTIRTMLKDETYAGIRHTMIYKFEKISLNNMKKTKRPPEEWISVPVPSIISRETWDKANNIMNRKNTNPRRTQRTWILQGLVYCEKCGQIMNIKQTPKIGKIKENEEKYNFYFKCRTNILNWFGSDKKCPNRQVPIYALEDSVWETLLNIFYSKETLEKYLKETQVKDNVYTLLDKLIEDRNKLSKNKNKIVEWFADGKIDQEIADNKINDLNNKINDLDKKISNLQSTNRSKKSFSINNLYDIFHKIKNPNREQKKEIIHSVVEKIFVERLDNKRSNAYTKPVLKIRIILR

SEQ ID NO: 26122 - protein, 570 aa, synthetic construct
MEVFFTMEKKQKSALYVRVSTTHQIDKDSLPLQRSDLINYTKYVLGINDFEIFEDAGYSGGTTDRPAYQDMMNRIKMGEFTHLIVWKIDRISRNLRDFSDMYDELKKYNVTFISRNEQFDTSTAMGEAMLKIILVFAELERKLTGERVFSVMISRAQKGLWNGATVPLGYEWDPETKFPRPCDKEAKIVQYIFDQYEEIKSTTKVAKKLNIENIPTKRNGTWTPRTVGSILTNPFYIGTYRYNTKTKKTRRWKDKSEWVVLENNHQAIVNTEQFERVSQIIQNNYKGDKNYQRSSTNVHILSGLASCHKCGKKMHSGLDRARKDGFTPSRYTCYAFNVNYTCANYSSDLAILPGLINYIANYMTLQERITARHSLRDMESILLRGKYFEDIDHIEKQDLKNTYDLLINNKMVTYNSFEEKNKEAIISQNVIYEAEKEKYEKALKRLDDLYLYDVNSMSQKDFVIKRKEISDKIETINKKIQEVKFNDTPFINNKDFNLLSKASFYLLTKNLSSVKNIDVISLLNNLDRQTIKDFINTIITDVSVEKGKIYNITFKNGIVHHFIYKNEHKI

SEQ ID NO: 26123 - protein, 572 aa, synthetic construct
MTNEKSYVNIMATNPVLTVAPPKEETEMFGATDKITALYCRLSQEDERAGESLSIENQKSILLSYARDHHMTNPVFFVDDGYSGTNFDRPGFQEMLAQIEAGKVANCIVKDLSRLGRNSAMTGLYTTLTFPKYGTRFIAINDNFDSADPNSVNNDFAGIKNWFNEFYARDTSRKIRAVQKSKGEKGIPLTVNVPYGYMKDPNDPHHWLIDPEAAQVVKRIFTMCMEGRGPSQIANQLRADQVLTPTAYKKQQGLGTPHPLPENPCKWSNSSVVNILERREYTGCTVNFKTFTNSIWDKKQRENPLENQAVFPDTHERIIEDDVFEKVQEIRQQRHRMTRTGRTSMFSGLVFCADCGAKMYYGATNNYKPQNAFFDCSLHWKDKEKCSTHYIRESVLERLVLRHIQMVTDHILHHKDYFVSVMGQQMRLESSEKIQIHRKKLERNQKRIAELKRLFIKIYEDNAAGRLSDERFDMMSQSYEAEQKQLEAETQTLQQEIEVQERQHENIELFIQKADKYVGIEKLTPYALRELIQGIYVEAPDKSSGKRRQTTHIKYDGIGFIPLDVLMNGKTA

SEQ ID NO: 26124 - protein, 569 aa, synthetic construct
MVYWDEQGNTVEISKADQLWLDDGYFKTQQAHLPPDAPRAALSYRVSTKGQVDHNDIPMQKIKCRKFAQQQGWRVVMEKAEKGISGSKVSASKRDVIQELRQEAGNGSFDILLVYMFDRLGRIESETPFVLEWFVQHGIQMWSVHEGQQRIESHGDKLMNYIRFWQAAGESEKTSIRTRDRIRQIVSSGHFAGGFVPYGYRAVDKGRVNKRDQPVKDLEIDPEEAAWVREVFEKVANEGASGYAMARMLNDRGLCTRQGARFQSVNIRRMIRHEGYTGYLITKAARSEFIQELQIVDEKLFARANEVIDCRSKKLAQEKNIAAKTNNPTLLAGIVVCAHCGAKMSAFLHTDRYKLADGTIREKVQAKYNCYQRGQKLRACDGQSLYLAERVDAVVLEVVHDIFRRIQQEPYDRSIEQKLRQENGEQERQKQAAEKKIKAAQYKQKRYEDEVIRCLDGQSRFSEEMLARLIAEAETEVRQAKEEYAELLRNDTTRATIQQIRSYYDEFLGWANEFDLATIPRKRAILGQLIEKVEVGKGYKVTVHLRMSYAQFLGIEGNGEIQVRKDVCA

SEQ ID NO: 26125 - protein, 577 aa, synthetic construct
MRVAVYARVSTEHEAQINALENQLEWYKIECSRHSDWKIVEVYVDQGITGTQAQKRPEFLRMMEDAQKGKFDLIITREVSRFARNTVDTLSYTRELKARGVDVFFINDGINTATNDGELRLTIMSSMAQDESRKISERVKAGQKISREKHVLYGSGNILGYRRENGTYVPDPDQAETVRLIFQMYSTGENGLVKIVNELYRLGRLDAGGHVSWDASKVSRVLHNATYKGCICYNKSHSDGYLTQKRVKNLDESSYIYVKGDFEPLVSEEMWDRCQQILASKSTRVIDENGKKHKYMRNTPKSVWTAKLRCSCGAGFIQFKWRVNRDGAVVHGFQCYRRTRRPSISYLQEHGLDLGISCQIRAICEWKLDLMAAKVFEHLTFDKGKTVKEVYKILNRCMAEEKTVRISRKAMLENSIARQRERLDKYIDLCADGIITKQELAERRKGLDAQIAELQSQYENVEQEDERSGTIDMNLIAQKLDEWQKASRNDVNRELINSCVAQITPLTNEEYRWVLDFQLTEVQSGNSATCTLDGFMEMARFTISFEEAKAFKASRNQGIRKNEWHDLTVAVGIRTKT

SEQ ID NO: 26126 - protein, 532 aa, synthetic construct
MARSAKKIEYAPAEQIGVIYARYSSHNQKEESIEQQIAECTEFAEKNGIRIIGIYADKAVSGRSDRRPNFQRMMRDAEKRHFQIVVAYKSNRIARNMLNALQYEAKLDLFGIKTLYAKEEFGNTAAGRFALRTMMNVNQFYSENMGEDIKRGMVDNANECKVNGMLPLGYVKSKEGKYAIAPDEAAVVREIFDSVLKDVPVAEIARSLNQRGIHTKLGREWNKNSFHIMLKNDNYIGVYRHSGVVVEDGIPPILEKEVFTAVQEKLANKKKTAGRRSANGEYLLTGKLFCGYCGSYMIGVSGTGENGTVHNYYQCQKRHAEGRCEKKNVRRDFIEKLIARLTQDYILQDDTIEWIADSTMSFQAMARRESGVAQLERDLADNRKVAKNIMAAIEQGIITETTKARLLEVEGTIHDLERSLSIAKAASQPIERERVVFSLEQMREGNVGSKDHQKKLIDTFVKSVTLWDDRIQIDYYHTPGKHKFSYSLEELTSKAENESNASDVRTDSLELHQNNIIRTFCRLVMGSDLLFL

SEQ ID NO: 26127 - protein, 525 aa, synthetic construct
MANVTVIPATRNIHTGIRKDAVTKRKTAGYARVSTDSEEQLTSYEAQVDYYTSYIQSRPEWEFVKVYTDEGISATDTRHRDGFNEMIKDALDGKIDLIVTKSVSRFARNTVDSLSTVRKLKERGVEVYFQKENIFTFDSKGELLITIMSSLAQEESRSISENVTWGKRKRFADGKVSLAYSTFLGYKKGEDGQMEIVPEEAETVRLIYRMFMQGKTPYAIAKYLTEQEIPTPTGKSEWRHRTVENILTNEKYKGDARLQKCYTVDFLSKKRKTNEGEVPQYYVEGSHDAIISPSEWQLVQLEMERRRAAGRSNCCSPFSAKLKCGDCGAYFGSKVWHSNSKYKRTVWQCNAKFKGEHKCTTPHLYEQRIQELFLEALSSLMENRDSLIDDCRAVMHVLGDCKAIDREMEEVRSEMEVTTGLIQKLIDENATRKMDQNDYRKRYDGYVSRYAALESRMDSLEKERKEREFKYDIFSGFLFELGEIHELPLAFDDRLFYQLIDYATVYSDGRVVFTFRNGTEITTEM

SEQ ID NO: 26128 - protein, 503 aa, synthetic construct
MAGRITQVTFGSPQLPRDKNVAAYCRVSSGKDAMRHSLAAQVSYYSELIQNHAGWEYAGVYADEAVTGTKDSRKNFKRMLSECRAGKIDMVITKSISRFARNTVTLLETVRELKTLGVDVYFEEQNIHSLSADGELMLTILASYAQEESRSASENQKWRIKKNFEEGKPWSSTLLGYRNVNGRYEIVPEEAETVRMIFAWYLEGAGATAIRNRLNAMGIKTRLGNSWSRSPILKLLRNYAYTGNLILQTTYREDFITKRSVKNKGEKPMYHAQGTHEAIIDMDTFNRVQEEIQRRAEHFASPNGNKSTARYPFTGMVKCSRCGKSYVRSGSPKYRTWTCHTRRKDGLNCCGAEIIPEEELFRLTAEVIGGEVTEDTVRDKITVIRAEKDRKLVFCLRNGQEIVKQWREHEIKYICTEEQKRQISLKNSGRKRTDEQKRQQSERMKEYWRTHEFPEERRRLISEKKKAYWSDGEASAEHREMLRQRMKEVRTMRKNGGKEENDG

SEQ ID NO: 26129 - protein, 617 aa, synthetic construct
MGKKQKTNGGDAVIYARYSSHNQRDVSIEQQVEACRKHAAELGLTVTATYEDRAISGKTDKRPSFQRMMRDAEQHKFAYVLAWKSNRIGRNMMQALVNESRLVDCGVKVFYAEEDFDDNAAGRFALRSMMNVNQFYIENMAEDVKRGLYDNAKKGLVNGSLPLGYKRGADGKPEIDEPKAAIVREIYTRVAAGELFASIADDLNARGIKTARGREWNKGSFHVLCHNDRYRGIYMYGDIRIPGGMPRIISDELFYDAQEAYGMKKDNRYGRARHGAENYLLTGKLYCGHCGGYMVGISGTSKTGEMHYYYACQKHRLEHTCEKKAIRRDVIENAVARAIMMYCLDDETIDFIVDSTIAYFKQKDHELHIEAMENELAAVQQAISNLMKAIEAGIITPTTRTRLLDLEEQQSKLSAKINTAKAERVEINRDDLIAGLQLFRTGDIKNKKFLAKLFNTFLIAVYLYDDNRLKIVFSFTGNHNSVEIPLELDNDCPDSEIVSDETEVRMSHLECRKNLGSSPSSGEVEKDDDCSDGRFVRTAPLPPHQPTSGPFRPEVLFYPDAVQRRISWSTPSVIWQRCWAFRHPPCATMTRKVCCPLWRGHPAASASSAKATSSGCG

SEQ ID NO: 26130 - protein, 522 aa, synthetic construct
MPTSKNTARKYAAGGSSDNSCGVEPLRAVIYARYSSSGQREESIEGQLRDCYEFAKKHGIIVIGEYIDKAMTGRVDRRPDFQRMMKDSEKGRFNCVLLWKMDRFARNRYDSAMYKYKLKKNGIRIFYAKETIPDGPEGIILESVMEGYAEYYSENLAQNVKRGNYDSALELKTLGKTCLGLKTGPDGRYMIDQAEAAIVRRIFEEYAEGERAKDIYERLNSEGYRTSRGGKFNKNSLRRILSNKKYIGVYEYEDIYVENGIPAIITDRDLFERVQKMLKINHDAPARGKAQNFLLTTKLFCGLCGSPMIGDGGTSHTGKAYAYYSCTKRKRGRSCKKESVPKDWIEDLVVGELVKIVHNDELIEQIADRVMEYQKREKDQSGLHALEIRQKENEKAISNMLAAIEAGIITPSTKTRLMELEADRADIEKGIAHELLAEPEFERDQIIYFLERFRSGDINDEAYRIMLVDTFLNSVYLYDDDHLVLVMNYSGENCKVDLKLVEGAVSGDGCKGSAFAPSSALI

SEQ ID NO: 26131 - protein, 481 aa, synthetic construct
MKNAAVYIRVSTDEQAREGYSLDAQLKAIKKYAQNNDILIDSKYIFSDEGISGRKAEKRPAFMEMIKQAKSKPKKFDVILVHKFDRFSRNREDSVVYKSLLKKEYGIPVISISEPLDPDDKMSVIMEAFLEAMAEYYSLNLSGEVKKGQLEKHSKGELQTNPSFGYNVSNNRLIINENESKVVKMIFEQYAIDNLPMMQIAKNVNALNVKTKRGRSFENRTIYYILNNPVYIGKLRYTPGRRNSYDFDDPNTILVDGKHEPIIDLELWNSVQMKLTKNAKWKKTKQHIDLNPKHWAKGLVRCKECGCTMVTCGKNKLRCNGYNKGKCSNSTTLLITDIYELIINNIKQVMKNGKIEHIVPNKKEKKENNQYLILQHQLDQLSDKEIRIKEAYREGIDTIDEYKENKNIIFREKNRLLKELESVEKPKTENKKNEIIENGKKVYEILIDKNISIKEKNEVAHILINKVEYDPNSNTLELYYN

SEQ ID NO: 26132 - protein, 519 aa, synthetic construct
MKKVTKIDKIQPAKNAEDKLRVAAYCRVSTATDAQLESLEAQKNHYENYINSRDDWCFAGVYYDEGITGTKASKRPELMRLLADCKAKKIDFVITKSISRFSRNTMDCLKIVRTLLNLNIPVYFEKENINTGSMESELFLSVLSTMAEGESASISSNNRWSIKKRFENGTYRLSSAPYGYKLESGGLQVVSEQADIVKRIFRELLSGKGMYSIAKELNAEQVPTQKGGRWTSTSVHNILTNEKYTGDCIFQKTYADSNFNRHINNGELNRYLIQNHHEAIISHEDFNATAALIEQRAAEKGIESGSDKYQQRYAFSEKIICGECGNTFRRRIHKGKYNSYVAWVCNTHLSDTNRCSMLFVRDEALKFAFTTMLNKLIFSYRLLLKPYLAAMQSNTADEALLRIQYLENQLDQNAEQRSTLHKLMAQGYIDQILYTQECNELLLQARDFRSEIEALNNTVAGDTTKVYETERLINYCKRGEMLTNFNKSLFELFVDHILIYSRQKIGFVLRCGLTFEEMI

SEQ ID NO: 26133 - protein, 573 aa, synthetic construct
MAYNAQNKTGARVAIYVRVSTLHQIDRDSLPMQKQDLLAYAKLMLNTDDCVIFEDAGYSGKNTDRPKFQEMMSQMRAGAFTHLLVWKIDRISRNLLDFATMYNELKALGVTFVSKNEQFDTSTAMGEAMLKIILVFAELERNMTSERVTATMISRANNGLWNGGRIPYGYDYDYETHEFSVNEEESKVVILMHDMYEQERSLVRVVRELNERGYRSRAGNLWSPVSLLIILRNVFYCGDYRYNMLKEGDRQKVKDESEWVTVENHHVAIIPKDQKERIMATLDSNSKLCKQRNIYKSSKHTHVFGGLIYCGSCGKPLGSTPGNLTRDGWHYSKYTCPTRRKSVTLCTGKSTSDPIIGEFVFNYILNMLNAQNDFDKISSPEELEKLLLIGDTFAYIDHIESNGLNDLFNVLSSGTVKGAVFGNGASLPTKKATVEPEVARLRNEKQKTERALDRLRSLYLYADEAMSEAEYMIQKNKLEETLEDINDQIGMMNTDSWQQSVSDEEFIQRASEFIIAQKLSGRKYVNYKRLAMSVDSEVLKNFVVSIIDSITIQDGLVSNIVFKNGLCHTFIFR

SEQ ID NO: 26134 - protein, 523 aa, synthetic construct
MRFFSYGRKSIFSDKSDSIDNQFRMNREYCESKFSGQVDSWQQFSDEDFTGANTSRPDLQRMLSFIKGGFCDVLVVYQLDRLSRDVRDFANIYALLEEHGVMFISIKENIDTTTPIGRAMMYVTVVFAQMERETIAARVTDNMLGLAKKGYWTGGNPPVGYVRKHIVVNGKKHCSIEVDPDGARYVTQIFDTFLAYNCSLQGMETRFKNQGIRTQSGKFFSTTQLHKMLTMPYCVEATPEVYDFYAAKGCIMDPGSPREMWDGSVGVIIYGRSTEKNKKHQAQPPEKWTVCLGKHKPFMPAEKWLAVQSRFTQNKCIKDAKWPVPLLKGVLRCKCGNLMQVSRKKKVDGTCSSWYYCRKRMRQGVDACDMGQIKCDLLDEEVLELFRGITADPALIQKFVKAEAPADVPDLKAAQARVSACERKIGRLAASLALAEDSAASKYIIAEMERLDVELGALKREASLAEMESHQAAASAKDAKATAAEIAKLIHGLDGFDDKEKNAIARAVIQECTWDGERLFITL

SEQ ID NO: 26135 - protein, 502 aa, synthetic construct
MPKTEEKQAAKAVIYARYSSDRQREESIEGQLRVCEDYARRNNITILHTYADRAMTGRSDQRPEFQMMIRDAATMAFNVILVYKLNRFARNRYDSAKYKHKLKKYGIKVVSAMENIADDPSGILLESVIEGMAEYYSAELSENVLRGMTQNALEGKWPGGVIPLGYKLDKGGRLIINEEKAPIVRMIYQMFLDGLSVARIERELNDKKYTTDAGKVFSRSRVYYILHNERYIGTFQWKDIKKEGIIPPIISKESFHAVQERINAMKSSSYRTNNNYLLAGKAFCASCGAKVSGTSGKSQNGNKYCYYGCSHHHRSARYEYCETKNIRADVLEKLVCDKTHEILSSKKAIKEIARQAVKLRPRNESELEIRALKNHISSCQKKIDNCINAIENGVMSNALVESLNENERTLDVLKEKLAKASLMQGSGLLTEEKIQFFFETIREKAKETEKYNDILLTSLVRAVYICNEYVEIQYNYAEQLPILTNPVRIESCSYKCTNGGIL

SEQ ID NO: 26136 - protein, 523 aa, synthetic construct
MRFFSYGRKSVFSDKSDSIDNQFRMNREYCESKFSGQVDSWQQFSDEDFTGANTSRPDLQRMLSFIKGGFCDVLVVYQLDRLSRDVRDFANIYALLEEHGVMFISIKENIDTTTPIGRAMMYVTVVFAQMERETIAARVTDNMLGLAKKGYWTGGNPPVGYVRKHIVVNGKKHCSIEVDSDGARYVTQIFDTFLAYNCSLQGMETRFKNQGIRTQNGKFFSTAQLHKMLTMPYCVEATPEVYDFYAAKGCIMDPGSPREMWDGSVGVIIYGRSTEKNKKHQAQPPEKWTVCLGKHKPFMPAEKWLAVQSRFTQNKCIKDAKWPVPLLKGVLRCKCGNLMQVSRKKKVDGTCSSWYYCRKRMRQGVDACDMGQIKCDLLDEKVLELFRGITADPALIQKFVKAEAPADVPDLKAAQTRVSACERKIGRLAASLALAEDSAASKYIIAEMERLDVELGALKREASLAEMESHRAAASAKDAKATAAEIAKLIHGLDGFDDKEKNAIARAVIQECTWDGERLFIKL

SEQ ID NO: 26137 - protein, 538 aa, synthetic construct
MIAERKVVTKIEANPLLVSKERERTIIRVAAYCRVSTDSAEQLDSYQAQIAYYTDYIAKNPGWRFAGIYADEGITGTKAEKRPEFQRLMRDCKKGKIDLILTKSVARFARNTVDSLSYVRRLKAQGIGFFFEEQNLDSMKADSEMFIGIHSVLAQAESENISANVRWGIQQRMKSGTFKFRYNILGYKKGADGEPEIEPEGAETVRLIYSKYLAGESLDQIRDSLVQIGAKSFKGKVEWSKESIKHILTNERFCGDMLLQKTYIDNCISRKTRINHGELPKYLIANNHVPIISRDDFQHVQMELARRSSKRKVSSRTITEQGKYSGKYALSEKLVCGECGTPYRRKTWIISGQKKIVWRCINRIEHGTRICHDSITVEEGRLHQAICNGLCNAATCRDEVLELIESNLSYAITGNEKILDAYTIQKNIERVNDEMDQAMIGFSTTQGDKNKYLEVINIKNSELAVLREQLALAKEQMNNDEYTRLEIEKLEQALASCDMIQTVFSDSQIRLLVECIRVNKNNTIDIVLKGGFSITEKL

SEQ ID NO: 26138 - protein, 515 aa, synthetic construct
MANAVKRVQVMRATKGQNDYGKIRTAAYCRVSTDSSDQVNSFMAQMQYYNDYIRQNPNMVLVDIYADEGITGTSIEKRPEFKRLLRDCEDHKIDRVIVKSVTRFARNSLECLETIRTMQSCGVSVYFETDNIDTANMNSELLLYIKSAFAQGEALAASARMQTSIRMKMENGTYVVSSAPFGYQYELGKLIVVPEEASIVREIYDWYLSGKGFDAIAATLNRRYGGGWHPNRVRYILTNEKYIGDTMWQKTYTPQMLPLRNVINNGVKPKYYVEGTHEAIISVDDFKMVQQIISQHAKNEKSQKKAHFFPVGVVCRHCGWSFSRKSSSPHLIACSKKGLSGTECPSRSYSREELSDAFIRMYNTLRQNEHRILDETLSRLHDFKTKLTGQDEQITAIDSDIALLCEQSEMYAKLLTEKVIDQVTYAEKCDIYKRRISELRTRRRKLMSEDEDEHCITCLRKLKITLGEMPRRLLIVTDKQIKAMTEKIYAEEDGSLTFVLCGELELNVKMDTIWH

SEQ ID NO: 26139 - protein, 525 aa, synthetic construct
MAKVTIIPSKKNPITLTPINEIIKKKVAAYARVSTDSDEQFTSFDSQCKVYEDYIKSKPDWEFVKVYADDGISGTNTKNRVQFNQMIDDALAGKIDLIVTKSISRFARNTLDTISYTRKLKANGIEVYFEKENLWTFDDKAEFLLAIMSSIAQEESRSISQNVTMGKRWKMQEGKVQFAYKNFLGYKKEDGQIKIDDDQAVIVKLIYKMFLVDGKTCSYIANYLNSNNILTPARRHNWSKQNILSILKNEKYKGDAILQKSYIKDFLEHKAVKNNGELPKYYVENSHPAIIEKDMWEMVQAELKRRELIGASYSSCNVFSSKLICGDCGAFYGKKVWHSNDAWRKEIFQCNKKFAKGKTRCKTPSFSEQVIKDKFIKAYNLMMVDKEAVINDAKDVINKLTDTTTLDAQISKYENEMEIVSELVKKLVKDNSIHLQDQNDYETKYQELVNRHNKAKELYEKLNEEKKYKQAKAITLKSYLSTFENADTEILEWDDALWMTVLDKAIVNRTETITFKFINGKEITL

SEQ ID NO: 26140 - protein, 432 aa, synthetic construct
METKVTKIDALPKFERKLRVAAYARVSSEKDAMLQSLSNQVSYYNNLIRSTEGWSFVGVYADEALSGTKDTRDEFQRLIKDAVHGKIDLILVKSISRFARNTVTMLETVRKLKVIGVDVYFEEQNLHSLSGEGEMVLTFLASFAQEEARSVSENQKWKVRKTFESGVQWSATKSYGYRVINKKYVVVPEEAKIVKYIFDLYINGLGFQAISNKLQSENIKPFYAKAWNKTSIKNIISNINYTGDLLLQKGYSENFLTKKYVANKGAKDQFLVEDDHEAIISKEIFNKAIDLKRGRAKFFKTSRDTQIRYELSGKIKCGICGKSFNHRTTKYSQKWICITYNEKGKSVCPSKCVPDTELKRITDKVGLDNIDWVEVFPNNELKIYLRDGTNVIEKWNDYSRKNSWTDEMKAKAREQAVKKSLVNYLKGGNING

SEQ ID NO: 26141 - protein, 529 aa, synthetic construct
MAKVTVIPSTINPITKLPNNGLQKRKVAGYARVSTILDEQCSSYQAQVDYYTNLIKRNPEWEFVEVYADEGISGTNTKRRGGFNQMMQDALDGKIDLILTKSVSRFARNTVDSLTFIRKLKEKGVEVFFEKENIYTFDSKGELLITIMASLAQEESRSISENVTWGKRKAFSDGKVSMPYKHFLGYKKGEDGRPTIDEKESLVVKEIYSLFLKYGYSTTKIAKEFNERGICTPSGKGKWTLTTVESILSNEKYKGDALLQKKYVVDFLTHKSKPNDGEIPQYYVENSHPAIIDKIEWDLVQAELERRKKLYKTYSSKNIFASKLVCEDCDSFFGRKIWHSNDEHRAIVYQCNGKFKNKEKRCNTPTLREEEIKSMFLEAYNYFVLDKTTLVDDCKLMIETIANVSLIDEQISKQIEKMEELAQKVKELVSSNASTLDLQIDYINDYDELCTMHSIEETKYKFLLKEKSGRLAKAKSMELFIESIKDKPDVIDSWNSDLWILLVDKAIVHHDKSITFVFKNMKEITIAAK

SEQ ID NO: 26142 - protein, 436 aa, synthetic construct
MQITKILATKKLEKKKLVCAYARVSSDKDAMLHSLSAQVQYYKDYITSNNDWLFVKVYYDEGISGTKQDRPAFQQMLQDAKDGKIDLIITKSISRFARNTVTLLEAVRKLKKYDVDVYFEEQKIHSISSDGELMLTILASYAQEEARSVSENLKWRVKRNFEEGKPWGRAPYGYTIENSKFVIVPKEAEAVKLIFKLYLDGIGSYRIKDIMNKSEYPTRNNCLWTETTIRGMLKNYIYTGNAVFQTTYVKNYITKKKAKNNGEKPMYHVEECHDAIISIEDYNKVQKIIKERTEKIHKGITPKDNPFKGKLICAHCGCTFRMKKNYKKYVWRCGTYIRLGSKKCLSKQIPNDALKNIAKEILGVDELTSEIIDERIEKVIVGDDRLLTFYLKDGNKIDAHWMQKSRSESWTEEMKENARRKAVERNGKSNSNPIND

SEQ ID NO: 26143 - protein, 559 aa, synthetic construct
MSKTVAIYVRVSTGKQADRDSIPFQIQECSNYVKHFLKTENFEVFKDAGRSGKNTHRPEYQRMIEKVKSGMISHVVVYKIDRISRNLVDFSIMYNDFKEHKVAFISLNEQFDTSSAIGEAVLKIILVFAELERKLTGERVRDIMMNRALEGKWNGARVPYGWDWDTKKQCPVHSDTEAEYARMMYRLYDECHSTCVVRDYCNAHDIPTKRGGEWTSKTVADFLRNPMNVGDYRYNYRKSARGKRNDPSEVIYVKDVFPPLIDRELYERVTHQMDLNTFGLGKDGRKVVSKKTHVFGGLVVCGLCGAFYHSDADVVRADGFRPSNYRCGAHNKKIHCKAKGTSDVKLGPFIFNYISNLVKASKSKKLLHSVSDLEQILLTGPEFEQVAGIADDGLDVTFDTIMHGFKPKRYTAAPYTVIRSGDSDALTAKRDKTIRALERLKKLFLFEDDAMSEKEYLMSKRELEGTLSDIENELSALEADTADTKYDDMSFISTASGFLIAHQIASGEHINYRELACAVDAKVLKDFVNSVIERIVLLDGRVASIEFKNGLVHEFLYRE

SEQ ID NO: 26144 - protein, 505 aa, synthetic construct
MKITAIAPKDNSRKKLKVAAYCRVSTEADEQENSLNNQKDFYEKHIRSNKSYEFAGIYYDLGISGFKEKRPGFQQMIADAMNGKIDLILTKSISRFARNTVTTLKVVRKLKSAGVGIFFELQNLHTLSNEGELMLSIYAAFAQAESEDSSMNMYMAHQRRFKKGIPAIRVYECYGYRLNSDGEIVLDEIQSQVVKTMFDLALQGIWVSKIRAYLDKNGIPSPQGKRWNDTVVNRILRNEIYKGDVMMQKTYIDADRVRHRNTGQKDRFYIEDHHPAIVDRFVWNEVQEVLDIRSMQLKQKLPKRSMGGNSHNKYSLTRMLYCPHCGSPLHHRVNSGGKYTYWCCGKKIKKGKDACIGITVPEDLTREWKITEEVTVFEEKDEFGRQHFSFMPKKEYEKSRKCPYEPTEKKGRDSHSIYPLSGKMYCGLCGSLMHHQIAWNGKEFWWCSKRIKKNACEGIKVPAEIADSWEFEGTIIVMEGVDENGEKSYSYQSRAQTHHENGNKG

SEQ ID NO: 26145 - protein, 482 aa, synthetic construct
MQAAAYARYSTEHQTESSIAYQMRKIEEYCNDHSITVIARYTDEAKSGTNTQRPAFQQLCKDAAQRKFDAVVIYDISRGSRDVSDWFGFRKQMAILGIQVISVEDRIGDILNPSDYLTELITVGLGQHHVLTSRQKSMDSIATKAKTGQFLGGTPNFGYNVVNGRYVINPAEAEIVQKIYRMYAAGKSYGEILAEIGEVRGKRGRVIGKNSLHYLLRNERYIGIYSWCKYHHKIMGKYAGNIPNENAVRIEDSIPAIIDKDTWEAVQIRMNDKKQRACNKAKRSYLLSGLIECTECGANYVGHTSTNKKGYSTRYYCCGNKYRNHTCHAKNLNAEELEIFVVQNLKQYLSDLDFSQMAQQVADEINGASVDLKAERKELADIIFQLNNGTKAILKGIDYPELQEEMFRLRVRKSELEDIIRRGEEKKPVSAVKLEQLFQHAVKQLDTDTKQICKSMVKIYAHPNGDCDLEVGVHISGCGSQI

SEQ ID NO: 26146 - protein, 615 aa, synthetic construct
MAYRKITDIKDTIGMRAVFYARVSTAEEEQLNAIELQIEENRGCIKDHGWKLVGEYIDRSKSGTMVKGRDDYQRLYEALYEDLFDIVVIKDQERLQRNTLDWYLFINRVVQTGKLLFMYMDGKFYSPDDALITGVRAIIAEEFSRNLSKKLHNYHDHRIEKARQGQEIALQGSGNVYGWDKKDGKYYINPEQAKVRRLMCEGIMARKGSTLIAKELNDAGYRNTVGKPWKPMDIPKFVYDCKNVGTMIINKERHDFESKQTIKLPKEEWVYVENALPPIVTQEEWDLICKIHEERVIATGSDRRGKKTSGYSFSGKLVCGICGAPYWRKQRVSKDEYWVCSTKQTKGRRTRKRDSTMGKAGEINPLGCDNENISYNSLMEIMGVVSERLQANTDTIKQDMINWLTKLRKQLLEANGGHTEADLQRELSRKSKLLDAYLDGILNKQEYQTKAEELDERIIQLKAETEKTKANSGDIAEIDKVLANIDEEVSRYVDGNEKLKVEYLLEHLEQVQIFPDKVIVIVPILSEGIVVEKAQYVSREKWCRKKYLDEVDYKKYQTDSRRNLSGWNRYSYPETGISAADRLYATAAGDLSVLYRTDVPCIYGIVERSREKSTE

SEQ ID NO: 26147 - protein, 522 aa, synthetic construct
MGNVMLIPARRQVGNNARKQEEEKPKLRVAAYCRVSTDSDEQATSYEAQVEHYTEYIQKNPDWEFAGIYADDGISGTNTKKREEFNHMIDDCKAGNIDMIITKSISRFARNTLDCLKYIRQLKDMNIPVLFEKESINTMDAKGEVLITIMASLAQQESQSLSQNVKLGLQYRYQQGKVQINHNRFLGYTKDANGNLIIDPEQAEIVKRIYREYLEGLSMDKIAAGLERDGILTGAGGKRWHTSTINKILRNEKYIGDALLQKTYTTDFLNKTRVKNNGLVPQYYVEGNHEAIIPKEIYLQVQEELVRRRVVKTSANGKKRSYSCNHCFSQIVICGECGEMFRRLHWNNRGVKSIVWRCISRLESTGLECHARTINELVLQDAVVKAINQMLGDKSSYQAQLQLNIASVIRALQVTSVENIDENLMALQQELIQKAQSKEAYDEIADEICRLRELRQQTTVDTAARDEQIKRINDLQDYIAQQTTHLTEFDESLVRRWIKQITIWDDRITVELKSGVSIDVDA

SEQ ID NO: 26148 - protein, 521 aa, synthetic construct
MKKITKIDGVQNNSTVNKELRVAAYCRVSTGSDAQLESLEAQKTHYERYINSREDWKFAGLYFDEGITGTKAEKRPELLRLIADCEARKIDFVITKSISRFSRNTTDCLALVRKLQSLNIPIFFEKENINTGSMESELFLAILSSMAEGESASISENSKWSIKRRFQNGTFKLSYTPYGYDWDGENMIINPAQAAVVKRIFADILSGKSTNAIADELNAEKIPSKKNTNWTSSTIRGILANEKYTGDVIFQKTYTDENFNRHTNYGEVDQYMASDHHEAIISHSDFEAANALVSQRALEKGVKKGSGKYQKRYAFSGKIICGECGDTFKRRIHTCATYKYVAWTCNTHLKDKSTCRMKYVRDDDIKAAFVTMLNKLIYGHRLILAPYLKALENSSGDEAIQRIQHLELLLDQNSEQRETLTKLMAQGYIDQILYNQETNALLLQAETYRSDIEAITICMTGDSAKVTETNLLLHFVSHADMLTNYSEELFESYVDHIEISGRNEIRFVMKCGLTFTERIGD

SEQ ID NO: 26149 - protein, 512 aa, synthetic construct
MQRAVIYARFSSDMQREESIDAQVRACKAYAKNKGYIVVDTYADEAKSGRDVTKRDAYNQMLADAMEDKFDIIIFHKIDRNSRNELNYFTFKDKLEKLGIRYEYAAQPIDALLPEGQMMETMMVGMAAYYSRNLAKETKKGLNENAYKALFNGGCPPLGYKIVDKKYVIDEQEAAAVRLIFELYLNGYGYAAICRELSAKGYTTKAGKAFAKNSLHDILCNEKYIGTYTFNKIPRKKGGRNSHAAERPEDFISIENAFPAIISKDDWALVRAKMDRNRHRAASYTAKEKYLLSGKVFCGHCGSAMVGHRIRKRYCYYGCTRKEQTPTSKCPQKMIRAEILEHWVLQILERVVFTVGGMRRIADAIVDAYEAEQKEQAGSQATLLQRKAVAEKKLNNLYKIFEEGNADEFDRQRLNQIKAELREINKSICETSVKPAKLLSKQKIAAILAAMKDEIFVKKNSYYVQQAVDLLVDHVTITDKVLKITLSTQNVCAYLVPRTGIEPVRVSLPEGF

SEQ ID NO: 26150 - protein, 463 aa, synthetic construct
MTTKVERCAIYIRVSTTEQMMHGKSLEAQKEYLTNYAREHNMAIVGIYADEGKTARKELKKRKAIHSLIKDVEAGKIDVIIFWRIDRWFRNLSDFYKVQDILDSHNVRWISTSEPGINMETRDGRLQLNVVLSIGQNEVDTTSERIKFVNEASIRSGKLIFGDVNMGYGYKSGIVDGQKRMIKDPDREHVVNAFYEYFFKHQNKCATLRYIQETYDPDFSFGIMRTLLSSEFYKGTYRGFPYCPAYLTEDEWNKLQKIQKRNVKATPSGRIYLFAGMIRCPVCGQKLCGTGCSSIINRKTGAKRTYCYYRCNRAMIDHICSYRHRLSQNLVENYLLDNLEDEYKNYKVKCEKIEKEKEKQKKKQSPEKLRKELDRLNFLFQKGRIEWDYYNEEYGRVESELNDLQSVLPEPAPNYSYLEELLNTDFRTMYDQLSQENRRAFWRSIIQEIHINEDSTITSVDFL

SEQ ID NO: 26151 - protein, 523 aa, synthetic construct
MVSFDSIIIYLRKSRSDDPAQTVEEVLAKHERILQDYCMKEYGKAISEKRIYREVVSGETIQDRPVMQQLLKELEAENISGVLIVEPQRLSRGDLQDCGQIINSFRYTNTAVITPGKTYDLSDEYDRKFFEMELTRGNDYLEYTKKILSRGRVASVRQGNYICSVRPYGYKKITLGSGKDKCHTLEIIPEEADVIRLMYHLYIDENMGFTNIARTLDSLHIKPLKSDNWSATTIRDMINNPIYIGKVVWNSRKVVKKWENEQITKVRPRNKGDDVICVNGRHEAIIDEHTFEAARNKRGLTPKVKKFKELRNPLAGLLFCGTCGHGMSMKKYVDKRSHTGKVTTVMLCNQQAVCHTKSAQYEDILAKIKVSLSNAISDFKIKLKEQENNNIDMHELRIASLEEELNRLYNKDVRQKDAYEDGIYTKEEYIERNSKLQERILNVKEEIADEKNNVPVKIDYEDKIMTFKDCLSSIDDSDISAADKNILLKSCIDKIIYYNDMPSKPGIGRYIENSFRLEIFLKL

SEQ ID NO: 26152 - protein, 501 aa, synthetic construct
MTGVIYARYSSDNQREESIEGQLRECKEFVQKNDIQIVGSYIDRALSAKTDNRPDFQRMIKDSANGLFDTVIVWKLDRFARNRYDSAHYKATLRKNGVKVISATEIISDTAEGVLLESLLEGMAEYYSADLAEKVIRGLTENALKCKYNGGTLPIGYTIDSEQFFQVDPLTAPAVLQAFKSYAEGASMQEVTDQMNIKGIRTKRGGKISINSVTRMLHNRKYIGEYKYRDIVQQGGIPAIVPQDLFDRVQERMAANKKAPAKHKAEDEYLLTTKLFCGKCQCLMVGESGTSHVKKKVHRYYKCVSVKNHKGCDKKTVRKEWIEDATIAFIRKIVFDDDLVSMLCETAIKVQSQANTTLPLLKKQYGDTLKSIENLLNAIQQGILTPSTKQRMEELEQQKTELSIQIIKEEMTKPIISAEDIEAYFNRLRKLNFKKIEHRRRLIDTFINKIVLWDDGGIYFGCNYKDCSREMTFAELEEAGILGSDISALGAPSLRGCNREL

SEQ ID NO: 26153 - protein, 540 aa, synthetic construct
MPTSKNTARKYAAGGSSDNSCGVEPLRAVIYARYSSSGQREESIEGQLRDCYEFAKKHGIIVIGEYIDKAMTGRVDRRPDFQRMMKDSEKGRFNCVLLWKMDRFARNRYDSAMYKYKLKKNGIRIFYAKETIPDGPEGIILESVMEGYAEYYSENLAQNVKRGNYDSALELKTLGKTCLGLKTGPDGRYMIDQAEATIVRRIFEEYAEGERAKDIYERLNSEGYRTSRGGKFNKNSLRRILSNKKYIGVYEYEDIYVENGIPAIITDRDLFERVQKMLKINHDAPARGKAQNFLLTTKLFCGLCGSPMIGDGGTSHTGKAYAYYSCTKRKRGRSCKKESVPKDWIEDLVVGELVKIVHNDELIEQIADRVMEYQKREKDQSGLHALEIRQKENEKAISNMLAAIEAGIITPSTKTRLMELEADRADIEKGIAHELLAEPEFERDQIIYFLERFRSGDINDEAYRIMLVDTFLNSVYLYDDDHLVLVMNYSGENCKVDLKLVEGAVSGDGCKGSAFAPSSALKTPCENHRGFFCAGRDLES

SEQ ID NO: 26154 - protein, 514 aa, synthetic construct
MAKRKFNKGGEVRLVAYYRYSGGSGQTEQSIEGQRRDCETYARLHNMTIQKEYVDRHISGKTDDRAAFQQMITDSDKGAFDMVICWKTDRFARNRYDSAVYKKRLRDNGVEIVYAAESNIAGAEGIIIEGVMEALAEYYSAELAEKMRRGMRESALKGQAISRCRALGLKTDEHKRFVIDEKTAPTVRFIFEHYAAGESATSIVDKLNAKGLRTSQGNPFNKSSIPRIIQNEAYRGVYVSKSYDVRIEGAIPAIIDDELWERAQTMLKLNRQLKAKNEPKADYILSGKLYCSCGSLMRGMSGHSATGEVYRYYTCPNKNCHLRNIPKDDLEGKVMQSISDHLLQPEAMESLAEAMVEVQKADVEKPNAERVAIEQSLSDVRRRSKNILDAIENGTANAQLCARLDDLTEQEQTLSFQLSSLEKEKPVVFTKEQYLFLLEQFLVEPSERTPEYGRRLVNTFVTSMVVSDRELVINFNVSDETVNKNKKTSQTNLQKESSSGMRLVRVARIELTAS

SEQ ID NO: 26155 - protein, 540 aa, synthetic construct
MLAKQTDYIVGIYLRLSKDDERAGESLSIENQRRILTNYVREQGWTIYDEYVDDGISGTSFDRPGVQRLLDDAKNGKINLIICKDLSRFGRNYIQVGQYTDYIFPMYNIRFIALNDGIDTLNSDSADMDMMPIRNVFNEWHAANTSKKVRAVIVANAKAGKMMTPYCPYGYVKSDDEMRTPVIDPYAAGIVRRIFEMYASGMKPLQIATVLNDEGVLTPFDYYYKRIGKPNPYNHSHLWSGRNLENILKNPIYIGTLAQLRTTTVSYKNHQRIDRDESEWAVIENNHEAIISKELWDKVREIEKSVSRGKRDKKGELSPLSGLLFCDGCGWKMRKASTGGGGYICGYHNRFGKNYCSTHYINRELIEGIILADIQEMCELAKDEKTATAEFLRRKRAFIDVQNISDTKRMKTVGSRLAELDKLIQSVYEDKVAGRIEPDMAFDMLDKYQAEKKTLKAEYDEMNARSESERQDEEDVAEFISRLKRYAGATELTREMCLDLIEYATVDENNKGHKDRPRVIHIYYKLIDKPLTNKNRLALT

SEQ ID NO: 26156 - protein, 581 aa, synthetic construct
MSKTTNKRPGKAKSGLSRKQKVAIYIRVSTLYQVDRDSLPMQRKDLIAYASLILGIEEYEIFEDAGYSGKNTDRPAFQEMMQRIRKGEFTHVLVWKIDRISRNLLDFAEMYEELQDLRVTFVSKNEQFDTSTAIGEAMLKIILVFAELERNMTSERVTATMISRANSGLWNGGRIPFGYDYDPDKTAFSIREDEEKVCQMIKNDYMEHKSLVHTSRMLNASGYKTRSGVEWSPTAVWIIVSSPFYAGIYRYNRYKGTERRVENPEDEWIMIQNHHPAIFSLEEHEKMLAILDENSRNRRSVGQRHQTERVHIFGGIAYCGKCGSKMVSTPGRLHVNGYRPTNYSCPKHRKTKECDNPTVSDTQVGEFVINYILNMLGAKKKFSTIENPEDLERCLLYGNTFSEVEHIDSNGLNEYFNLLSRYSSDDSYTFSVKKSRKKKAEVDPEVAALRKEKEKQERAMKRLQDLYLYSDTSMSEKDFIIRKTEISKRLEEINAMLGMVAKNSEPSLSDEEFVRQASHLLISRELQNRQYIYFKNLAQNVSPEILKAYMETVLDSVLLVDGRVSSIVFRNGLTHKFKYKS

SEQ ID NO: 26157 - protein, 486 aa, synthetic construct
MKTAIYIRVSTQEQAKEGYSIPHQKEKLFKYCQAMNWQVVEIYADEGISGSTIEKRPAAIKMLQDAKKRLFENILILRVDRLCRNTKDLLEIVETLKKYDVSLNAVDQQIDYKTSIGKMTLTILGTFAEFEHSTIHERTMEGRKQKATQGIKSLGRRVPFGYDYINGNFVANSDAQIVKLIFEKVADGYGYNQVATFLRKNNVPTIDKLDWNRLHIKRIINNKIYMGHCVLKLKMVEVVDTVATNVESIVNEDLFKQAQKTISYRTNGKTTKYAYDDFVFADVLYCACCGWKMSPKKVKRAEPKVNEIKLEDRYYRYYKCIYNMCHPNKQTCKNTKVLNADKFEKHFLLYMDYFIIELKKPLKLQKKITSSPTNKDFLEKQIKELTQKKSKLLDKYLAGIIDDSSYIAKNDELIEEIKSLENKLNFKEELLDKENKEINVDFLNGLKFVFSDLWSIMSNHEKRNFITQTFEKIEVNQGKIVKIILR

SEQ ID NO: 26158 - protein, 590 aa, synthetic construct
MKTVEKIERKLPVLKARKRVAAYARVSMESARMQHSLSAQVSYYSALIQKNPKWEYAGVFADYGISGTGTKKRDEFNHMLAECEAGNIDIILTKSIQRFARNTVDLLNTVRHLKELGIEVRFEKEKINSLSGDGELMLSILASFAQEESRSISENVKWGTIKRFKQGIPNGKFSIFGYEWQDDKLVIIPEEAEIIRWMYAEYMKGASRIEIGRALMARGIYTRQGKPWVDSNVKVILTNITYTGNMLFQKEYCEDPITKHRRKNYGEMPQYFVEDTHEAIIPMDEWQAVQAEFKRRRDLGPFGNKSLKLSAFSTKITCGCCGKHYRHSGKRNTAGEVYYIWTCQTKSQKGATACPSKNVPEKMLQNAAAEVLGLYEFDEDAFSQQIEEVIVIGDDTLTFRFYDGHEVTTKWQSTAKTDWWTDERRKLWGERHKRKDTNPNRNTFYEFTGFIKCGCCGANYRCQSGKRKDGTPTRSWYCTGPRSECQNPAIRDETMKRLVTDVLGLDEFDEAAMDAQIESATILDHTVTFHFRDGHTESRDFLDKRHGTPWTEERREKARESMKAAWTDERREAMSERIKKIRSEKKWPNP

SEQ ID NO: 26159 - protein, 523 aa, synthetic construct
MAKSVTTIPATLSRFTAAPINSTKKRRVAAYARVSTDNEEQLTSYEAQIDYYTNYINGRDDWEFVGVYPDEGITGTNTKKREQFRQMVADALDGKIDLIITKSVSRFARNTVDSLTTIRKLKEHNVEVYFEKENIWTFDSKGELLLTIMSSLAQEESRSISENCTWGQRKRFADGKVTVPFKRFLGYDMGPDHNLVVNPEQAKLVKRIYGMFLQGQSPFQIARTLTEDGIPSPGGKDHWNPSNIKSILTNEKYKGDALLQKSFTVDFLTKKKKANEGEIPQYYVKDNHEAIIDPETFEMAQTLMATRKKGRNRKSSVSIFSSKVKCGDCGSWYGPKVWHSNDAYRKVIWQCNHKFDGQKCATPTLTEDEIKELFLRAANQVIDQKEQFIAIYEQVLSRSLDTTALESELSDLEAEINIAAELIEECIKENAHVALDQAEYQKRYDGLVARFDKAKARHAEVTDLIAERTARRHQIETYLKELQSREPLTEFRETDWLAMVDYITVHSKNDIRVTLKDGTEIKA

SEQ ID NO: 26160 - protein, 491 aa, synthetic construct
MYLRKSRAEEGQSTEEVLAKHRAALEELADRLGLPVDGVYEEVASGEKLYARPEMLKLLERIRAGEVEAVLCMDIDRLGRGGMADQGTILDAFRESGTLIITPEKTYDLTNDVDIEMTEFKAFFARAEWRAIRKRMRRGLMQTIEAGGYTANAPYGYRRCRIGKLPSLEVIPEEARFVRYIYERYLAGIGAQTIAQELNAMGSCPRRGAEWNRNTVRHVLRNPTFAGKVAWNRVKHYRPGAHGKDKHHVVYTPEGEWLMVDGVHEAIIPWGTWLEAQERRKQRYIPPSNTGQRANPFAGIIRCSRCGNNMQRMGSNKGEPYLLCTTKGCAAGAKFEYVEERMVELLYDELARLRLLIDSGAAPNVDALEASLAATQREQERVQARIPRLYEFLEDGTYDRATFRSRLDAAEKELAELASKRADLERQIDERRRSDPRKAAAALENLVQLYPTMSPADKNSALKALGVEVTYTKEKKTKPRDFTLELQLRDF

SEQ ID NO: 26161 - protein, 499 aa, synthetic construct
MKDKYALYLRKSQADQPDESIAEVLAKHRTMLMELADKMGVDVAQADIFEEVVSGESLYARPEMLRLLEQVEASAYAGVFCMDIDRLGRGSMSEQGIILETFRLAETKIICPGKTYDLTNDADEELTEMKALFARFELKMIRKRMRRGLMQTIQAGGYVANQPYGYRKCTVGKLPSLEINEEQAKFIRHIYKRYLEGVGAHIISDELNAMGSVPNRSGRWSRNTVRHVLRNPTYAGKVAWNRVKRYKPTKNNPRPRAEHQKMEDWILVDGLHPAIIPWEEWQQVQEIRKGRYIPSQNHGQVANVLAGLIRCGNCGHNMQRMGQNKCDPRILCTEKGCIPSTKYDLVVERFMESLERIRDDLQIEVQQAKTPDISGLTSEQRAVAAKLKKTASKIDTLHDLLEDGTYDRATYKERMAKAEAERESLLLQQADVEQRIQRAMSRDKANMLSKLTSVLQLYPTLDNEGKNQILKSIVNYAVYRKSPKSKPGDFTLEIILKDI

SEQ ID NO: 26162 - protein, 497 aa, synthetic construct
MQFLNVAAYARYSTENQDENSIETQFDNIAQYCQAHQYNIVAHYFDKAKSGTNIERADFQEMISAARAGKFSAIVIYDITRGSRDVADWFTFRKQMMQAGVQIISTHDNIGDLLNPNDFLTELIGVGIGQHHVLTSRLKSIDGTTMKAHEAIFLGGCPPLGYDVKDGKYIINESEAKIVRKIFSMYASGESYSNIIDSLNGAIGKKGRPIGKNSLSSILRNDRYIGIYTWNRRKIKIMGKWAGGVPNERIVQIKDAIPRIIDQPTWERVQIRLKSKTNSSSKATRSYLLTGKIVCAECGARYCGRTSVNQRGYQNPYYVCGNKTRTRQCHSKNIKCEDLDNFCRNAVREYILNYDLSETAQRVVTTYNATVSQYTNEKKELAEISRKIKNGTDAILNGFSSEELFQQMGKLQMRQKELEKIIADDAADELDLDLVTKLLKNMLEDVSTNIDEVVKQFVTKIYAHPNGDCTVHLGVAHFTSSGREIRTLDTTGMNRML

SEQ ID NO: 26163 - protein, 518 aa, synthetic construct
MPKVTTIPPRKQRNHAVTSQETRKIRVAAYCRVSTDTEEQATSYQAQIAHYEEVIHRNPEWVFAGIYADDGISATSTKHREQFHQMIQDCMDGKIDMLITKSISRFARNTVDCLNYIRQLKAQNIPIYFEKESINTMDAKGEVLITIMASLAQQESESLSQNVKLGMQYRFQQGKVMVNASCFLGYDKDENGDLVINPEQAETVKRIYREYLEGASCQQIARGLERDGIRTARGNTRWHDSSIRLILENEKYMGDALLQKTYTVDFLKKKRIKNNGEMPQYYVEDDHEAIIPRALFLQVQEEIARRGSQVDCMGRRRGFSAKHCFTGLLYCAECGEQFRRIHWNNRGCKSVVWRCMTRLEKKGACHARTVYEESLKQAFVEALNQLTGGSETYLSILQENMAEVIEMEQSNLPKEIQRKLDVLQKKLIECAERHEDYEEIAQEIFRLREQKEQALRENVSQQEQKERMRELQEFLAAQPHQIAEFDETLVRHLLAKVTVSSDRLNFTFQSGVAVSIEK

SEQ ID NO: 26164 - protein, 518 aa, synthetic construct
MREVTVIPRKPRVGNTATKIEVKKLRVAAYCRVSTDTEEQASSYETQISHYEESIRSKPEWELVNVYADDGISATSTKKREEFNRMIEDCKKGLIDIIITKSISRFARNTVDCLNYIRMLKDMNIPVYFEKESINTMDAKGEVMITIMASLAQQESESLSQNVKLGMQYRFQQGIPMINTTCFLGYDKDKNGNLVINPKEAEIVRRIFREYLNGSSCQAICKGLERNGIKTSRGNKRWHDTTVRKILENEKYMGDLLLQKTYTIDFLSKKRVKNNGDMPQYYVESNHEPIVSRETFMLVQEEIARRGMLRDCQGRRRGYSSKYCMTGITYCANCNERYKRIIWNIHGRKTPVWRCSSRLHDHNSCSARSIHEDKLQKAFVAALNQMIGDSGEYLQILQDNLEEALTVGKSANILKIDEQLRKLQQELTIRTENHQGYDDIAEEIFRLKEQREQLMMDETTRSDYKERINDLKKFIATSYHSITEYDETLARHMLSKITIFDDHIVFAFKSGVIVSVEM

SEQ ID NO: 26165 - protein, 514 aa, synthetic construct
MIVRKIEAKKQKQTLCRVAAYCRVSTDNHDQLESLETQKEHYESCIRAHADWECAGIYYDSGISGTSSDTRDGLQALLQDCRNGKVNYILTKSISRFSRNTADCLSIVRELIRLQIPIYFEKENLNTGTMDSELILSILSSMAEEESISISKNLKWSIQRKFRNGTFKFSCVPYGYTRNADGEMIIEPQEAKIVKRIFKMVVSGLGSHRIAKKLNADGIIPRKGANWTSTSILNIIGNEKYMGDALFQKTFTTDSFKRKKNHGEMESFLIHDHHEPIISRELFDQAQETIRWRARNHQKGSGIYENRYCFSGKIFCNCGSVMKRQSNNRISWCCITHINDISHCDMKSIRDDSLKTAFVTMINKLIYAKGILLKPYYDSVAASAGDENVIHIRELQEKIKLLSVRTDNLRKLRAQNMIDNVVFNRELNDMKKQEDLYRMEMMQCSNAESQGAILLRETEKLMKLIDHSEMLTAFDEEQFTEYVDKIVITDRKTAVFYLKCGLKLKEELQCMATE

SEQ ID NO: 26166 - protein, 517 aa, synthetic construct
MKTITKIEANRSVAVHRKCRVAAYCRVSTEHDDQMESLETQKAHYEAWIKLHTEWESAGIFYDAGITGTKAEIRPGLQDLLQACRMGRVDRILVKSISRFSRNTAECLALVRELSGIGVSVFFEKENIDTGSMESELFLTILSSMAEEESLSISRNEKWSVQHRFQNGTYVSSSFPYGYCRNDRGEMGLEPEEAEIVKYIFSALLSGKSSCQIAGLLEQQGIPFKNGRHWCDATIRGIVANEKYVGDVLLQKTYTDVHFHRHKNHGEVECYLLSDHHIPIVSRETFAKANAVIRQRAAEKGIVYGTGKYQKRYAFSGKVICGKCGSTCKRRIHSGNEIAWTCAAHIESAQKCPMKYVREEVLKAAFVTMLNKLIFSRKHILKPLLEQLKTNSNDENVRRMQELQKQLESHAEKKNTLHRLYAQKVIDPVLFRQEMNALQKQAESCRMEIAQLEQETHGETEIIAELKQLLRFTEQHSAMLTEFQETWFSAFAEQIILYDRNHIGFRLKCGLLLKEEI

SEQ ID NO: 26167 - protein, 501 aa, synthetic construct
MEIQIREGSREQKRKLKVCAYCRVSTDADEQENSLENQIRHYETVIKANPDYEYAGVYSDFAISGFKEKRPGLQKMLADAEKGKIDLILTKSVSRFARNTSIVLEATRKLKELNVGVFFELQNINTLSGEGELMLTILAAFAQAESESGSAGAKMVYQRKYEAGIPVQYLERSFGYTKDERGVFVADEAEAVWVRKIYEMAAEGYTPASIKRYLNENGIKTVGGVQWVDSTVFRLLENEIYKGDYIMHKHFVNEERKLVRNRGEVDAWYIEDDHEAIVSPELWQKAQDALAAKRDYLAEGSVIEEFTEENYPYMNKIYCAKCGYPLYKRIYSKGNRLNWGCSGTKRYGKSFCDGINIPDGVLRSAWHFEENTYIDEKASDKGVKEFTYLKERSWKRRHKKKQPSAIPENTETEYPYREKIFCALCGSRLVRYVNPQNHKVTWVCNRRKRKGKEACDGTRVPDTVIKGWGEIKNDIYIQRKDDKNGKKRYSYTSKKPSGIRV

SEQ ID NO: 26168 - protein, 559 aa, synthetic construct
MNREGKKCVLYPRVSTEMQVDGYSLEGQKNSLKRFADREEMEIVGIYEDAGKSGKSIEGRPAFKKMLSDIKNGLEIDYILVYKLSRFGRNAADILNSLEFVQSYGINLICIEEGIDSSQTSGKLLISVLSAVAEIERENIIEQTMNGRREKARQGGWNGGFAPYGYYLKDNQLLIEETEAEAIRIIFDKFANSDVGLGGVAKYLNLQGIKKIPRQNGTLETWSSHFIRLILDNPVYCGKIAYGRRTREKVKGTKNEYKQVHTDDYILEDGQHEGIVSEELWQKAHTKRMATGIKQPSKIGKDRSHLLTGILKCPICGSSMYTNKHAWTNKDGTYKEVYYYICGRNKQERGHHCDYKASLRKTDIEPLVIEAVKELVSDKYFAKEIEKRIGVQTDTTAIDKELANYESKLKEVDLNKARLEREIDNLPIDARFRERKIHDMTLRLDGLYDTIVELEERIEDAKLRRSSIEMEAITLDNIYKLMLNFGKLYDIISDEEKKNLITYLIKEIQIYPNGESEMPLKSIEFNFPIYRDGQEVRRLLWEKGNTVETVCLLSRKASV

SEQ ID NO: 26169 - protein, 421 aa, synthetic construct
MKLRKIEPLKPKQKKLRVCAYARVSTDSLKQGESFENQVSTYERVIKSNPEYEFVSVYADQGMTGRSENRPEFQRMIADCKAGKIDLIITKSISRFARNTTTVLKYTRELKEIGVGVLFEENNINTLSSEGELMMTVLDSFAQEESRSISENNKWTLKKKFERGEGMVNTARFMGYDKDETGDLVINKEEAKVVRLIFKMYLSGIGCHRIAKALNEEGVPTIAESSWHASTIKGMLTNEKYKGDFHIQKTYIPEGTHQSVKNNGQVQSYYVTEDHPAIISAEEWQQVQELMEYHRKQRNIGKGEKYQKRYPMSGMLVCPYCGKSLRRRYVYNRKVEWLCATYIHKGKEACKGIRIRDTELTGLSFSEPMVVEEVMINGEKHYGYTSKRAYDAGERAADRIEKESSSVLPRVNGPRRTVIKL

SEQ ID NO: 26170 - protein, 421 aa, synthetic construct
MKLRKIEPLKPKQKKLRVCAYARVSTDSLKQGESFENQVSTYERVIKSNPEYEFVSVYADQGMTGRSENRPEFQRMIVDCKAGKIDLIITKSISRFARNTTTVLKYTRELKEIGVGVLFEENNINTLSSEGELMMTVLASFAQEESRSISENNKWTLKKKFERGEGMVNTARFMGYDKDETGDLVINKEEAKVVRLIFKMYLSGIGCHRIAKALNEEGVPTIAESSWHASTIKGMLTNEKYKGDFHIQKTYIPEGTHQSVKNNGQVQSYYVTEDHPAIISAEEWQQVQELMEYHRKQRNIGKGEKYQKRYPMSGMLVCPYCGKSLRRRYVYNRKVEWLCATYIHKGKEACKGIRIRDTELTGLSFSEPMVVEEVMINGEKHYGYTSKRAYDAGERAADRIEKESSSVLPRVNGPRRTVIKL

SEQ ID NO: 26171 - protein, 490 aa, synthetic construct
MKAALYTRVSTDEQAEHGFSLEAQKKRLIEYCNKNNIEIYKLYSDEGISGHSIIKRKALQEMLQDAKEHKFNYVIAYKTDRISRNLLDLLTIKNQLDEADVELLLSDEAIDTKDDAGMTMFSIMGAFAELERKKITERMMAGKRQKLMNEHIKLKNGRVPYGYLYDDENKKYIIDESRRSIVELIYKLASQGWSYNKITRHIAVETAANSSDSKKKWYISDIRAILTNPIYKGYSGISYYYNFNDRAKKPKNSAILYKATNVEPYFTEEYWDTLYSQLEKKTQYFKRKHPIDSYIFSDVLFCATCGLKIGTRQHHANYLYYVCNSKHKMYDNDHICDYAININKFNNWFIDFIKGIDENNIKLSVSRPKDLDKELQAVRSQINLKEKNREVLLDKLMNGVIDDTEYRLASNMVIASLNSLKSQEKELSDKMDSLKEKEQTKRYNRLKIKTLKALVNDWDNLSDQAKKTLINSSINKIMITKDGIQEIEFN

SEQ ID NO: 26172 - protein, 526 aa, synthetic construct
MPKVTMIPATVNSLTHLPKASVQKRRVAGYARVSTDSDEQFTSYEAQVDYYTRYIQSKPEWDFVRVYTDEGISGTNTKRREGFKEMIADALAGKIDLIVTKSVSRFARNTVDSLVTIRKLKENGVECYFEKEGIYTFDGKGELLITIMSSLAQEESRSISENITWGQRKSFADGKIHLAYKHFLGYKKGEDGRPAIVEEEAVVVRLIYRLFLDGKTQAGICRYLEDLEIPSPSGKAKWSKTTVTSILTNEKYKGDALLQKSFTVDFLQKKTKLNEGEVPQYYVEGSHPAIIEPDEWNHVQAEFARRKALGNAYSGKSVLSAKLVCEDCGGFFGSKVWHSTDRYRRTVWQCNNKFKGGERCLTPTVDTETVQQLFIKAYNQMMGNRKQIIEDCELMRKKLTDFKSLDADIERHLEETLIVAELVKAAVKDNAVTAQSQEAYLKKYESLTKRYETAAAELARLQNLRTLRSQKDKAVALYIRTLKKQPTVLSEWNDTLWTVMVEKAIVHRNSEITFVFYNGTKVKVRQ

SEQ ID NO: 26173 - protein, 547 aa, synthetic construct
MGYARVSTEAQDITRQVELITAYCTERNYHLIKIIQEKISGARKDRKSINELLEVDDTVADMIIVSELSRLSREDDILSVLSTINELLKQGVDILFLDKQDRIYKAGTVLSLYDIITLSVEAKASADERYKIAGRMQTGLRSKLSEFTNMFTGGTVPFGYKVIHNPDYKLNLTPKNLLVVDAQEAEAVKYLFQQLIDGNTIRQTVRVYNKLYPYKLSYSGICRIIRNPKYKGEIYRRGKLYGTIPELQIITPEVFDKANKQMRENNLFQSNAPKYYNPLKGLIFCPCGCSLYMKPNHNSYLIYRCSSSYNDKQRCENFGIKCSYVLSAVWTCVKETLHTEEYKRFNTERANELQGINKQIRETITRKVNNVDELKTQSASLIAKIKKLNNDDLINELETDYNVLCKQIKQIEQEISELNGQIAENDAEIKRSVEQKDFSEMEQSALYKEKLQKVVYHSLSAMRGILEIVFKNGMIRYVLIKKHRNGGVFLLPEFWTVDISRAVIIVPTHPSVDPEHPYTLLPTIPREYTFDTIITERDMDEYRITVS

SEQ ID NO: 26174 - protein, 558 aa, synthetic construct
MLQADKITALYCRLSQEDMQAGESESIQNQKLILQKYADDHHFFNTRFFVDDGFSGVSFEREGLQSMLREVEAGNVATVITKDLSRLGRNYLKTGELIEIVFPEYEVRYIAINDGVDTARDDNEFTPLRNWFNEFYARDTSKKIRAVKQAKAQKGERVNGEVPYGYIADPNDRNHLLPDPETAHVVKQIFAMYVRGDRICEIQNWLREHEILTVSEMRYRRSGSCRHPRPHPNCIYNWPDKTLYDILTRKEYLGHTITGKSYKVSYKSKKTKKNPEEKQYFFPNTHEPLIDEETFDLAQKRIATKHRPTKVNEIDIFSGLLFCGDCGYKMYLQQGAGTLERKHAYTCGKYRNRIRTGELCTTHYIRKSVLKELVLADLQRVLSYVQTHEQAFIQTANECSEQAMKKTMAQQHKELDKAQGRMSELNVLFRKLYEDNALGKLSDEQFAFLTSGYDEEKKTLTRRIAELTQELDTAAERSADVKRFVTLVRKYTAIEELTYENVHEFIDRILIHELDKETNTRKIEIFYSFVGRVDTGDKPTESISYFRQIGADVKSYAI

SEQ ID NO: 26175 - protein, 503 aa, synthetic construct
MGRKVTRVAFNAPEIPKKKNVAAYCRVSSGKDAMLHSLAAQISYYSELIQSHGEWEYAGVYADEAKTGTKDTRENFVRLLSDCRAGKIDLILTKSISRFARNTVTLLETVRELKLMGVDVYFEEQNIHSMSTDGEFMLTILASYAQEESRSASENQKWRIKKNFEEGKPWSSTLLGYRNVNGRFEIVPEEAQTVRMIFDWYLEGLGATAIRDRLNAMGIKTRLGNQWSRSPILKLLRNYTYTGNLLQQRTYRENHITKKCIKNQGEKPMYLAEGSHEAIIDMDTFNRVQAEIKRRAEKYKSPDGKKSSETYPFTSMVKCSLCGKSYIRSGSAKYRTWTCQTRRKEGLTHCNAEIIPEEELIRLTAEVLGGEVTKDAVMDKITVIRAEKDRTLIFCFKNGKEIVKQWKEHEVVYVCTEEQKRQISLKNSGRKPSEEQRRRHSEWMKEYWKNREYPEEWRKKQSEKMKAYWNAPEASDAHRQTVSRLTKERRAREKEAGKGEDNG

SEQ ID NO: 26176 - protein, 523 aa, synthetic construct
MRFFSYGRKSVFSDKSDSIDNQFRMNREYCESKFSGQVDSWQQFSDEDFTGANTSRPDLQRMLSFIKGGFCDVLVVYQLDRLSRDVRDFANIYALLEEHGVMFISIKENIDTTTPIGRAMMYVTVVFAQMERETIAARVTDNMLGLAKKGYWTGGNPPVGYVRKHIVVNGKKHCSIEVDPDGARYVTQIFDTFLAYNCSLQGMETRFKNQGIRTQNGKFFSTAQLHKMLTMPYCVEATPEVYDFYAAKGCIMDPGSPREMWDGSAGVIIYGRSTEKNKKHQLQPPEKWTVCLGKHKPFMPAEKWLAVQSRFTQNKCIKDAKWPVPLLKGVLRCKCGNLMQVSRKKKVDGTCSSWYYCRKRMRQGVDACDMGQIKCDLLDEKVLELFRGITADPALIQKFVKAEAPADVPDLKAAQARVSACERKIGRLAASLALAEDSAASKYIIAEMERLDVELGALKREASLAEMESHQAAASAKDAKATAAEIAKLIHGLEGFDDKEKNAIARAVIQECTWDGERLFITL

SEQ ID NO: 26177 - protein, 503 aa, synthetic construct
MEITVEKVDTGVQKLGFQALSTLKTVRVAIYARVSTDQEIQLHSLEEQMKAFRAKIAQHPGWMLVDVYADEGISGTSVKKRKEFLRMMEDCEAGKVDYIMAKSISRFARNTVECLSYVRHLQSIGVQLFFEKEGLDTATSVSELILTVMAAFAQEESRSISENLKWGIRKRFESGESRWTKTYGYRKTKDGEIVIEPDEAAIVRMIFKMYQYGIPMTDILDELTFIQAPSARGKQTWNKTALKYLLENEKYIGDMRLQKWVSVDHISHRSVRNDSTVIPVYNVRNHHVPIIDRHTYQQVQRIMELKSPHGEYSRYPYFDTNIVCPLCGKKMIPRVMKVNSHKRILGCFDVDGCRGYAVKGYLVDAALLEAYNTLEIKEKKRTVAMQRMLEIKAESPKLDTVQYYWLDDLVGHIEFKQDTMRVFWKCGLESEVALNASKVEEPTHVAELYRNSLDRAQRSENKPVSVVRADKKSVNTREAQRNAAMQTAKNLRAKENGVAANDY

SEQ ID NO: 26178 - protein, 434 aa, synthetic construct
MERVVERVDALIPAQPKALRVCAYARVSTGKDAMLHSMSAQVSYYSKMIQSHSGWMYCGVYSDEAVTGTKRERAGFQHMIEECRQGNIDLVITKSISRFARNTVTLLQTVRELKNLGVDVFFEEQHIHTQSSDGELMMTILASYAQEESLSASENQKWRVRKAFENGEIINLRFLFGYDITPDGIQVNEKDAAIVREIFERFNNGESMSSICRDLDTRGHKGVLGGTWCAERMRNTLSNEKYLGNALLQKQYRNNHIEKKLLPNRGELPMYYAEGTHEPIIDQATFDKAQERLRMLAQQAANRKKPTRSVFSGLIHCGLCGNTYKRVTYRKKHYWNCTTFQTKGKSECAAKRIPEETLEVLTCEVLGAVSFDPDMVRSKITAIRAEKNNVVVYCMDDGSEIVKRWKDRSRAESWTPEMKEKARQRALQARRKKE

SEQ ID NO: 26179 - protein, 529 aa, synthetic construct
MNRTAARSVTVIPPTINPLTHLSRVAVQKRRVAGYARVSTDSDEQFTSYEAQVDYYTQYIKRNPEWEFVKVYTDEGISGTNTKHRIGFNEMIADAMSGKIDLIVTKSVSRFARNTVDSLVTIRKLKEKGVEVYFEKENIYTFDGKGELLLTIMSSLAQEESRSISENVTWGQRKRFADGKVNLPYKQFLGYRKGADGFPEVVPEEAIVVHRIYTRFMEGLTPGAIAKELTADGIPTPSRKQRWQTSTVESILQNEKYKGAALLQKCFTVDFLTKKRKVNEGEVPQYYVEHSHEPIITPEEFDKVQTELARRKHISRQYSGKSIFSSRIVCGDCGSYFGSKVWNSTSKYRRVIWQCNGKFKGEHKCETPHLDEETIKVQFVSAFNAIIESKDNILEDCRLMQTTLTDCTGIDAEIESLLEEIEVVTELTKRCIAENSQTAQNQEEYAARYNGLVERYEKAKARLEQLRTTKAAREAQTEAIGAFMFEVQELDALTEFDEKLWLTVIDTVTVHADGRMTFKFQGGKTLTSY

SEQ ID NO: 26180 - protein, 486 aa, synthetic construct
MKTAIYIRVSTQEQAKEGYSIPHQKEKLFKYCQAMNWQVVEIYADEGISGSTIEKRPAAIKMLQDAKKRLFENILILRVDRLCRNTKDLLEIVETLKKYDVSLNAVDQQIDYKTSIGKMTLTILGTFAEFEHSTIHERTMEGRKQKAKQGIKSLGRRVPFGYNYINGCFVANSDAKIVKLIFEKVADGYGFNQTATFLRNNNIPTIDKLDWNRLHIKRIINNKIYMGHCVLKLNMTEVVDTIATNVEPIIDEKLFIQAQKTISYRTKGVFSKYAYDDFIFSDVLYCSCCGWKMSPKKTKRTDPKINEAKLEDRIYRYYKCIYNMSHPTKQTCLNTKILNAEKFEKHFLLYMDYFIIELKKPLKLQKKITSSPTNKDFLEKQIKELTQKKSKLLDKYLAGIIDDSSYITKNDELIEEIKSLENKLNFKEELLDKENKEINVDFLNGLKFVFSDLWSIMSNHEKRNFITQTFEKIEVNQGKIVKIILR

SEQ ID NO: 26181 - protein, 464 aa, synthetic construct
MARSVTVIPARSQKVRTGHKAVQEKKIRVAAYCRVSTDQEDQLHSFEAQVEYYTKYINEHENYEMAGIYADEGISGTNTKKREQFKKMIADCEGGKIDLVITKSISRFARNTQDCLAYSRKLKNLGIGIIFEKENINTLDSTGELLFTILSSLAQDESRNISENCKWGIRTKFKNGEMHLNTFKFLGYDKDENGKLVINKEQAKTVRRIYRDFLIGINPAQIAKELTEEKVPGCLGQTKWYPSTVIGILKQEKHMGDALLQKTYTADFLTKRQVRNNGEIAQVYVKDSHKGIIDKQTWNAVQEEFDRREKFMEAHGTDRYSYGADCMPFCEKVFCGECKSLFTRHSWRSRGIVQWQCKNHRKDGKVACTNAYVDNADLENGFVKAFNRLVTDRDKHMERWQQMKADGTPLEKIRAGQMMEAVGNEPLTRFVPEIAQLVLCEVTVLGAKKYEFFFLEGSRVKVSV

SEQ ID NO: 26182 - protein, 502 aa, synthetic construct
MEIQIREGNSRQKQKLKVCAYCRVSTDADEQENSLENQIRHYKEVITSNPDYEYAGVYSDFAISGFKEKRPGLQKMLADARRGKIDLILTKSVSRFARNTSIVLEATRKLKELNVGVFFELQNINTLSGEGELMLTILAAFAQAESESGSVGAKMVYQRKYEAGIPVQYLERSFGFKKDERGVYIADEEEAVWVRKIYDMAAQGYTLAAIKRYLNENNVKTVGGAKWLDSTVLRILENEIYKGDYIMHKYFVNEERKLVRNRGEVDAWYIEDDHEAIVSPELWQKAQDALEAKRDYLAEGSVIEEFTEENYPYMNRIYCARCGHPLYKRIYSNGNRLNWGCSGTKRYGRSFCEGINIPDGVLREAWHFDENMYIGEKQTDKGKKEFTYLKEASWKRRHKKKEPEPIPENTETEYPYREKIFCGLCGSRLVRHVNTKNHKVIWVCNGRKRKGKDFCDGTRVPDTIIKGWGEIKKDIYIQRKDDKNGKKRYSYTSKKPKGADRA

SEQ ID NO: 26183 - protein, 464 aa, synthetic construct
MARSVTVIPARSQKVRTGHKAVQEKKIRVAAYCRVSTDQEDQLHSFEAQVEYYTKYINEHENYEMAGIYADEGISGTNTKKREQFKKMIADCEKGKIDLVITKSISRFARNTQDCLAYSRKLKNLGIGIIFEKENINTLDSTGELLFTILSSLAQDESRNISENCKWGIRTKFKNGEMHLNTFKFLGYDKDENGKLVINKEQAKTVRRIYRDFLIGINPAQIAKELTEEKVPGCLGQTKWYPSTVIGILKQEKHMGDALLQKTYTADFLTKRQVKNNGEIAQVYVKDSHKGIIDKQTWNAVQEEFDRREKFMQRHGTDRYSYGADCMPFCEKVFCGECKSLFTRHSWKSRGIIQWQCKNHRKDGKVVCTNAYVDNADLEKGFVKAFNKLVTDREKYMEIWQQMKSDGTPLEKIRAGQMMEAVGNEPLTRFVPEIAQLVLCEVAVLGAKKYEFFFLEGSRVKVSV

SEQ ID NO: 26184 - protein, 502 aa, synthetic construct
MEIQIREGSREQKRKLKVCAYCRVSTDADEQENSLENQIRHYETVIKANPDYEYAGVYSDFAISGFKEKRPGLQKMLADAEKGKIDLILTKSVSRFARNTSIVLEATRKLKELNVGVFFELQNINTLSGEGELMLTILAAFAQAESESGSAGAKMVYQRKYEAGIPVQYLERSFGYTKDERGVFVADEAEAVWVRKIYEMAADGYTPASIKRYLNENGVKTVGGVQWVDSTVFRLLENEIYKGDYIMHKHFVNEERKLVRNRGEVDAWYIEDDHEAIVSPELWQKAQDALVAKRDYLAEGSVIEEFTEENYPYMNKIYCAKCGYPLYKRIYSKGNRLNWGCSGTKRYGKTFCDGINIPDGVLRSAWHFKENTYIAEKASDKGVKEFTYLKEQSWKRRHKKKQPPAIPENTEAEYPYREKIFCALCRSRLVRYVNPQSHKVTWVCSRRKRKGKDACDGTRVPDTIIKGWGEIKKDIYIQRKDDKNGKKRYSYTSKKPEGADRA

SEQ ID NO: 26185 - protein, 565 aa, synthetic construct
MDENKKIVALYVRVSTGYQVDKDSLPFQKKELRAYCEHMLHIDKKQVEVFEDAGRSGKNTKRPAFERMMEKVKSGQVSHVIVYKIDRITRNLVDFSLMYDDFKYNNVTFISLNEQFDTSSAIGEAILKIILVFAELERKLTSERVKDVMIGRAQNKQWNGARVPYGWDWDAEKKCPVHSKKEAPYAKAMYRMYLDGGSSVTICDYNNSHNIPTKRGGEWTSKTVADFLRNPINRGDYRYNYRESARGKKKSDDEVVYIKDVFPPLIDPNIWDEVNRRMDANSQNRNTSVFHPIRKRCNVFAGLMICGKCGSGYQVKGKDSRKGDGFRPSSYACTGKYQKKNCDNLNVSDVKIGPFMLNYIAAMVDASKSRRFIKDSESLERVILSHISFSDVAGISVSSLQDTLDLLFGRSGSELLSGKPISSGATDESKTTELKEKLQRTDRALERLKKAYLFDDDGMDEKEFLEMKSKLEVDRIKLENSIKGLESSSISENVDQAAFLKSASQFLISHKINSGDYIDYSRLAALDEESMKAFVNSIVDHIVVLDKHITEIVFKNGLTHTLLYR

SEQ ID NO: 26186 - protein, 523 aa, synthetic construct
MAEKHLTDGTTALAAQPRVIKIEAAEKSQNAQLRVAAYTRVSSDSDDQLNSFAAQNRYYAELISGKAEWRMVDIYADEGITGTSAAKREDFQRMMADCRRGLIDQILVKSISRFARNTKDCLEAVRELKELGVNVRFEREGIDTANVSSELITAIYAAFAQKESESISGNMRWSYQRRMESGEFNTCRAPWGFRLDGKSLAVHEEEAEIVRRIFLEYLSGRNPREIAEILNAEDTSGRIWKYKAVDYILQNERYAGNALLQKRYTTATLPKQQKINHGEREMYYVADSNEAIIPQELFDRAKELRRRRSVGQAVTHGRLCVRMRCSCGSRIRAKQVNGRWYWCCCRHDEKGDCVIKPVPEAQTDEAFRRLYYKLKHQSLPILEQMLETLRTIRDRRLLWSEDIVSLNKKISELSSQNQTLAFLKQNGLVDPDIFISKSNELTRQIRQAKLDKEELMDAEGDAIAQRTQELIALLEDGPDFLDHSDTELCGALVAEIIVESNDTLRFRLHNGLELRESIERTVR

SEQ ID NO: 26187 - protein, 539 aa, synthetic construct
MNETAPRVIKIPAKPESVRQAELQRQLRVAAYCRVSTKEEDQANSYEVQKEYYTDKIMSNSAWTMAGIFADKGITGTSVKKREDFMRMIRHCRQRKIDVVLTKSVSRFARNTVDCLYYTRALKELGIAVIFEKENINSLEEDSELRITLSGAFAQSESESISANVTWGKRRAMESGKATIQYKYLYGYRRGADDKPEIIPEEAEVVRWIYERYLAGASTRMLRDELHEQGVIYSEKSPQWTLPHIKSILRNEKYCGDVLMQKTFQQDVINRKVIKNTGQLPMYLIENHHEGIVSREKYNAVQAEMARRKAAKSPSKRASTGLAAYTSRYALSDRLVCGECGTLYRRCTWTRPDGKRVVWRCVSRLDYGKKYCHSSPTLDEAPLQQAIIAALNTVLPDLDGRIRQITEALEAEVIPFPGSGMSLGDIDRRLAELEAQFQRLLEKAADDPIAYGDQFKEILDEQTALKELRASILAENKEHAEADRRIRDAAGMLENAVPHIAEWDESAIRQLVAQVKVLSKNEISVTLKSGIEIRQSISD

SEQ ID NO: 26188 - protein, 492 aa, synthetic construct
MSNIAVIYARVSSKEQETGGYSLPAQLDFLKEYAKSKGLEVVKVFTESMTAKEAGRIEFNNMLKFAKKQRYGCHVIVEKNDRLLRNEDDEALIINLTVRQGLIDLHLVKDHLILNRYSTPHEIFMFHMMCGMSSMYPRNLSGEIKKGLDKKADLGDYPAKAPIGYKNVRSSKKRSTIEIDPTNAGYVSKIFELYATGMYSYKTLAERISLDGFYPKNKPCSPKLVEKIIINPFYMGEFEFNGKRYHEANHTPIITKELFYTCKKIRERHDNPRKITHDFLYSGLITCSHCGCQLTAEIKKGKYIYYHCTGNKGGTCKRNKYLKEEYIDEHIRTLLEKIQPSKEDAKAIVEKFKEIVNANFDYDKKSMEEIGKKISLLKNRLNKLYIDRLDGMITDEFYREKKNEFQGELDELELKHDNFLAETDTLVDMATQIIELCKNAYNHYLRSDNENKRLLLKILCSNFLYDGSNLVIKLKSTVEPMLLGANFQNGGP

SEQ ID NO: 26189 - protein, 535 aa, synthetic construct
MDYKKVVIYTRVSSREQEKEGFSIPAQLKLLREYAQKNGFEIVQEYSDAETAKKAGRTNYNAMLDYLKANPDTRTILVEKTDRLYRNFKDYVTLEDYDLEVHLVKEGSIISKNSKSHDKFIHGIKVLMAKNYIDNLSEEISKGLHEGLEQGYWPFQPPYGYKRGAKKSLYIDPLRVCFVRRAFELFATGRYSLRKLSEKLFEDGYYYQSERPKITQCVLESMLKNVIYTGQMRCNGIIYQGKHPAIVGFNLFNKTQQAFKKVSKSKVRKNFHFLYPGLAKCEVCGYAMCGEVQKNNIYYRCSHHDRTCTNTSYISEKQMTSALRRHLSRIALNDKLYELVKTSLTESLRDEQHYHKTELERLNKEIEKCTDILKKMYLDQLNKVIDMDLWITIKNEYEIKLNRLNADLQRHQNANIDYLETGMKILDVCHKASLPYSELKPEMIAQLVWQSYSSVTVKAKSVKVKFAEPFATLEKLIRLAKQGIDEYGYDEFAKTLANTKVTCLKGIKKEPVGSIDSISPSSTCMKWWRIGDSNS

SEQ ID NO: 26190 - protein, 545 aa, synthetic construct
MRTIRKIEQKISGLKQRKKVAAYARVSMESERMHHSLSAQVSYYSKLIQKNPNWEYAGVYADYGISGTGIKKRQEFRRMLEDAEAGKIDIILTKSIQRFARNTVDLLQTVRHLKEQGIEVWFEKENIHTMSGDGELMLTILASFAQEESRSISDNIKWRFRKKFEQGIPHAKFFVYGYCWEKDNLVIQPEEAAIVREIFDAYLQGRTRKDILRELKRREIRTMYGNYFKDASIRQILTNRIYTGVLEIQKTFVTDPITKRQAVNHGERNRYVVEWHHEAIISSDMFERVQQELKNRKEMGMQRGGYARDFLNTSCFTGIIKCGICGKSYVHVVRKYKGRIREYWTCDSHKGKGTNCGAYGSIPQPALKKACAAVLGTDEFDEELFVQRVKKIVVPSYHTLVFHFKDGNVITQEWKSTALKDMWTDEQKKKQRQWMETYHQRDTSGRYTAFSERIVCPACQTKFIRCLEKRKNRQVAYWRCRGENRCIHVRSIKEEWLQRMAAETMGKLEFDDTAFRAQVQRIEVQDNETLLFQFNDGHTKEVKLP

SEQ ID NO: 26191 - protein, 502 aa, synthetic construct
MEIQIREGSREQKRKLKVCAYCRVSTDADEQENSLENQVRHYETIIKANPNYEYAGVYSDFAISGFKEKRPGLQKMLADAEKGKIDLILTKSVSRFARNTSIVLEATRKLKELNVGVFFELQNINTLSGEGELMLTILAAFAQAESESGSAGAKMVYQRKYEAGIPVQYLERSFGYTKDERGVFVADEAEAVWVRKIYKMAAEGYTPASIKRYLNENGIKTVGGVQWVDSTVFRLLENEIYKGDYIMHKHFVNEERKLVRNRGEVDAWYIEDDHEAIVSPELWQKAQDALAAKRDYLAEGSVIEEFTEENYPYMNKIYCAKCGYPLYKRIYSKGNRLNWGCSGTKRYGKTFCDGINIPDGVLRSAWHFKENTYIAEKASDKGVKEFTYLKEQSWKRRHKKKQPPAIPENTEAEYPYREKIFCALCGSRLVRYVNPQSHKVTWVCSRRKRKGKDACDGTRVPDTIIKGWGEIKKDIYIQRKDDKNGKKRYSYTSKKPEGADRA

SEQ ID NO: 26192 - protein, 555 aa, synthetic construct
MDKRILCIIRASTEKQETESQKKELISYCEAKGFTVDEMAFIEVAGASARKLNKKYIQMLEDIKATLLSSPTIKAVALWDLNRLGRVESKLHEMKEFFVAHKIQVYCKSPEFVLLNEDGTASDAGGIVFSVFASIVKHDTDEMFAKMNRGRMRNKENGIYYGGQIKFGYTLDETKRFIIKEEEAKTVRLIFELYATGKYSFYSLIDELKARGITKNGKKITFEMIQNALSDETYYNGKLPIISKDLFDKCTAIKANSVAVKRTKETCNVNFAVGLLKCECGNNFIASGDYYTCYSKVNRKRKKVVIECDAPVIKSDLLDDLLWIVTRPLQQKFLMQTDSQSVAENKDKINVLTVKVSTAQKKLSSFKDRIEKLEDAYYIEGEMDETQFKKRLGVLKSKKVQTESLITNYSNEINDIKKVIEQLEQPINDRYLQSLLLSDLDTEDIEDRKKIKEMMFMHIEKVTAKKVMLGNHKGVEITIIAKSGLSFVFFYDVWLSSFRKGECNTFYEDKPLYEVNGFIKTINTKVQNMIYEKIGLPLLSYKELGEAAAEYAKTH

SEQ ID NO: 26193 - protein, 464 aa, synthetic construct
MARSVTVIPARSQKVRTGHKAVQEKKIRVAAYCRVSTDQEDQLHSFEAQVEYYTKYINEHENYEMAGIYADEGISGTNTKKREQFKKMIADCEGGKIDLVITKSISRFARNTQDCLAYSRKLKNLGIGIIFEKENINTLDSTGELLFTILSSLAQDESRNISENCKWGIRTKFKNGEMHLNTFKFLGYDKDENGKLVINKEQAKTVRRIYRDFLIGINPAQIAKELEEEQVPGCLGQTKWYASTVVGILKQEKHMGDALLQKTYTADFLTKRQVKNNGEVAQVYVKDSHKGIVDKETWNAVQEEFDRREKFMQRHGTDRYSYGAECYPFCEKIFCGECGSLFTRHSWKSRGIVQWQCKNHRKDGKVACTNAYVDNADLEKGFVKAFNRLVSEREKHMERWNAMKADGTPLEKIRAVQMMEATENGQLQKYVPEAAQLVLEEITIFGAKKYEFAFLEGSRVKVSV

SEQ ID NO: 26194 - protein, 502 aa, synthetic construct
MEIQIREGNSRQKQKLKVCAYCRVSTDADEQENSLENQIRHYEEVITSNPDYEYAGVYSDFAISGFKEKRPGLQKMLADARKGKIDLILTKSVSRFARNTSIVLEATRKLKELNVGVFFELQNINTLSGEGELMLTILAAFAQAESESGSVGAKMVYQRKYEAGIPVQYLERSFGFKKDERGVYIADEEEAAWVRKIYEMAADGYTPASIKRYLNENGVKTAGGAEWIDSTVFRLIENEIYKGDYIMHKHFVNEERKLVRNRGEVDAWYIEDDHEAIVSPKLWQKAQDALEAKRDYLAEGSVIEEFTEENYPYMNRIYCARCGHPLYKRIYSNGNRLNWGCSGTKQYGKSFCEGINIPDGVLRGAWHFDENMYIGEKQTDKGKKEFTYLKEASWKRRHKKKEPEPIPENTETEYPYREKIFCGLCGNKLVRHVNTKSHKVIWVCNGRKRKGKDFCDGTRVPDTIIKGWGEIKKDIYIQRKDDKNGKKRYSYTSKKPKGADRA

SEQ ID NO: 26195 - protein, 522 aa, synthetic construct
MGNVMLIPARRQVGSNARKQEEEKPKLRVAAYCRVSTDSDEQATSYEAQVEHYTEYIQKNPDWEFAGIYADDGISGTNTKKREEFNRMIDDCKAGNIDMIITKSISRFARNTLDCLKYIRQLKDMNIPVLFEKESINTMDAKGEVLITIMASLAQQESQSLSQNVKMGLQYRYQQGKVQINHNRFLGYTKDADGNLVIDPEQAETVKRIYREYLKGLSMDKIAAGLERDGILTGAGGKKWHTSTINKILRNEKYIGDALLQKTYTTDFLNKTRVKNNGLVPQYYVEGDHEAIIPKDIYLQVQEELVRRRVGKTSANGKKRNYSCNHCFSQIVICGECGEMFRRLHWNNRGVKSIVWRCISRLESTGLECHARTINELVLQDAVVKAINQMLGDKSNYQAQLQLNIAAVIRASQATAIDSIDEKLMALQQELIQKANSKEDYDEIADEIFRLRELRQKTTVDTAARDEQIKRINDLQDYISQQTSYLTEFDEALVRRWIKQITIWDDRITVELKSGVSIDVDA

SEQ ID NO: 26196 - protein, 521 aa, synthetic construct
MKKVTKIDNVQKNTAINSKLRVAAYCRVSTGSDAQLESLEAQKSHYEQYINSREDWQFAGLYFDEGITGTKAEKRPELLRLITDCEAKKIDFVITKSISRFSRNTTDCLALVRKLQNLDIPLYFEKENINTGSMKSELFLAILSSMAEGESASISENAKWSVKRRFQNGTYKLGYTPYGYDWYGKNMIINPEQAAVVKRIFADILSGKSTNAIADELNAEKVPSKKNNHWTASTIRGILANEKYTGDVIFQKTYTDENFNRHTNYGEVDQYMAPDHHEAIISHSDFDAANALVNQRAAEKGIEKGSDKYQQRYAFSGKIICGECGDTFKRRIHTCNTYKYVAWACNTHLKDKKSCHMKYVRDDEIKVAFMTMLNKLIYGYRLVLIPYLKVLENSSGDEAIQRIQHLELLISQNSEQREALTKLMAQGYIDQILYNQETNALLLQAETYRSDIEAITIGMTGDAAKVTETNLLLHFVSHTDMLTAYSEELFENYADHIEVISRNEIKFAMKCGLTFTERIGD

SEQ ID NO: 26197 - protein, 598 aa, synthetic construct
MEITLIKKKEERIDRRTGKPIERMRVVAYARVSTDNDEQLNSYESQKKYYKEKIMSNDEWSFGGIYADEGISGTQDFKRENFMRMIEDALENKFDLILTKSISRFARNTLDTLKYVRLLKENNVAIIFEEEGINTLEMSGELLLTILSSVAQQESETISSHVKLGLKMKSQRGELVGFNNCYGYHYDSKTNKMIIIEDEASIVKLIFKNYLDGHGCDYIAKLLTEMKVETRRNKGNWLPSTIMKILKNEKYVGDVLQGKTFTIDPISHKRLTNYGEADQYYMRNHHEPIIKREDFEKVQEIIKNRVGARATGRRLGNIGRKYTFSGKIKCGFCGNTYVRRAMYSKQGSTCIWDCLLNIRSGKESCENSKAMRENLLENVFVDAFHRLCNNQNMDKDQLIKIITSALRDDRNIEKVKSLEKEKINIEYQQQRLIDLMIDGTIDKESYNKKKVTFDNKKEKIDKEIEQYRLLTEDEDKVESGIKKIKEVIDSNKLLDGFDRDVFDALVDYIIIGGYENGKKDDCMIRFICKTQFDDTPREDLTKQKIIDNNDIMDYKCNSFINILDFYSNQQFFYFYVDENGKKRKKVINSVRVRVEVEK

SEQ ID NO: 26198 - protein, 541 aa, synthetic construct
MPKKTAKHPAKPKRGKKLEIEEPGVLYGRYSSHNQKDISVEQQFEKGYELAAEYGIRIIDTYADRAVSGRTDKRKDFQRMMSEAAKGKFRYVIAWKSNRMGRNMLEALINEARLQELGVRVLYVEEDFDDTAAGRFAARSMMNVNQFYSENMAEDIKRGLYDNASNCMVANGHLPYGYKRDETLHYVIDEPKAAVIREIFTRVAAGEPFVDIMNSLNARGIKTSYNRPWGRSSFQKILSNERYRGIYIYGDVRKEDGIPRIISDELFFKVQEVITTKKNPQGRHRVNGDYLLTGKLFCGKCKSPMVGISGTGRSGKLHYYYVCQKHRTEKTCDKKNVRRDEIELQVAQAIKDYALKDDVIEWIADSTVAYNERKEAESKVGILEDQLAGTERGIKNIMSAIEQGIITETTKSRLVELESERATIKAKIAAARADIVTVSRDDIISGLEMFRDGDVYDKKYQARLFDTFLVAVYVYDDDLRLVFSFSGNKNTIQIPIESAVNAVENNAAECSFKLCSAPPKSKILLTNVNGIFNFVLFILHH

SEQ ID NO: 26199 - protein, 474 aa, synthetic construct
MKKTITEISPKETKSKKGLAKSKLNVAAYCRVSTESDEQMNSLANQKEYFEKLIKSHEDWNYVDIYYDEGISGTSLKKRAGFNRMIVDALAGKIDMIVVKSISRFSRNTVDALQTIRNLRNHDIRIFFEKESIDSNDIKSEFMLTIMSSLAQEESQSLSENVKWGKRKIAQKGFVQIPYSNVLGFQQKGKYGIEIDREQAKTVVLIYDMYLHGKTTGEIIKKLIENGTPTPTGLEASHWCNTAILSILRNEKYCGDAILQKTYTKDFLNHKKCINDDVFPKYYVKNNHEEIIPRATWEYTQELLEKYSKRSVSVRCGDLIFCSACGRKYRRFHRYHKYYEETILSYRCLGKYDKSTNCTNITLFEKQLDELYHETVLQLLSIYKKELLEYFKLTIPKVIKGKRKSNRIIKLLDNMISFIQSDYEYYSLHILIKKILVHPNKTLEFTTLDGSIIKIAIPKYKLVDHYGRKKTSGN

SEQ ID NO: 26200 - protein, 436 aa, synthetic construct
MQITKILATKKLEKKKLVCAYARVSSDKDAMLHSLSAQVQYYKDYITRNNDWLFVKVYYDEGISGTKQDRPAFQQMLQDAKDGKIDLIITKSISRFARNTVTLLEAVRKLKSYDVDVYFEEQRIHSISSDGELMLTILASYAQEEARSVSENMKWRVKRNFEEGKPWGRAPYGYTIENSKFVIVPKEAEAVKLIFKLYLDGIGSYRIKDIMNKSEYPTRNNCMWAETTIRGMLKNYIYTGNAVFQTTYVKNYITKKKAKNNGEKPMYHVEECHDAIISIEDYNKVQKIIKERSKKIHKGITPKDNPFKGKLICAHCGCTFRMKKNYKKFVWRCGTYISLGSKGCLSKQIPNDALQILTKEILGVDELTSEIIDERIEKVIAGDDRLLTFYLKDGSQIDAHWMQKSRSESWTEEMKENARRKVVERNGKSNGNSINN

SEQ ID NO: 26201 - protein, 529 aa, synthetic construct
MAKVTVIPSTINPITKLPNNGLQKRKVAGYARVSTILDEQCSSYQAQVDYYTNLIKRNPEWEFVEVYADEGISGTNTKRRGGFNQMMQDALDGKIDLILTKSVSRFARNTVDSLTFIRKLKEKGVEVFFEKENIYTFDSKGELLITIMASLAQEESRSISENVTWGKRKAFSDGKVSMPYKHFLGYKKGEDGRPTIDEKESLVVKEIYSLFLRYGFSTTKIAKEFNERGICTPSGKGKWTLTTVESILSNEKYKGDALLQKKYVVDFLTHKSKPNEGEIPQYYVENSHPAIIDKVEWDLVQIELERRKKLCKTYSSKNIFASKLVCEDCDSFFGRKIWHSNDEHRTIVYQCNGKFKNKDRRCKTPILREEEIKSMFLKAYNHFVFDKTALVDDCKLMIETIIDVSSLDEQISKQIEKMEELAQKVKELVSSNASTPDSQTDYINDYDRLCTMHSIEKTRYKLLLKEKSGRLAKAKSMELFIESIKDKPDVIDSWNSDLWILLVDKAIVHHDKSITFVFKNMKEITIAAE

SEQ ID NO: 26202 - protein, 467 aa, synthetic construct
MARKIEVIPARPEFTNRAERKQRKTRLAVYCRVSTSQEDQLESFENQQVHYRDYVASHPTYELVKIYADEGITGTNTRKREEFKAMIADCVAGLIDMVITKSISRFARNTADCLQYTRLLRDKGIGVLFEKEDIFTLDGKGELLITIMSSLAQDESRNISENITWGIRARFQQGKMHLNTNRFLGYDKDKDGALVINEAQAEIVRRIFDQFLDGLSPDIIASRLNHDGIPGVCGIPQWKNSTIKNILRNEKYKGDALLQKYITEDYLSGRIIRNDGRVEQYYVKGSHEAIIPAEKWEIVQLELKRRDNYRIKHGLRTLGRYTDEQPFSNKVFCGVCGALFWRRTWYRLAGEVKIWHCTDRYDKDDRPGCPSLIIKEKDLHRAFVVAWNRIRDTRDERLPVWQKQKDTGTPLVAFYAERFIQLSAGEPMKEIDLSIVTKTLEHVVVSKNGSYTFYLLDGSKETVDLQK

SEQ ID NO: 26203 - protein, 427 aa, synthetic construct
MDRIIKRVDFPKIMQPQFLKVCAYTRVSSGKDAMLHSLSAQVSHYSEMIQSHTGWVYCGVYSDEALTGTKSDRDGFQQMLTDCRAGKIDMVITKSISRFARNTVTLLETVRELKSLGVDVFFEEQNIHTMSADGELMLTILASYAQEESRSVSENQKWRVKRNFEAGIPWNGRMLGYRMQDGKYYIIPEEAELVRRIYREFLDGMGRNRIAAKLNDEGIQPTRFGEEWHPQTIAKILRNYAYTGNLLLQRFYCESYITKKTVPNNGQKTMYHAERTHEAIIPLEEWKAVQTEIERRAEQHKSKPPAQPSFFYTGRIQCAKCGKNFRRKTTAARVVWICATLNTKGKKHCASKQIPEATLDELVRQVTDDPFSVKKIIADDGNTLHFHFSDGSVVTRTWTDRSRAESWTPEMKEKARQQSLARRRQKS

SEQ ID NO: 26204 - protein, 518 aa, synthetic construct
MSIMSFSNIIIYLRKSRADDPTMTVEEVLAKHESILQDYCIAEFGQPMPESRIYREVVSGETIQDRPVMQRVLRLLESGNIDGVLVVEPQRLSRGDLEDCGHIINSFRYTNTAVITPTKTYNLQDEYDRKFFEMELTRGNDYLEYTKKILARGRLAAVMSGQYIGSVRPYGYNKVVYGSGKNRIRTLEKFKKENDILILMKRLYLDNDYTPEEIARTFDSMGIESPRGKHWTASAVRRLLASPINNGKIVWNKRQTVVEWRNGKQVKSRAKSNKDDVIIVQGKHPATYDDETYTAIMAKLSIHSVKVTNQRGLRNPFAGILFCQCGRAMSLRSTHNGHSVILICNDHFYCHTRSVAFNPVLDKVKEALSEAITDFTVKISNKEHTESELYALNISTLENKLEQLYKKDLVQKDAYEDGVYSKAEYIQRNTQLQEQISAIAVSLKEAKAKAPEVINYKDCIIRFQDCLNALEDNNVSIEVKNALLKACISKIVYHSVNSNPEYSGRTKNPFNLEVFFKL

SEQ ID NO: 26205 - protein, 548 aa, synthetic construct
MKFKYPAMGTTKNAVIYARYSSHSQREESIEGQLRICHEYAKAEGLAIVGEYIDRAISGTTDARPDFQRMIDDAKKKQFSYVIVYRLDRFARNRYDSVLYKHELKQCGVKVVSATEGIGTGDESILLEALIEASAEYYSMELSRKIKRGRQDSAMKGNFLGGAVPLGYKVVDSKFIIDDETAPIVRYIFERYAAGIGKKQIIDELTAKGYMRRTGKPFTYRAFDSVLRNRKYTGEFTQTGITVEGGCPAIIDTEMFEKVQARLEINRRAPAKAKAKTEYLLSGKMFCGYCGEPMIGISGTGRHGKTFYYYSCVGRRGKSGCKKQHEKKDFIEWYVCEQTVQYMQDPERLSHVAKRIIEINDAEFDGGKVKELERAVENCDNDIRKLVDALTTIPDAGRAALYDKIERIGAAKADMEIDLAKVRVLSEVRYKQEDVEAWIRSMCRGDLMDFEFRRQLIDVFINSVYLFDDRVVIVYNIKNGKQVSAIDVLNAVEELDGVELFPDSAEDSSAGGSGSFLVTDAPPYMKNPNLFPIGNGFGFLIFIKDIID

SEQ ID NO: 26206 - protein, 510 aa, synthetic construct
MQKRRTKYANSQGDNAVIYARYSSHNQKDTSIEQQIEVCTKYARDNGYRITNIYADRAISGKTDARPQFRLMMQDAREHKFDVVISWKSSRLGRDMLDAMTNDIILRNLGIKCFYTEENFDDTAAGRFALRNMMNVNQFYIENMAEDILRGMRDNAKKCRVNNGSPPLGYRRGDDGKYEIVPEEAETVREIFTKVLAGMAFVDIANELNARGIKTKKGAPWGRSSFSRLLSNERYIGTYKWSDIVIENGMPAIIDREVFEMAQKKIKGERPLRRRHNENGDYLLTGKLFCGKCDSPMTGMSGTSKSGAKHHYYACYSARKDGSCDKKAVKRDWVEKTVALFIKEHVLRDEVIEWMVDQYMVYQKATFESQRIMEMRNQLKDVQSQLDNLVDAIARGMYTDSTKDKLLKLEADKKEIEQDIRLATYNLKEYDREHVRCYFLSFKEGSVESKDYLKRLFDQFVTKIYLYDDEIRIAFSGTKDESPVSFTIVDEAEELSDNSVRLSSASSHQA

SEQ ID NO: 26207 - protein, 441 aa, synthetic construct
MEALLYTRVSKEDQVKFGMSLDAQLESLKQYCSENNLKIRNIYSDEGISGGSITKRKAFQSMIEESKPGDIILFTKLDRFSRNLLDANIVVKELTKKDVSIKAINEDDIDTSTADGKFIFNLKLSLAQREREKVSERINDVFEYKIKQGEVCTGNVPVGYMIKDKHLVLDPVKSVWIREMFDYFLKHQSVVGTCKWWNLKHPEYTMEYKAIKMSRLKNTFYCGKHPSGLNDNYCEPIISDEEFDKIQEILKRNVKSNRTNNVYIFTGLLTCSHCGRRMGGFYRNWKGNKTNYYRCYQYCSFRKCDMSHTVSERKIEEFVLQDMIEKCNEIVSASLKPENTYEVKLQNKKANTESKISRLKDLYVDGVLTKDEFDTKYKQLQDEIEAIKQEIKPKSNKLLELHDVDVKELYSKLNPENKRAFWRKYIDRIYFDGHDFKVVYQ

SEQ ID NO: 26208 - protein, 516 aa, synthetic construct
MPKTEEKQAAKAVIYARYSSDRQREESIEGQLRVCEDYARRNNITILHTYADRAMTGRSDQRPEFQMMVRDAATMAFDIVLVYKLNRFARNRYDSAKYKHKLKKYGVKVVSAMENIADDPSGILLESVIEGMAEYYSAELSENVLRGMTQNALEGKWPGGVIPLGYKLDKGGRLIINEEKAPIVRMIYQMFLDGMSVARIERELNDKKYTTDAGKVFSRSRVYYILHNERYIGTFQWKDIKKEGIIPPIISKESFHAVQERINAMKSSSYRTNNNYLLAGKAFCASCGAKVSGTSGKSQNGNKYCYYGCSHHHRSARYEYCETKNIRADVLEKLVCDKTHEILSSKKAIKEIARQAVKLRPRDESELEIRAIKNHISSCQKKIDNCIKAIENGVMSNALVESLNENERTLDVLKEKLAKVSLMQGSGLLTEEKIQFFFETIREKAKETEKYNDILLTSLVRAVYICNEYIEIQYNYAEQLPILTNPVRIESCSYKCTNGGTIWIRTKDLFDVNEAL

SEQ ID NO: 26209 - protein, 543 aa, synthetic construct
MNAVIYARYSSDSQREESIEGQLRECREYAERNDMTVVGTYIDRALSAKPADRPEFQRMIKDSAKELFEIVLVWKLDRFSRDRYDSAHYKHILKKNGVKVISAKEHISEGPEGIILEAMLEGYAEFYSAELSEKIHRGQKENALKGKNNGGGVPLGYLLDKKAQKLVIDPVTAPLVVEIFEKYADGKSVRSIVEDFNTCGLKTKKGQPFNINSFSSLLKNRKYIGEYRYQDVVIEGGVPAIVPEDLFNRVQERMEKNRHAPTMAKAREDYLLTTKLFCGKCERMMVGESGKSHTGAMHYYYKCSGAKRLKDCDKKAVRKDWIERVVVRLTMQRVMDEEKISRLIDAILVMQEQEDTTTPALRSQLAETESSIGNILKAIEQGIFTPSTKQRLDELEARKEEILVNIQTAELQKPKLTREQMTAWFEQFRHGDPANRDFQKRLIDTFVNAVYVFDDKLVLTYNYQHETQTIPLEEIESALSSDFDGATPPTTDRKANALRSCSIYGSDTPPRFPQQLNQVHNWRPFSIRRWALFYFINEGGKQI

SEQ ID NO: 26210 - protein, 628 aa, synthetic construct
MKAAFLIRCSTKNQDLNRQTRDLTRLAKSMGYEYDLENLVYGEKITGKDDVTKKNRDSIDRLLRAAKEQRFDVVLVSEVSRMSRDPASGRIYVRLLINMNIPVYFKDIDLWTINPETGKKVRDAELVIGAAFDAAWKYLKSMKTQIASARRNELDNNRISIGQPYFGYKRYEGTDKSKKNQIVVNEEEAEVVQAVYNEYLKEGATLKSTALAITDKYGEKLNRKFSLGTIEHILTYESYATGIKKVNLKDPDTDEVEVFDVSTPIIIDKELYEAATNKRKENRVKDEPYPNQQVYLLSKLIKCPDCGYTLTPRRKAGEFGQTYRLVNGKPAVSWLCMSGINNITDCTNRTSIANEKLEPIIWELVKKELIGYANMNDEKREEQIRECEEKIEYQNYSIQNFTKEIDKLKKRLSTAYQFSINAAEMAGDDEDMRTMAMEEFNRTAKGVRQEMKNFEKSIEQAKGELEKLRDLKTFYSQPTLPKDYLEQIEGNFTEKRNLVKQLITKIVPYRITTFKKKERESGVKTCNKMITVKNGAVLLEVYTIGGVYNVFYNANSKFQVKTAYYVHGEYATFQNGIRKFPAYDEGEYFVISNANMVMETDNIDEVVTVNEFVDIAIANNWVIEYQYQ

SEQ ID NO: 26211 - protein, 502 aa, synthetic construct
MEIQIREGSREQKRKLKVCAYCRVSTDADEQENSLENQVRHYEMVIKANPDYEYAGVYSDFAISGFKEKRPGLQKMLADAEKGKIDLILTKSVSRFARNTSIVLEATRKLKELNVGVFFELQNINTLSGEGELMLTILAAFAQAESESGSAGAKMVYQRKYEAGIPVQYLERSFGYTKDERGVFVADEAEAVWVRKIYKMAAEGYTPASIKRYLNENGIKTVGGVQWVDSTVFRLLENEIYKGDYIMHKHFVNEERKLVRNRGEVDAWYIEDDHEAIVSPELWQKAQDALAAKRDYLAEGSVIEEFTEENYPYMNKIYCAKCGYPLYKRIYSKGNRLNWGCSGTKRYGKTFCDGINIPDGVLRSAWHFKENTYIAEKASDKGVKEFTYLKEQSWKRRHKKKQPPAIPENTEVEYPYREKIFCALCGSRLVRYVNSQSHKVTWVCSRRKRKGKDACDGTRVPDTIIKGWGEIKKDIYIQRKDDKNGKKRYSYTSKKPEGADRA

SEQ ID NO: 26212 - protein, 434 aa, synthetic construct
MERVVERVDALIPAQPKALRVCAYARVSTGKDAMLHSLSAQVSYYSKMIQSHNGWMYCGVYSDEAVTGTKRERAGFQHMIEECRQGNIDLVITKSISRFARNTVTLLQTVRELKILGVDVFFEEQHIHTQSSDGELMMTILASYAQEESLSASENQKWRVRKAFENGEIINLRFLLGYDITPDGIQVNEKDAAIVREIFERFNNGESMSSICRDLDTRGHKGVLGGTWCAERMRNTLSNEKYLGNALLQKQYRNNHIEKKLLPNRGELPMYYAEGTHEPIIDQATFDKAQERLRMLAQQAANRKKPTRSVFSGLIHCGLCGNTYKRVTYRKKHYWNCTTFQTKGKSECAAKRIPEETLEVLTCEVLGAVSFDPDMVRSKITAIRAEKNNVVVYCMDDGSEIVKRWKDRSRAESWTPEMKEKARQRALQARRKKE

SEQ ID NO: 26213 - protein, 529 aa, synthetic construct
MNRTAARSVTVIPPTINPLTHLSRVAVQKRRVAGYARVSTDSDEQFTSYEAQVDYYTQYIKRNPEWEFVKVYTDEGISGTNTKHRIGFNEMIADAMSGKIDLIVTKSVSRFARNTVDSLVTIRKLKEKGVEVYFEKENIYTFDGKGELLLTIMSSLAQEESRSISENVTWGQRKRFADGKVNLPYKQFLGYRKGADGFPEVVPEEAIVVHRIYTRFMEGLTPGAIAKELTADGIPTPSRKQCWQTSTVESILKNEKYKGAALLQKCFTVDFLTKKRKVNEGEVPQYYVEHSHEPIITPEEFDKVQTELARRKHISRQYSGKSIFSSRIVCGDCGSYFGSKVWNSTSKYRRVIWQCNGKFKGEHKCETPHLDEETIKVQFVSAFNAIIESKDNILEDCRLMQTTLTDCTGIDAEIESLLEEIEVVTELTKRCIAENSQTAQNQEEYAARYNGLVERYEKAKARLEQLRTTKAAREAQTEAIGAFMFEMQELDALTEFDEKLWLTVIDTVTVHADGRMTFKFQGGKTLTSY

SEQ ID NO: 26214 - protein, 519 aa, synthetic construct
MKKVTKIDKIQPSKAAKKKLRVAAYCRVSTDSDAQLESLETQMSHYKSYITARDDWEFAGLYFDEGITGTKASKRPQLMRLITDCKARKIDFVITKSISRFSRNTTDCLEIVRTLLNLNIPVYFEKENINTGSMESELFLSILSSMAEGESTSISENNKWSIKKRFENGTYKLGYVPYGYSWEDGKIKVNPEQAKIIKRIFAELLSGKGMDAIARALNDELVPTKKGGRWNSTSIRGILANEKYTGDCIFQKTYTDSNFNRHKNDGVLDKYFVPDHHEAIISHEDFEAAAALIEQRAAEKGVQRGSTKYQQRYAFSGKIICGECGDTFRRRIHSSTHTSYVAWVCNTHLEDTGKCSMLYLRDNDLKLAFATMLNKLIYCYKLVLKPYLEALQTNTSDEALLRIQHLETLLEQNAEQREILHKLMAQGYIDQILFTKENNALLSQANDFRSDIEALNRSQTLDTTKVYETERLIHFCERGEMLQEYREDLFELFVDHIYVYSRQEVGFVLHCGLTFKERI

SEQ ID NO: 26215 - protein, 514 aa, synthetic construct
MNTVIYARYSAGPRQTDQSIEGQLRVCTDFCKQRGLTVIDTYCDRHISGRTDERPEFQRLIADAKRKKFEAVVVYKTDRFARNKYDSAVYKRELKRNGIQIFYAAEAIPDGPEGIILESLMEGLAEYYSAELAQKIKRGMHESALKCQSTGSGRPLGYRVDEQKHFQIDPESAQTVQTIFEQYIKGESNAAICELLNSRGLRTAQGKPFNKNSINRIIKNRKYIGEYRYHDIVVEGGMPAIISKDTFNLAQAEMERRRTRKAPKSPKAEYLLAGRLFCGHCKGPMQGVSGTGKSGNKWYYYYCGNTRGKNKTCDKKQVSRDRLERAVVDFTVRYILQEDVLEELARKVHAAQERQNDTASEIAFYEKKLADNKKSIANVLRAIESGAATQTLPARLQELENEQAVILGELSFLKGKHLAFTEDQILFALMKHLEPYPGESAQDYRRRIISDFVSEVYLYDDRLLIYFNISSEDGKLKSADLSNIEGSEFDEGLVSSTKKDIAFCSVFFLLYVQF

SEQ ID NO: 26216 - protein, 584 aa, synthetic construct
MRRLPLQHSTLFRYGQIKAPALVRCSAGDNMECSTKPDKENFMLAGVSIPHSLHMGNRPEGSVIMPRKKTTAADAPRLVAYYRYSGGSRQTEQSIEGQRRDCEAYARAHGMTILREYVDRHISGKTDDRPAFQQLVADSAKHTFDAVICWKTDRLARNRYDSAVYKKKLRDNGVEILYAAESNISGAEGIIIEGLMEALAEYYSAELAEKARRGMRESALKGKALGSSRPLGLTVDADKHYIIEPTGAEAVRYIFEQYAAGLSSSSIVERLNAMGLRTSHGGPFNKSSINRIIQNEMYRGVYVSKKFDVRIEGAIPAIIDNDLWKRAQNMFERNRQSRTPHASRADYILSGKLYCGECGCLMKGVCGRSSGNGQMYHYYACPGRSIGRACTRKNIPQDELEAMVVNSVADLLLEPELLEQIADAIVELQQAEAARPDPEKQALEKSLSDVRNKIQNILSAIENGTSSAALSARLADLEQQESTLSYQLSSLAAKKPLTFTRDQILFLLQQFRVSPSERTKAYCRRLVDTFVDHIELTNTELILYFNISDETIDKNKKAPRSNPSKESSTEKRLVRVARIELTAS

SEQ ID NO: 26217 - protein, 666 aa, synthetic construct
MKRKARIQTGIDDRLVAIYARKSRITNKGDSIGVQFKQSADYAINQLSLPEDYEFARYEDKGLSGYYSDRPDFQRLLRDIEMGKIKAVACYKLDRISRKTSDLMRLLEYFERHDVTLLVCSNNINTRISTSKIIIQVLAIIAEFERDILTERIQDNLMELAKDGRWLGGKTPTGFSSQRVTTGSGKNKSAISFLVPVQEEKEIVLEIYGTFWETRSLLQTANIINEKYETKHGAKFTTSTIRLILRNPIYCVADEYSYNYFLEHDGNLFGEPSDFDGQHGLTAYNKTDQMKVEDEDSTFFNPKFSQLLTRKPISEWIVSVGRHEGFISSRKWVETQNMLDEIAEKYNRPHRKTNALLSGLMYCPICGKRLRVLPESNRWTNGKPRFKYACPGVRAKECTFKGVEGVTLDEFVIHSLSSLQEEHSDYYRQLLENRVASMIRTDQSEKEYQETKKAIERLNADIAAQVRNLREADDALKRFIQDDIKELTDELAKREAALRRMEDTQSENQYLIHELNGMKKRLLSFEEFAKGAQPEALFTLVHSIVDRIYITTDGTKQKCQVYIKGCATEDYSDVLGAAGYIEEEPLLPVASYVPPMCDLDYYSIVYSNLNESDPWIYQKGKIMFHMTFPYGEACDSEQYSISYIIYPYSTRNNRHKATNSFSQTKQ

SEQ ID NO: 26218 - protein, 512 aa, synthetic construct
MRVSVNLNAQKPDTTTNAVIYARYSSHGQTEQSIEGQLAKGHEYAAAQGYTVVHEYIDRAMTGRNDNREAFQKMLSDTGKHQFQVVIVWKVDRFGRNREEIAFNKHTCKKNGVRVEYVAESLPNSPEAVILESVLEGMAEYYSIQLSQNIRRGQLESAKKCQCVGGSVPLGYTLDSDKHFVIDPQTAPVVKKIFDLYAEGATISEITGQLNEQGIRTARKQLFTKNSLTKLLKNEKYIGVYTYKDIVRVEGGVPAIVDESTFDRVQELLKINRRAPSHTWTKVEYLLTDKLFCGHCGSPMVGESGFSHTGAKYSYYGCIKRRREKACDKKPVRQDWIEALVLDETVKLLHDDELMEYIIDRTWEYYQVTDKVQEEKAVLEAQLAEVDKAINNLVRAIEAGIFNAATKSRMDELDAQKAALTASLADLELTSGIRITRDHIEYFLLRLRDLDVKDRECQKRLVQTFVNAVFIYDDGRVKITYNYSGQSSTIALNQIASAEKGKGFVCCLPCSS

SEQ ID NO: 26219 - protein, 543 aa, synthetic construct
MEITKVPKKIVTVIEPKRSMTVDKEKYRQKKVAAYCRVSTDSEEQLVSYANQKKVYTEMIASRKDWCFAGLFADEGKSGTRADKRPEFNKMINDCLAGKIDYIITKSVSRFARNTVDCLDYVRMLKSKGIGVYFEEQQIDTLKTDSELYLVIYAGFAQSESESISKNITWSVRKKFEEGTPVFIYKRFLGYKKGADGEPEIVPSEAAIVERIFNLYLAGETVDNISKMMQAESYDIPGKTISFSKGMIMNMLSNERYCGDAILQKSVTVDCIEKKRKKNTGEAPMYYVQNNHPAIIDRVTFNKVQEELARRKTKTPGSAKSSITSTGKYSRYALTDVLICGNCGTRYRRVTWSRNGTKRIVWRCISRLDYGKKYCSDSPTIMEDKLQEAIVRAVNKFNKQDNATYKALMRATISEALGLNGDPEEVDMLERKVEALNNKMLALVNESVSSGDGIEAHESEFMTLSQETELLKQRIAAIQESTAKDNGEQSRLEQIQAIISERESKCMEYDDSIVRQMVECIKVYPGGKLEIIFGGGYLVEESV

SEQ ID NO: 26220 - protein, 513 aa, synthetic construct
MPEVRLITPITRQSTKKMQVAAYCRVSSNSADQLNSYAAQIRAYKKCIGARDDWELVDIFADEGLTGMKSETRDEFQRMIRMCELKQIDLIITKSISRFARNTKDALAYVRKLKLLGVGVQFEKEGISTLSMGDEMLLNTFSALAQEESQSISMNQRLSIVKRMELGEYVDSNAPYGYRLVDKALAVYEPEAAVVRDIFDLYLRGFSISEIGRELKSRNIPTKAGKESWHPYRIAYMLKNERYIGDSFYQKTYRETTVPFNQHINRGQEDRFYAKGTHPGIIDKDVFNAVQQLIQKRKETFSRTTTQNIYPLTSRIQCSECGSFYRRRSVSGTVKWVCALHKDDSTACDSHYYSEERIYDGFITMVNKLRFSEDNILGQVISRLEMTLAAIKRNNLAARDLSKSIAELNAKLLMLEQLRSKGYLAPEVYQAQANEISAELAKLKNVRQEKFNSKAAIMLDEVKKLKMLVFELEEPLDAFDEKLFLEIVKSIQINKEDEMSVEFLGGLRFKERI

SEQ ID NO: 26221 - protein, 590 aa, synthetic construct
MKFKYPAMGTTKNAVIYARYSSHSQREESIEGQLRICHEYAKAEGLAIVGEYIDRAISGTTDARPDFQRMIDDAKKSQFSYVIVYRLDRFARNRYDSVLYKHELKQCGVKVVSATEGIGTGDESILLEALIEASAEYYSMELSRKIKRGRQDSAMKGNFLGGSVPLGYKVVDSKFIIDDETAPIVRYIFERYAAGTGKKQIIDELTAKGYMRRNGKPFTYRSFDSVLRNRKYTGEFTQTGITVEGGCPAIVDTEMFEKVQARLEINRRAPAKAKAKTEYLLSGKMFCGYCGEPMIGISGTGRHEKTFYYYSCVGRRGKSGCKKQHEKKDFIEWYVCEQTVQYMQDPERLSHVAKRIIEINDAEFDGGKVKELERAVENCDSDIRKLVDALTTIPDAARPALYDKIERIGAAKADMEIDLAKLRVLSEVRYKQEDVEAWIRSMCRGDLMDFEFRRQLIDVFINSVYLFDDRVVIVYNIKHGKQVSAIDVLNAVEELDGVELFPDSAEDSSAGGNGSFLVADAPPYMKNPNLFPIGNGFGFLIFIKDIIDCAWVPGFALRKTGGFVHSTKHSSFCIIAVSTKRGIAYGSSVH

SEQ ID NO: 26222 - protein, 520 aa, synthetic construct
MKKITKIEANQKEESILRVAAYARVSTDEDAQLVSLKTQKAHYEKMIAENKSYTFAGLYFDEGITGTKKECRDGLLKMLKDCEDGKIDFILTKSISRLARNTTDCLEIVRRLLDLNIGIYFEKENIDTRTMESELMLSILSSLAESESRSISENNKWSIKKRFQNGTFIISSPPYGYENIDGKMVVNEEEGKIIKEIFEKYLSGKGTHKIAEDLNKRNIKGQKGANWHGSTINGILKNEKYIGDVIYQKTYTDENYNRHKNKGEEDQYKIIDNHEAIVSREEFEKVQGLIKIRAIAKGNGEDTKRYQNRYSLSGKIKCGECGSTFKRRHHYNGKDKYIAWTCSEHLKDINKCSIKFIKDKNIKLAFVTLVNKLVFGKDSILTPLLESLKRVDSKEEVEKINKIEESLEKLKERKEVLNKLITSGVLDASIYAKESSEISSEESYLLREKERSKKAILGNDEEIRELEKLIGILGKSEMIDRFEDDLFEEIIAHIQVVNRVTLDFHLRCGLVLREEVKKDV

SEQ ID NO: 26223 - protein, 521 aa, synthetic construct
MMNSKVIVIPAKKKKRNFIKESEKKKLRVAAYARVSTDSDEQATSYDTQVDHYTNYIKKNPDWEFAGVFSDEGISGTYTKKRAGFNKMIEEAMQGNIDYIITKSISRFARNTLDCLKYIRKLKENNIPVYFEKENINTMDAKGEVLLTIMASLAQQESQSLSQNVKLGFQYRFQQGQVQVNHNRFLGYTKDEEGKLVIVPEEAKIIKRIYREYLEGASLRDIKVGLEKDKIVNGAGNKKWHVSNLNQILTNEKYMGDALLQKTYTVDFLNKKRVKNDGIAPQYYVENSHEAIIPKEIFMRVQEEIDRRANMVSGKGKRRIYSSKYALSSIVYCSKCGDIYRRIAWNNRGKKYTVWRCCTRVTHGPDACHARTIKEEDLQEAVVESINQLISESSELKEIIRENIEKAITGDESSRIETIDKEMLEVQEKLLKVANAKKDYIELADRVEELRNEKDKILLDMAEEKNEQSRLMELEEFLDNQELEIESYDEDLVRKLVDKVVVYDEELKIVLKSGVEVNVCV

SEQ ID NO: 26224 - protein, 572 aa, synthetic construct
MASRIAEKLAAKKAAIYIRVSTHWQVDKDSLKVQRRELIAYVTLVLGITDYVVFEDPGYSAKNTDRPEYQAMMDRIRTGEFTHLVVWKIDRISRNLIDFAAMHDELQSLGVTFVSKNEQFDTSSAIGEAMMRIILIFAELERKTTAERVTAVMLSRASDGQWNGGRVPFGYSWSKEAKTFSIVPEEAKAIRRMAELYEQYQSLLYVAKYLNDAGIVTKTGGQWTPTTVRTILTNPWYIGQYVYNVHSDGKGIEKRDSDEWITVENHHEPILNEDVFCRMKFLLTRNKRGGVPSHKTYVRKNIHVFAGLLRCGQCGSNMTANLDRRRANGFRPSQYACGSRRRKGTSCTNKYISDTTLGPFVLNYVANIIRASKNSSEATTPEVLERKLLRGEAFEDVASVSTDALGQLLDAFRSAGDAVEYRPQIAFSGDDNSIREIDTLRARRRKLDNALARLNALYLYDDEAMPEKDFVMQRGQITKQLEEVNARIEELQNQESSEELGDGFIGKASYYIMANKLIEDRYIDYEKYIRAIDPSIPRSFLQQIIDHIVVNDGRVTSITFKNGATHTFTYKT

SEQ ID NO: 26225 - protein, 430 aa, synthetic construct
MKKIVKDITPELRANDTIKRVAVYARVSCEKDTMVHSLKAQIDYYRKFIMKNPGWKFAGIYADEGKTGTKEAREQFQALLTECRNGNVDMIITKSISRFARNTVTLLSITRELKELGINVYFEDQKMDSMSSDGQLMLTLMAGIAQAESKDCSDAVKWRIRHGYEQGRASSFKILGYRWDDGNVVMVPEEAPLVKRIFDLYLSGKGANAISKILNSEGVTAAGITKWAPTTIRNVLMNEKYYGDLLLQKSFVEDHINKRKVINNGELPQYFIEDDHEAIIDRQAMSDVKNEIAIRRARFYHGQGKESCLTSKIKCPYCHSNYHRKKINGISKWSCATSNRKGKSMCPKSKDIREDVLLAILAHQLGYKDFDEKLFAEQVDYIECFDDHIITHFYDGSIKNSKWSNPSRKDSWTDDMKEKARQRGLNQYGK

SEQ ID NO: 26226 - protein, 503 aa, synthetic construct
MEITVEKVDTGVQKLGFQALSTLKTVRVAVYARVSTDQEIQLHSLEEQMKAFHAKIAQHPGWMLVDVYADEGISGTSVKKRKEFLRMMEDCEAGKVDYIMAKSISRFARNTVECLSYVRHLQSIGVQLYFEKEGLDTATSVSELILTVMAAFAQEESRSISENLKWGIRKRFESGESRWTKTYGYRKTKDGEIVIEPDEAAIVRMIFKMYQYGIPMTDILDELTFIQAPSARGKQTWNKTALKYLLENEKYIGDMRLQKWVSVDHISHRSVRNDSTVIPVYNVRNHHVPIIDRHTYQQVQRIMELKSPHGEYSRYPYFDTNIVCPLCGKKMIPRVMKVNSHKRILGCFDVDGCRGYAVKGYLVDAALLEAYNTLEIKEKKRTVAMQRMLEIKAESPKLDTVQYYWLDDLVGHIEFKQDTMRVFWKCGLESEVALNASKVEEPTHVAELYRNSLDRAQRSENKPVSVVRADKKSVNTREAQRNAAMQTAKNLRAKENGVAANDY

SEQ ID NO: 26227 - protein, 423 aa, synthetic construct
MNRIIHKITPALPKAPKLMNVAAYARVSVENKTMLHSFSAQVSYYSEKIQKHPGWSYAGVYADRALTGTKSERPEFQRLLADCRAGKIDLVLTKSISRFARNTVTLLETVRELKALGIDVFFEEQNIHSMSGDGELMLTILASYAQEESRSVSENCTWRIRKKFEQGIPTTSQMNGLKFDHGKVEVIPQEAAIIKMIFHFRLAGMGKNAISRELNELGIPAKNGGIWHESVIDTILRNEKYQGDLVLQKYFRTDHLRKIDCRNRGELPKYVVRDNHEAIIPREEFAAVQRIIQKKAAEFPEGYGVHNEFPFTRKLVCAHCGRNYQRRLNNGKLAWQCYTYMVRGKKYCPAKQIHESILESVSAQVLGQLKFDNAVFQKEIRCIHVYPENRLVYEFYDGHTKEAYWKDPSRRDSWTPEMKARAA

SEQ ID NO: 26228 - protein, 537 aa, synthetic construct
MKRVAVYCRVSTDHEDQKNSIENQRLYFEDYVKQHKGWKLVDIYADEGISGTSLKKRKEFNRMYRNALKNQYDIILTKEVCRFARNTVDTLEKTRELKKKNVEVRFIIDNISTFDTDGELRLTIMAGLAQDESRRISERVQFGVIQSMKKGVAFGNYVYGYDFVRDEITGKKTKLVINEEEAKVIRYIFNAYLYEGKGAYTIAKELKVMGILIKRPRSKQQSTDWRNGTILDILRNVKYVGDLKQRITYTTNYLEHTKKFNEGEIEFIYTKNHHPAIIDRETFDKTQEELKRRSEMYRQEKNKYSNKHTFSGKLVCGICGKSYVGGISRERKDGTQRKSWRCYTAVNYGKKHIENGQEMGCDNERVNDYTLKECFKIALRDILDRKKDIKNEVEVIIRKTLEKCNDEIETSDNLIRQKDKLNRERNRLLDLCLKEIIDDETFKGKNIEIENKISKIDKELQEQQNKQMLRDNIEDILCEVRKIIDNILNIKEFSKNVCRELVDKVVIYSKNKFDFYLKGYTDPFNFNYEGNILYSQH

SEQ ID NO: 26229 - protein, 512 aa, synthetic construct
MQRAVIYARFSSDMQREESIDAQVRACKAYAKNKGYIVVDTYADEAKSGRDVTKRDAYNQMLADAMEDKFDVIIFHKIDRNSRNELNYFTFKDKLERLGISYEYAAQPIDTISPEGQVMETIMVGMSAYYSRNLAKETKKGLNENAYKALFNGGCPPLGYKIVDKKYVIDESEAAAVRLIFELYLAGKGYAEICRALDSKGFTTKSGKPFGKNSLYDILGNEKYIGTYTFNKIPKGKGKRNMHSQKRPDDYISIEDALPAIISKEDFFIVQAKRERNRCHAAKYTAKHDYLLSGKVFCGECGSAMVGHRVRQRYYYYGCTRKEQTPTSKCQQRMIRAEVLEHWVMQILERVVFTVSGMRRIADAIAKGYQEEESRHAAEQEALAKRKAAAEKKLNNIYKIFEEGEADEFDRQRLNQIKVELREINKSICEASVKSVESLDNKKIVAFLTTIKSEIFVKNNMDYAKRAIDLLVTNVTVTGTVIKVTLSTQNVCAYLVPRTGMEPVRVSLPEGF

SEQ ID NO: 26230 - protein, 562 aa, synthetic construct
MAMLRAALYCRLSKDDMLQGDSESIKTQKAMLTQYAKEHGFLVVEIYVDDGYSGLNFDRPSFTRMLDDIEAGKIDVVITKDLSRLGRDHLKVGHFTEIYFPMKNVRYIAVNDGVDTANKNNDIAALKNVMNEFYSRDNSRKIRSSIRARAKAGLYRSSFNPIGYRKSPDNHNKLMVDEETAWIVKRIFELANTGMGTHKIAAVFREEQVPCPSWWLHSRGEKDYSKRFENPENKYEWSHTVIRNIISNPLYLGHCVMCKTESIFKVNASKKVPKEDWITVENTHEPLVTQEVFDGANEKILSRRRDTADNFVSPFAGLVKCGACGKALGLRYWTGKRHRIYVCTTYAHDTKACTDHRIFYEDLYKAVLADIQYHARLAYEDREKAVTLAVKMNTRADGSKGKNNADKLKAAKKRYEEVTRLFDRLYEDSVSGRISHDNFNRLMDKYQTEQEQLLGQIQALETAMQEFKDNQRNAVRWAELMAQYVGIQELTAENLNLLVERIEVYDRTETNAGAEQMIKICYRFGGYIGEWVFSAKVLKHPCRKNTCPLKERKGCGKISLIS

SEQ ID NO: 26231 - protein, 433 aa, synthetic construct
MPRAITIVPKPPKLEQKKRVAAYARVSSGKDAMLHSLSAQVSYYSDLIQNHDDWLYVGVYADEAKTGTKESRADFQRLIADCRAGKIDMVITKSISRFARNTVTLLQTVRDFKAWGVDIFFEEQNIHTMSGDGELMMTILASYAQEESRSASENQKWRIKRNFEEGMPWNGAMLGYRLKNGRYEIIPEEADLVRRIYDEYLSGDGYLTIAKRLNEDGIPSRFGKQWGQSVISKILSNYTYTGNLILQKTFRENHITKKTIINNGELPKYHAEDAHDAIIDMETFQAVQAEKTRRAARFLKKPAPKKAYPFTSLLVCDGCGKNYRRKVTKTGPVWVCGTFNSMGKAACASKQIPEETLQAATAEVLGQVDFSEELLRRLIKSILVCNGNVLIFRFFDGSEVTRIWKDRSRRQSWTDEMKATARQKALERRNQNA

SEQ ID NO: 26232 - protein, 526 aa, synthetic construct
MPKVTMIPATINPLTHLPSVAARKRRVAGYARVSTDSDEQFTSYEAQVDYYTKFIQSKPEWEFVKVYTDEGISGTNTKRREGFKEMITDALDGKIDLIVTKSVSRFARNTVDSLVTIRKLKENGVECYFEKEGIYTFDGKGELLITIMSSLAQEESRSISENITWGQRKSFSDGKVHLPYKRFLGYEKGEDGRPAVVESEARVVKLIYGLFLEGKTQAGICKYLEELGIPSPGGKAKWSKTTVTSILQNEKYKGDALLQKKFTVDFLEKKMKPNEGEVPQYYVTGSHPAIIEPDEWEQVQAEFARRKALGKAYSGKSVLSAKLVCEDCGAFFGPKVWHSTDQYRRTIWQCNGKFASEEHCHTPALDTETIQRLFIKAYNLMMQDRVQIIKEIEAWRQKLMDFGTLDADIERQLEETQVVAELVKTAVKENASTAQSQEAYLKKYEALTERYEKAAAELERLQSLRTSRSQQDKKMALYIRTLKKQPEVMHDWNDTIWTVMIERAIVHRNGEVTFAFANGTEIKVGA

SEQ ID NO: 26233 - protein, 548 aa, synthetic construct
MSTGTELRAVFYARVSTEEEKQLNALEKQIQENKDVIRDHGWRLVGEYIDEGKTGTTTKRRNDYKRLLKDMTENKFDIVVCKDQDRLQRNTLDWYLFVDNLVTNNLKLFMYLDNKFFKPSEDALITGVKAIIAEEYSRNLSKKLNNSNKRRIERALNGEEVSAMGNGKSLAFKIVNGKWVKDEEEAKLGKKIFELYLEYDSIRKVRDWVNEHGYTNSVGKPFTSESISRILKNEKAKGVIVMGKYHHDFDKKKIVRRSEEELVRIPAPELAYVSEEVFDKVQERLRAKTGNGRGVNAYSDPLSGKIYCGSCGRKLWKHASNGYVNWMCASQVAKGDVECNGTRITTVAIRNIYKKITDNLEVNKEVVKQDIVKWLNELEATLSDTSVNEKIQKDLDKMERKRTKLLEAYLEDFISKDDYKAKYEAIEGQIEEKKKLLVPVEENEDIKVIESVLQNIDDEIDTYVKTLDMEESKVDFLIEHTKRITVLENRDIIIELDLVAGAIIAGKDFLLYVHDTMPQHHGPKHLHPSGPQTAPRCCFRDRFSCDQP

SEQ ID NO: 26234 - protein, 530 aa, synthetic construct
MSTGTELRAVFYARVSTEEEKQLNALEKQIQENKDVIRDHGWRLVGEYIDEGKTGTTTKRRNDYKRLLKDMTENKFDIVVCKDQDRLQRNTLDWYLFVDNLVTNNLKLFMYLDNKFFKPSEDALITGVKAIIAEEYSRNLSKKLNNSNKRRIERALNGEEVSAMGNGKSLAFKIVNGKWVKDEEEAKLGKKIFELYLEYDSIRKVRDWVNEHGYTNSVGKPFTSESISRILKNEKAKGVIVMGKYHHDFDKKKIVRRSEEELVRIPAPELAYVSEEVFDKVQERLRAKTGNGRGVNAYSDPLSGKIYCGSCGRKLWKHASNGYVNWMCASQVAKGDVECNGTRITTVAIRNIYKKITDNLEVNKGVVKQDIVKWLNELKATLSDTSVNEKIQKDLDKLERKRTKLLEAYLEDFISKDDYKAKYEAIEGQIEEKKKLLVPVEENEDIKVIESVLQNIDDEIDAYVKTLDMEESKVDFLIEHTKRITVLENRDIIIELDLVAGAIIAGKDFLLYVHDTMPQHHGRKRYDIFS

SEQ ID NO: 26235 - protein, 524 aa, synthetic construct
MTNAVIYARYSPGPNQTDQSIEGQIHECTRFCEDNDLRIVGTYIDRKQTGRNDNRADFQKMLRDSSRHGFSTVVVWKIDRFGRNREEIAKNKAVLRMNGVRVLSAKEHIPDGPEGIILESVLEGLAEYYSANLSQNIKRGMRESALKCQFNGSGLSTGYTVDADHKYRIDPDGAAVVRTIFEMYDGGKKIADILRYLQQSNIKTMRGKEYTHYGISRILRNRVYIGEYHWHDIVVPGGVPQIIDNDLFDRVQKRLEVNKHAPAARRGDVDFLLTSKLICGNCKSTMIGDCGTGKNGARWYYYTCRAKKTKSSKCRKKSVPKEALEREVTALTAAYVLRDDVIDYIANKVVEIQKSEHDDKSMLRYFESQLKDTNKAIANIMRAIEAGIITETTRSRLEELEDTKRDLETEIIKEKVARPTIEREQVIFFLEKFRGGNVDDKEYQRKIIDTFVHKVILYDDKITITYNYSTDSTKNAENTVESIESAASAAECKCSNKPSSSPPVTRILLLQCSCYFFRRGSNRT

SEQ ID NO: 26236 - protein, 551 aa, synthetic construct
MARAAKQDSNSEIIDGVIYARYSEGPNQTEASIEGQVRECKEYAKRNGIRIINVYSDSKHTGTNDNRAEFQKMLRDSRRGGFSVVVVWKIDRFGRNRAEMAQNKALLKLQGVKVVSAKEYIPDSPEGIILESVLEGMAEYYSANLSQNIKRGMKENALHCKSNGSGKSLGYIVDKDGYFEIEPNEATIVKTIFQKYDEGMKIADIWREIVASGAKTKRGKDFTQYGISRVLSNRAYIGEYRYGDIVTPGGMPRIIDDDLFNRVQERRALSKKAPASRRSNSDVDFLLTGKVFCGHCKGTMRGMSGTSKTGRKFYYYACHDKIFKHNKCTKKNVKKEWLETEVTRITRDDILNKETIEFIADRVVEIQRQEQEDKSMLRYYEQQLRDTQSAINNIMKAIEAGIITSSTKSRLFELEEQKSIIEGEIEREKIITPVIEKEQVIFSLERFFGGDINNKEYQRNIIDMFVNKVILYDDKIIITYNISSQNEISVDVVEQAAFAALDECSSKLSSPPPAGACPCTRSALLYVRRFFIAAHGSLFINPTLLFHHGRR

SEQ ID NO: 26237 - protein, 488 aa, synthetic construct
MKTDAVYARQSVEKKDSLSIAGQIDLCRRTAGGGELRVYKDAGYSGKNTERPAFQQLMKDIRADRIGTLYVYRLDRFSRSVADFGQLWEVLQEHHVEFVSVNENFDTKTPMGRAMLHIIMVFAQLERETTAERVRDNYYRRAALGAWPGGPAPYGFDNGRACGKDGREVPSLIPNDKAAVVQRIFQEYAAEGMSLGLLARKLTAEGILAPKRTTWDNVTLSRLLHNPAYVMADEQVRLHYLGQGVEVTSPPEAFDGVHGVLLVGKREANARKYTKTENHRASVLNSVGVVPSPLFLTVQAKLAHNRQVGNSGKGKHTWLSGLLKCAKCGYSLSVVVDKSYRYLVCSGRYNMNRCDAAIHVKLAELEAVVQTEIEKLLAQCPREPVVPKPEEDSYTRRLLELDRRAERLMDAFAESEDLPASYLQKALGKIEKEREALRQARRREAGRIPLPEKLVFGELSFEEKKAVAAQFIRRIEVAEDSAEIIWAV

SEQ ID NO: 26238 - protein, 496 aa, synthetic construct
MNAAIYARVSTDWQAEHGYSIETQLESCRAKAKEIGATVIKEYIDDGYSGGFLERPGLDALRDAVSDGLYDVVIFHDPDRMARKLIHQLIITEELEKAGAAPVFVLEKFDSSPEGQMNYQMKGVFAEYERAKIRERTMRGKRAKLRAGKAICDSHIYGYDFDRASSSYVVNPAEAAVVRRVYHLYVVERVGGCETIADILNADNVPSPTGKKWSPSSVRNMLSRPHYTGHYYANTTYHKKTGPRSEKRLPRPREEWIEMSCPQILPAEMHEKALAIKAGQRTYKVWKRNAKVALLQGIAYCGSCGSRIYVSGGGKRGRRFYECGASRAPSYCPARLMEVPVADDLFWNVLEQICKSPAALERYIDKNVTEKGSRPAAAEKPEKIARRLEKIAGEKKAIMSWFSQSLLTQSEATERLSALKSEELRLQSELAYLRAKSSREPEKIAPSDICAAVAACSVDLAARRRVVLAVVERVDVLRRDFNYGHKYIVDFKIKFK

SEQ ID NO: 26239 - protein, 506 aa, synthetic construct
MNGVIYARYSSENQREESIDGQLRECTAFAQHNDIQIVGEYIDRAFSAKTDNRPSFQKMIKDSAKGEFDVIIVWKLDRFARNRYDSAHYKNILKKNGVKVVSATEAISSGAEGIILESVLEGMAEYYSAELAEKVSRGMKENALKCKYNGGSVPLGYYIDESKHFQIDSSVAPFVVECFEHYADGMTMKQLRDELNMKGVKNSRGGKLSIDVISRMLTNRKYLGEYTFQDITIKDGIPAIVSTSLFEKVQDRLTKTNKVPSSHKADDDYILTTKLFCGKCKSFMVGESGTNAQGKKYRYYKCVNHKKHQGCDMKSIRKDLIENMTIKYIREFLNDEDLINTLIDLAYDAQHKENEQLPLLRKQLAQTEKGIKNIVDAIEQGISTKSTRERLLDLEQRKNDIEMSISKESIENPMLTKKQFKFWFDQLKKLDISKSEQRQKLVDLFVNSIIIYDDHIKFFFNYKEHTETITFDELNNCSDLPDSPRPKGLPNGSPYFLPKIAKNRII

SEQ ID NO: 26240 - protein, 497 aa, synthetic construct
MKIHVITPTSETPEKLRVCAYCRVSTESEDQENSLDNQRNHYEELIQSNPDYEFVNVYYDFGISGFKEMRPGFHQMMSDARKGKIDLIIVKSVSRFARNTVTILKAARELKELGIGIFFELQNINTLTEAGELMLTVLAAFAQAESETYSQLSKMGIQRKYEKGEPIQRLQYSFGYAKDENGEYVLNPVEAPWVKKIYEMIADDYSSADVKRYLNDQGVKTVKGAEFTESSVLRIVESEIYKGDFIMQKYFVNADRKIVKNEGQVDSWYIENDHPAIVSRRLWQKAQDALAAKRAYLAEGSVVGENTEELYPYKNHIFCSKCGFPLYRRVYSNGNRVNWGCSGQKRYKNEFCTGINIPDSYFRKLGDFEDNLYFRESKDALGKSSFKYCTETAWSRKHRKKEPIAVPELNEKNYPYFKKLYCKECGSRLVRYIESRQHVKWICNGNKRKGTGFCKGVRVLDSTVRGWEIDTDVLVEGKVGKDGEKSYSYTCKTGQSK

SEQ ID NO: 26241 - protein, 457 aa, synthetic construct
MAKKVTVIPAKQVRANSTKAISAVRKTRVAAYCRVSTDAEEQLNSFDNQVEYYTRYINENPAYEMVGIYADEGISGTNTKKRKEFQRMIADCEARKIDLVIVKSISRFARNTQDCLTYSRKLKNLGIGIFFEKEHINTLDATGELLFTILSSLAQDESRNISENCKWGIRSKFQEGKPHINTYKFMGFDKNEEGRLVINEEEAKVVRRIFQEFLEGYNPADIARRLNEDGVPGVSGKPKWITPTILGMLQQEKYMGDSILQKWVTTDFLMHSLRRNTGQVAQYYVENSHPAIIDKDIWNAVQEELERREIYCQNYHLSMYAYRADKNPLNGKIVCGHCGHTFARKSWTNRGIAYWTCKSDTCKGNIKEEVIHKAFITAWNHTVKNKDRFMERWQQALDGEDSLARLRAKQMIDLTNEGTINTLVPELMLMVLGKITVHDLEHFTVSFLDGTEKEILV

SEQ ID NO: 26242 - protein, 454 aa, synthetic construct
MECVAYLRVSTEKQAEEGNGLDSQKRDIENYCRKNQLIISDWYEDDGFTGSNMNRPALQRLINDCSKKKLKCVVAFKLDRLSRSMVDGIYLIERVFIPNGVDFRCVHDSVSYDSPMEQAYTQMMAVFAQLDKNTMLLRMRGGMLERVKQGYWMGGGNTPYCYRYSKEDGILVPIPERKEMALRAMNLYISGYSDIRIQKLIGFKSEFVTRQVLTSPVNIGMIPYKGKLYKGRHEPIFDIKVFELAQELRKTRKQSKSFCVNHENQLLTGLCYCGVCGCKMRYQKWTHGKHKIYCYSRDNGMSYLPNYNPNCNNSIEWAEDIEKQVEDEILKISLNLSSHKPKERESCLDILSKQLQKEKTKLKRLYTLYAEGNDTVLEMIKETESGIDELKLKIQNEMKSPDNSQKKEFVYDNIKKLADVWEHIDKQNKNRILKTIISKIIIVNGNIEIQLKKF

SEQ ID NO: 26243 - protein, 430 aa, synthetic construct
MKKIVKDITPELRANDTIKRVAVYARVSCEKDTMVHSLKAQIDYYRKLIMKNPGWKFAGIYADEGKTGTKEAREQFQALLTECRNGNVDMIITKSISRFARNTVTLLSITRELKELGINVYFEDQKMDSMSSDGQLMLTLMAGIAQAESKDCSDAVKWRIRHGYEQGRASSFRILGYRWDDGNVVMVPEEAPLVKRIFDLYLSGKGANAISKILNSEGVTAAWITKWAPTTIRNVLMNEKYYGDLLLQKSFVEDHINKRKVINNGELPQYFIEDDHEAIIDRQAMSDVKNEIAIRRARFYHGQGKESCLTSKIKCPYCHVNYHRKKINGISKWSCATSNRKGKSMCPKSKDIREDVLLAILAHQLGYKDFDEKLFAEQVDYIECFDDHIITHFYDGSIKNSKWSNPSRKDSWTDDMKEKARQRGLNQYGK

SEQ ID NO: 26244 - protein, 597 aa, synthetic construct
MANKVVKVIPARPQGIIIDQAGVIKRKRVAAYARVSTEKDEQTNSYEAQVNYYTNYIQANPEWVFVGIYSDAGITGTSTKKREGFKRMIDDAMNGKIDLILTKSVSRFARNTVDSLVNVRKLREKGVEVYFEKENIYTLDTKGELLLTILSSLAESESVSISQNTTWGQRKRFADGKVSFAYSNFLGYDMGQDGKLHINEEQAKVVKRIYEEYLLGYTPSYIAKRLTADNIPTPQRKKVWYQGVIDSILTNEKYIGDSILQKTFSTDVLTKKRKKNEGELPQYYIENNHPAIITDEIFEMVKEEMARRKSAGLMTNVSCFSGRILCGDCGGYFGRKVWHSNQPNRTIVWQCNKKFNNPDACGTTSIKEKAIEEAFVRAFNEMFSRKDEIIENYKLCIDVICDDSKFQERKNELDKDLEEKTIVIKDFLLKCSKTEENIEESNARYDVLIKEFEALNAERQKCLDMISSLAAKRVKINSFLNILNSAEGVINSFNEVLFQKSVNHMVINHDLTIDVIWRDESKTTTYIERGVKEVKKSAPRIKREKVLSDHTCLCCGKQLYITPGKVQRIFCSKKCGETYRRAKAKEARLENNTISHV

SEQ ID NO: 26245 - protein, 516 aa, synthetic construct
MNIRMIEAQKPIVKKKKLRVAAYCRVSTDHSDQLESLETQKAHYESYILMHSEWEYAGLYYDTGITGTKAEIRDRLQNLLTACRIGKVEHILVKSISRFSRNTTDCLSIVRELLNIGVTIYFEKENIDTGDMESELILSILSSMAEEESASISKNEKWSIQRRMAAGTFKIGYVPYGYHRDENGDMIIEPNEAGVVKFIFRALLAGHSTNTIASALQQQGIPTRKGGKWSGSTVRDIIVNEKYVGDALFQKTYTDESFRRHNNHGEVKTYLVSEHHEPIISREDFDKANALIRQRSKEKGIVKESEKYQNRFPFSGKITCGICGGKYKRRIHCHGAEVAWACNTHIENIRRCSAKYIRDDVLKAAFVTMLNKLIFSRKLILKPLYDTLRADSTDENIKRMQELQQMLEKNSEKKHTLRQLRAQDIIDNVMFNQEMNILRKAADDYRNELAVLGTYTSAEAYEITELDKLLKFTETTAFLDDFSDELFTAFVDHIVVYDRDCIEFKLKCGLTLKEVL

SEQ ID NO: 26246 - protein, 526 aa, synthetic construct
MATVLKIPAKFHPITHLPETKVQKRRVAAYARVSTDSEEQQTSYAAQVDRYTKYIQERADWEFVAVYTDEGISALNTKHRDGFNRMVADALDGKIDLIVTKSVSRFARNTVDSLTTVRKLKEKGVEVFFEKENIYTLDSKGELLITIMSSLAQEESRSISENVTWGQRKRMADGKVSLPYKHFLGYRKGADGLPEIVPEEAEIVRNIYRWFMEGKTPTGIARTLTEQGVPTPAGKEQWCSSTVKSILTNEKYKGSALLQKRFTVDFLTKKSKVNEGEVPQYYIEESHPAIIVPEEFELVQAELLRRQNLRRQYNGKSVFAARLVCGDCGNFFGAKVWHSNSKYRQVIWQCNHKFQGVCKCRTPHLQESVIQQRFQAAVQELLQKRKAILENCQVMLELLTDCMDLERQLQELETQKMRISEQVQGYVRENSEIVQDQEKYEERYQALVGQYEPLQKQETALQEQRAERLARREQIQGFQRALNGQDGMLPEFDTQLWLAAVEKAVVHRDGKIVFVLKDGTELVQKI

SEQ ID NO: 26247 - protein, 428 aa, synthetic construct
MIQKVAFPQKKPFLLKRTAAYARVSSGKDAMLHSLSAQVSYYNQLIQSNSEWLFCGVYADEALTGTKENRAEFQKLLNRCRRGEIDLILTKSISRFARNTVTLLETVRELKTLGVDVYFEEQRIHSMSSDGELMLSILASYAQEESYSASENKKWQMRKDFEQGKVGSMRMLGYRRTKSGKLEIVPEEAEIVRMIFLYYLSGMGKLAIAKKLNEQQICTVRGCVWTTEDVRRTLRNEKYTGNLLLQKSFRENHITKKKVANIGQLPQYFVAGSHEAIISQEQFDAVQKQMAERQKKYAGSCTTNRYPFTQKIRCACCGKYYRRKTTVTGVVWICSTYNTKGKKYCPTAKQIPENTLLSACCDVLEISEFDAEQFAERIEQIQIPAPNELQFCFSDGTEQIVSWKDRSRSESWTAEMREKARQKKWRQS

SEQ ID NO: 26248 - protein, 462 aa, synthetic construct
MENVRKTEEVALYVRVSTEEQAINGDSLRTQREELTRYALANGFHIFGIYEDDGFSATNLKRPALQRLLKDVEQNKINRILITKLDRLSRGVRNYYKVLDVLDEHEVFWQTIFEKYDSSTANGRLHINIMLSVAENESAQTSERIKSVFKTKVENKELIAGKIPIGLKKENKKLIIDEEKKQVILDAFRFYKETTSAYQTFQKLDLKYPELQLNYMRTYRILTNKLYIGIKETRYGDIKDFCPSIIDTITFENTKRLLQKNARKKSANNSDGYLFQGMLKCAECGYTLGGKFYSKNIETSRYYYICKRHHLSMKCSCKTNFNEIKIEEKLLQEFIPQLQKYISDYEYKQKHFKEIDMSKEINSVENKLLKLKDLYVRDLIRIEDYEKDYKEYVSQLDELYKQQEKIETNIPDNNLETLKSFLNNDFILEYNKFTRMQKRRLWISVIDYITLDKNYNMEIFFI

SEQ ID NO: 26249 - protein, 544 aa, synthetic construct
MSMENCTNTKPKITIIPAKTRVERLDPMSVAMGQKPKIRVAAYARVSTDHEEQESSYEAQVDHFTKLIASHDDWTMVDIYADPGLSGKNTKRVQFKRMIKDCEDGKIDLIITKSVSRFARNTLDCVQTARKLKADGIGIIFEKENLDTLQERSEFVLTIMASLAEEESRSISNNIRWSVKKKFQEGKVILNTKHFLGYTRDKKGTVLKIVPEEAITVRRIYAEFLDGKSLKEIAEGLERDGIASPSGRETWHPSTVKSILQNEKYKGDCHLQKTYLPDFLSPRRIKNEGFAQSWYVEDSHAAIISKETFEMVQQEFQNRQSLRSTGETGCGKFSGKYPFSGMIVCGECGETYRRHQQYNKYKKYYIWVCKRHENTGAEYCKSRPIKEEALEKAFVRALNELIGDKEQILEKLQSAIVSEITDSCATAINEVSAEIEKLQEQMMQLLTIRNNGEITDKEYEHQSQQVGMKIDQLLMRKEEILSEQGKVQLASYRIEEVTKLLQTGKILEEFDRVMFKSLVRKITVLSNKEIEIEFECGITVRETL

SEQ ID NO: 26250 - protein, 492 aa, synthetic construct
MIIQEIPTKKEEKPRVCAYVRVSTDSDAQEDSFAFQSNYWQRRFEIDESVEYIGLFSDEGIGGAFMKKRDGLKRMFQKVRNGEIDRIYTKSVSRFARNKVELMEIVREFRDIGVEIIFESENIHTLDPKCGLILTVMASLAEEELISMSQNQKWAARKRFANGSVELTRILGYDMVDGKLVINEKEAAIVRRIFELYLQGNSFISICHILENEGYTPMHGGRWSKSTVMGMLRNEKYCGDSLMQKTYSTMKVQKYNYGELPQYYVQDDHEPIVSREDYQKVQKMMVLRSNKYRPMGSPTALYPLSGKLICGECGTSFKRKTSAHGTPYVCIKWTCRKKDIYGAKECPSHDIKDEVVTRLLIEAYNESIDANNEVNGVTEQEEVLRKLIANEQELRQLRAKGYISESKFREETDKILIKIKEQETLIKNLQTRDMVKGKYKKSDELTEQMAEFLVKATVKDWTITFEFQNGYKATKEYTNGRAGNVNGKLYKH

SEQ ID NO: 26251 - protein, 628 aa, synthetic construct
MKAAFLIRCSTKNQDLNRQTRDLTRLAKSMGYEYDLENLVYGEKITGKDDVTKKNRDSIDRLLRAAKEQRFDVVLVSEVSRMSRDPASGRIYVRLLINMNIPVYFKDIDLWTINPETGKKVRDAELVIGAAFDAAWKYLKSMKTQIASARRNELDNNRISIGQPYFGYKRYEGTDKSKKNQIVVNEEEAEVVQAVYNEYLKEGATLKSTALAITDKYGEKLNRKFSLGTIEHILTYESYATGIKKVNLKDPDTDEVEVFDVNTPIIIDKELYEAATNKRKKNRVKDEPYPNQQVYLLSKLIKCPDCGYTLTPRRKAGEFGQTYRLVNGKPAVSWLCMSGINNITDCTNRTSIANEKLEPIIWELVKKELIGYANMNDEKREEQIRECEEKIEYQNYSIQNFTKEIDKLKKRLSTAYQFSINAAEMAGDDEDMRTMAMEEFNRTAKGVRQEMKNFEKSIEQAKGELEKLRDLKTFYSQPTLPKDYLEQIEGNFTEKRNLVKQLITKIVPYRITTFKKKERESGVKTCNKMITVKNGAVLLEVYTIGGVYNVFYNANSKFQVKTAYYVHGEYATFQNGIRKFPAYDEGEYFVINNANMVMETDDIDEVVTVNEFVYIAIANNWVIEYQYI

SEQ ID NO: 26252 - protein, 588 aa, synthetic construct
MTAVIYARYSSDNQREESIEGQIRECTAYAEKNGITVIKHYIDRAFSAKTDNRPEFQQMIKDSCKKLFDVVLVWKFDRFARNRFDSANYKMILKKNGVHLISVMEPIAEGSQGILVETLLEGMAEYYSAELSEKVIRGQTENALKGKCTGGTGTIGYKIDDDKFYHLDPLTSPLVLEAFQRYDNGDKMVEIVNFLNDKGVHNMLGGQMTHSSVNTMLKNRRYIGELSFRDIVVPDAIPVIVPKDLFDRVQKRLDKNKRAPACGKADEEYLLTTKLFCGKCGALMFGESGTSATGRTYYYYKCANVKRRKGCNKKTVQKEWLEDLVVRETMKLIRDDAVIDKIVQLVMDVQNQENTTIPLLEKQLREVDKKLDNLMKAIEDGLYTRTTKERLEALEIQKDELTAKIADEKLKKPSFNEDFIRFWLMKFRRFDISQKKQRKALIEIFVNAIFLYDDRMLLTFNYKDGTQTVRFEDTLTADGVEGKSSDLSSSAGPKIQRFHVRNRWIFLFISWPHLALTTILTTMRAILSGQSQGQVDFFGRKSICCDMRASVDANALKSWLAIIRAVPSNFQAENASLNNWIALCRMDS

SEQ ID NO: 26253 - protein, 474 aa, synthetic construct
MKVGIYSRVSTQEQAREGYSIGEQVERLKNYCAAKGWILYKTYTDAGFSGANTDRPGMQQLISDVADGKIDMVLVYKLDRLSRSQKDTLFLIEDVFIKNNVNFASITENFDTSTPFGRAMIGILSVFAQLEREQFRERSIMGKDARAKEGLHHGGGAPTGYDYIDGQLIINKEEAELIKEAYRLFLEDDMTMMGIAAKLSVFSEKFKYDHRIRKMLTNPLYAGWTHCRDELYKGQHEAIISQEVFDNVQTKLKIRAENNPHYRNAFNRTSLLAGILWCKKCGARYFKRVRRYEKGSKVYYYNKYQCYSRSSYKNMVRDKSCKNKIWTMDVLDKAVIDEIKALVANPAEVDNIIKLNQSNNNITEKKEFYKKRIKEIEKQMNKLTDLYSIDGIDIDFVAKKITALNTDKKRIESEMNAINEHKPLISAEDAKKRLSGISNILDNGEFTEKVKVITSLINRIEVDDDDIYIYWNFV

SEQ ID NO: 26254 - protein, 584 aa, synthetic construct
MGEKKRVRMLLRVSSNQQLEEDGDLGIQRQLVKEFIAQHEEWHLDSKEYFEGSNSGYSNAVENRDILQQALRDAQRNEYDILAVYKDDRIGRRMWEIGAYVMQLKSYGVDIYTVKDGCISPESDDIMGQMMLALRYGNAQKSSSDTGMRVKDTAQKLVQQGKFVGGKAPYGYKLELSGEISKHGRALHHLVIIPERAKAVKHIYELSLDKEYGSSKIARELNLDEEYKELAPSEVWRGGTVTSILTNPIYAGYTAYKRREKKENGKSKRLDSSEWILSEEPNPELQIISPDDWNLVQIKRKQRGMKYRTAPQNKGVKVIARNEGMLPLIDVIYCGYCGCKCTNGSKYNYWTIKDTGERRASRQAIYKCQDAWQGVPHYKVYQFKAEKIEKIVFQAIAEYIDKLQENEDIFEQISENGRKAKKEKAKELSREQERLKHIQQKISVMEDKIPEAMLGEYPVPVDKLVDLIEKQRQEKEQQEKVIAEKQKELDGADVSFNEWDSLRMQIPTWKDVFLNADNPTKRVLVNKLIEKISVKEDEVVIRFKININEIRSKALKKSGSMVPENKLEDKSVILDSLKIYPNPE

SEQ ID NO: 26255 - protein, 469 aa, synthetic construct
MSEIQKPCFSSPYENPLSISAAENSLSISTAENPLSIPAAENPLSIPTAATLSSILTAIYCRVSTLHPHQKDSLENQIRHYQEFMKKAPNYILTGIYYDFGISGYKENRPGFCKMLEDARKGCFQQIITKSITRFARNTDTVLKTTRELKELGIDIYFELQKIHTLSQEGELLLTLYAAFAQAESENARWLTKMAIQQKYRKGHPMRQLHRCLGYRKDREGNLVPDENAELVRRIFQMAADGWSISQITKYLNENKIITQNDRTFSRSTVSRILHNNAYMGDYICQRYYVNNQRKLVRNKGEKQMYYIRHDHPAIISEELWETAQEKLAKKSERNRQELPSDEIAVMKKAQVPDAPEKITLKETILQKQESGLIPDKPPLTLANYPYKDRIFCKYCGSRLRRIIARNHSVWWICNGLSRKGKAFCKGVRIPDEKLSPLRNVSFSAYIGKELIDGKETYGYSSEPDEWKR

SEQ ID NO: 26256 - protein, 463 aa, synthetic construct
MTTKVERCAIYIRVSTTEQMMHGKSLEAQKEYLTNYAREHNMAVVGIYADEGKTARKELKKRKAIHSLLQDVEAGKIDVIIFWRIDRWFRNLSDFYKVQDILDSHNVRWISTSEPGINMETRDGRLQLNVVLSIGQNEVDTTSERIKFVNEASIRSGKLIFGDVNMGYGYKSGIVDGQKRMVKDPDREHVVDAFYKYFFKHQNKCATLRYIQGNFDPDFSFGIMRTLLSSEFYKGTYRGFPYCPAYLTEDEWSKLQKIQKRNVKSTPSGRIYLFAGMIRCPVCGQLLCGTGCSSIINRKTGAKRTYCYYRCNRAMIDHICSYRHRLSQNLVENYLLDNLENEYKNYKVKCEKIEKEKEKQKKKQSPEKLRKELDRLNFLFQKGRIDWDYYNEEYGRVESELNDLQSALPEPVTNYGYLEELLDTDFRTMYDQLSQENRRAFWRSIIQEIHVNEDHAITSVDFL

SEQ ID NO: 26257 - protein, 526 aa, synthetic construct
MKMKRVICLYRVSTVGQVDHDDIPMQKIACREYAATHPDWEIVDEISEKGVSGYKISTNARDAIIEIKKKAINREFDVLLVFMFDRLGRREDETPFVVQWFVQQGIEVWSTREGEQRFDNHVDKLLNYIRFWQASGESEKTSIRVKTKHIQMVEDGQYRGGYVPYGYKLEHQGRTNKKNQPVRDLVIDEDEAAVVREIFHLLTDEGYGTVRVANYLNDKGIKTKRGKSLWRGTSIRALIDNPIYIGIYHMDGAQSQPFDHLKIVDEAMFERCQQTVKGRATCLGDKMTMPVRTDTRSLLSGIIYCADCGSRLAYSHNVTRRKLADGTERVYERECYRCYRKINARETCDGQSSYNAETINETVLYEVRRILNAIKSKPEAALLEKAKERTTGVNEIAYRQAEADFFEAHKQITALEDQTMKFLTGENTVDISIINAMMPKYKEKLAHAQKRMDETRDKMEAEKATAKNAVQEVTDLLSWAEAFDDATIEEKHMIIARLVERIDIGHDYEIEIKFRISVEQYMRIAA

SEQ ID NO: 26258 - protein, 684 aa, synthetic construct
MSILQTIKTIIRVVLYLRLSDEDKNKLSKEELSQSIKNQEIMLRDYAEEQGWEVVGVYNDDDWSGSDATRPDFNRMIEECKNGNVDIVLCKTQARFARDMELVEKYVHNLFHEWNVRFITVVDRIDNARKETKKTSQILGLTDQWYLEDTSLNIRETLKSKRKDGQLTSSFATYGYMKDPENKNHLIIDPISAEVIKRIYDEYLSGTGLDKIARRLNEDKILSPYEYKLLNGSKLKIPVIKDYVNYGYIEKTGTYMLDVSFTNKEEYILKDLVSFNYITTDMKNFNNKCDIVLKKYTNNRTKIYYSENDNIDINNFNIDDCILLNENDVIPKTAKVIISYTKELDRTHTINYQFEITLKENREHEDYYINICGKATDEIKKSDFIHNIRKKFKWSSSTIRTLLTDEVYIGNMVQFKSTTVSYKNHTVVWNDDETRIRKDNTHEPIIAKDIWYTVQERLENTARSCKSGTVHPLCNKVYCSNCNQIFTKTGNRRSDGTGYLCCKDKKTNWSNCDNKASIREDQLHQFILEKMNEMLKKFYEEDDLKEMQNEVIEQDLYKDKLNSLEKELQSINKELQGKSTYFQKLYEDRTNGILPEKEFLILMNKYKDDNEKLEERQKIVKKEISSTLAKKETVKTKKNIFKKYRHIEELSIEIAYDFIDKILIGNYDETTNSRDIKIIWNFTI

SEQ ID NO: 26259 - protein, 498 aa, synthetic construct
MEIQIREENREQKRKLRVCAYCRVSTDADEQENSLENQIRHYETVIKANPSYEYAGVYSDFAISGFKEKRPGLQKMLADAQKGKIDLILTKSVSRFARNTSIVLEATRKLKELNVGVFFELQNINTLSGEGELMLTILAAFAQAESESGSVGAKMVYQRKYEAGIPVQYLERSFGYTKDERGIFVADEAEAVWVRKIYEMAADGYTPASIKRYLNENGVKTVGGAEWIDSTVFRLIENEIYKGDYIMHKHFVNEERKLVRNRGEVDAWYIEDDHEAIVSPKLWQRAQDALEAKRDYLAEGSVIEEFTEENYPYMNRIYCARCGHPLYKRIYSNGNRLNWGCSGTKRYGKSFCEGINIPDGVLRGAWHFDENMYIGEKQTDKGKKEFTYLKEASWKRRHKKKEQEPIPENTETEYPYREKIFCGLCGSRLVRHVNTKNHKVIWVCNGRKRNGKDFCDGTRVPDTIIKGWGEIKKDIYIQRKDDKNGKKRYSYTSKKPTA

SEQ ID NO: 26260 - protein, 467 aa, synthetic construct
MIRMARSVTVIPARNRQRETGRRAVQEKKIRVAAYCRVSTDQEDQLHSFEAQVDYYTKYINDHENYEMAGIYADEGISGTNTKKREQFKRMIADCEGGKIDLVITKSISRFARNTQDCLAYSRKLKNLGIGIIFEKENINTLDSTGELLFTILSSLAQDESRNISENCKWGIRTKFKNGEMHLNTFKFLGYDKDENGKLVINKEQAKTVRRIYRDFLIGINPAQIAKELTEEKVPGCNGQTKWYPSTIVGILKQEKHMGDALLQKTYTADFLTKRQVKNNGEIAQVYVKDSHKGIIDKETWNAVQEEFERRERFMKDHGTDRYSYGADCIPFCEKVFCGECKSLFTRHSWKSRGIVQWQCKNHRTDGRVTCSNAYVDNSDLEKGFVKAFNKLVADREKFMERWNQMKTDGSSLEKIRAEQMMEATGNDPLGRFVPEIAQLVLAEVTVLGAKKYEFFFLEGSRIKVSV

SEQ ID NO: 26261 - protein, 571 aa, synthetic construct
MMQDRTAPASTNRVAIYIRVSTTHQIDKDSLPMQRQDLIAYAKLMLNTDDYVIFEDAGYSGKNTDRPKFQEMMSQIRQGAFSHLLVWKIDRISRNLLDFATMYKELKDLGVVFVSKNEQFDTSTAMGEAMLKIILVFAELERNMTSERVTATMISRASNGQWNGGRVPYGYNYDYETKDFSINPIEAEIVRLIHDKYEEMRSLVRESRYLNEKGLRTRAGNLWNPVSLHIILHNIFYCGDYRYNVLKEGDRQKVKDESEWITVEDHHEPIISREQKERVIAMLDANKRLDRKRNTYQSEKYVHVFAGLLYCGNCGKPMGATPAAAKKDWQYSKYTCPTRRKLASACNGKFTSDPIVGEFVFNYVLNMLNVQKNFADIHSPEELQAALLIGNTFSYIDHIDEDGLNDLFNMLSSGKIKGTVFGKSAKLKKKKVVSELSKLRNEKQKIERALDRLTKLYLYAEDAMPESEFIIQKSKLTEALDEVNEQIGFSNTDEWNQSVSDEEFVRRASEFIIAQKLTDRNYVSYKRLATSVDTAVIKTFVQGIIDSIIMDAGQVKQIIFKNGLSHTFIFK

SEQ ID NO: 26262 - protein, 523 aa, synthetic construct
MALAQNITVIPARRSIGTQKPAAKVQKIRVAAYCRVSTEYEEQESSYEVQVEHYTNYIKSNPEWEMVEVYADDGISGTNTKKRDEFNRMIEDCKAGKIDMILTKSISRFSRNTVDCLKYTRELKDMNIAVFFEKENINTLDAKGEVLMTIMAALAQQESESLSANVRLGIQFRNQQGKVQINHNWFLGYTKDENGKLIIVPEEAAVVQRIYAEYLDGRSFLQIKRGLEADGVLNGAGHKKWHESNIKQILTNEKYIGDALLQKTYTVNTLEKKRVNNNGIAPKYYVEGSHEAIIDKDVFLRVQAEIARRANILTDGKKRIYSSRYALSSIVFCGHCGDIYRRIKWNNHGCKSTVWRCVSRVLKKSSGIDCPARTIHEEVLQAAVVTAVNDAWSRKDAILPELRENIRSVLQEDTDAELADIDAEVKQKQTELLDAGKDQNKIDEIGDAIMTLREKRQTILTEAAMRKDVQDRIEDLASFLDEQVEAVTEYSDALVRRLIEKITVCDEKLIVEFKSGLEVEVDA

SEQ ID NO: 26263 - protein, 526 aa, synthetic construct
MGKKQKTNGGDAVIYARYSSHNQRDVSIEQQVEACRKHAAELGLTVTATYEDRAISGKTDKRPSFQRMMRDAEQHKFAYVLAWKSNRIGRNMMQALVNESRLVDCGVKVFYAEEDFDDNAAGRFALRSMMNVNQFYIENMAEDVKRGLYDNAKKGLVNGSLPLGYKRGADGKPEIDEPKAAIVREIYTRVAAGELFASIADDLNARGIKTARGREWNKGSFHVLCHNDRYRGIYMYGDIRIPGGMPRIISDELFYDAQEAYSMKKDNRYGRARHGAENYLLTGKLYCGHCGGYMVGISGTSKTGEMHYYYACQKHRLEHTCEKKAIRRDVIENAVARAIMMYCLDDETIDFIVDSTIAYFKQKDHELHIEAMENELAAVQQAISNLMKAIEAGIITPTTRTRLLDLEEQQAKLSAKINTAKAERVEIDRDDLIAGLQLFRTGDIKNKKFLAKLFNTFLIAVYLYDDNRLKIVFSFTGNHNSVEIPLELDNDCPDSEIVSDETEVRMSHLECRRRGSNPYSVSRKGF

SEQ ID NO: 26264 - protein, 535 aa, synthetic construct
MAKKKKPAGGNAIIYARYSSHNQRDVSIEQQIEACRKHAAELGLTITDTYEDRAISGRTDNRPAFQRMMRDAEDGKFQYVLAWKSNRMGRNMMQAMVNESRLMDCGVKVFYAEEDFDDSAAGRFALRSMMNVNQFYSDNLAEDVRRGLMDNASKCMANGRQPLGYKRGEGGKVVVDEPAAAIVREIYTRIASGEMFMDIARDLNRRGIKTQSGSEWNKSSFKVLCRNERYRGIYIYGDTRIEGGIPPIVDDVLWYKVQEVLKVKKSKNRHHCPSDEDYLLTGKLRCGKCGGYMIGMSGRSKTGDVHHYYACQNRRVGHTCDKKNIRRDVVEPAVAQAIKQYCLTDDAIEWITDQTIAYWEDEDRKLQIDSIENDLSAVQSSISNVMKAIEMGVITETTRDRLIELERQQTDLKSKLALAKEEIVHVDRKDLISSLLAFRHGNVHDRAYQEKLFNAFLIAVYVYDDDHLKLVFNSFGKDDTVNIALDLGENDDNSGLSDVSKSSPILSNGQPEQSHLRKLRWLFCLYDSARKNYYR

SEQ ID NO: 26265 - protein, 526 aa, synthetic construct
MPKVTIIPATVNPLTHLPKAAVQKRRVAGYARVSTDSDEQFTSYEAQVDYYTRYIQSKPEWEFVKVYTDEGISGTNTKHRDGFKEMISDALAGKIDLIVTKSVSRFARNTVDSLVTIRKLKENGVECYFEKEGIYTFDGKGELLITIMSSLAQEESRSISENITWGQRKSFADGKIHLAYKHFLGYKKGEDGRPAIVEEEASVVRLIYRLFLDGKTQAGICRYLEDLEIPSPSGKAKWSKTTVTSILTNEKYKGDALLQKSFTVDFLQKKTKQNEGEVPQYYVESSHPAIIEPDEWDHVQAEFARRKALGNAYSGKSIFSAKLVCEDCGGFFGSKVWHSTDCYRRTVWQCNNKFKGGERCLTPTVDTETVQQLFIKAYNQMMGNRKQIIEDCEIMRKKLTDFKSLDADIERQFEETQIVAELVKAAVKDNAVTAQSQEAYLKKYEALTKRYETAAAELERLQNLRTLRSQKDKAMALYIRTLKKQPTVLSEWNDTLWTVMVEKAIVHRNSEITFEFYNGTKVKVRQ

SEQ ID NO: 26266 - protein, 427 aa, synthetic construct
MQEKMITKIDALPQLEKKLKVCAYARVSSGKDAMLHSLSAQVSYYNNLIQRTDGWEFVGIYADEAISGTKDTREEFNRMVEDARAGKIDLIITKAISRFARNTATLLSTIRELNSLGVDVLFEEQNIHSMSSEGEMILTLLASVAQEEARSTSENMKWRIKHNFEEGLPWGALLYGYKVIDFKYYIVEEEAKIIRLIYQLFLDGLGKEGIARKLNEMGYKTRIGANWSDTSVRQILTNYDYTGNLILQKTYRIDYISKKSVVNHGELPKYHVEESHDAIIDLETWNKVQEEMKRRRERIKWKKDRVDSPLKGKIKCGCCGKNYLRKAYAYRTFWVCATYARKGKDGCLSKRIDEGELFKIIEELKIKIDSIKEITINNDMTLYILNKDGTKFTANWNVHSRKDSWTDEMKEKAKQRELERQAKLWQE

SEQ ID NO: 26267 - protein, 537 aa, synthetic construct
MARVTVIPSTINPLTQAPLTAEVKRRVCAYARVSTDSDEQYTSYEAQVTYYKKYIQERPDWEYVDVYADEGITGTNRKRREAFNRMIKDALDGKIDLIITKSISRFARNTLDTISITRELKAKGVEVYFEKENLWTFDSKNELVLTIMASIAQEESRSISANVTMGKRWGFQEGKVMIPFKNFLGFKKGPNGEVEIDEEQANIVRFIYKEFLIKGKTYTAIANELNEAGVPTPSGLEGRWLTNVIISILTNEKYKGDALLQKRYTDNYLEHTLKRNEGELPQYYVENNHPAIIDKYEWEMVQTEIQRRKQIGKKYSASTQFASKLICEDCGGFFGKKIWHSTSKYAREIYQCNSKFSRKNGKKNCKTPHLTEEEIKSMFIQAYNLTMQDKERLLTDTKEVIQLLTNTETLDEKITSIKNEIDIISELVRKLVKQNSTEAQSQEEYQKKYNDLSERYNKLKDELDKLINDRAYKLGQSTKLEAFLKEMETAETTIDTWNDELWMIMVESAVVHKDKSITFKFYNGKEIRIYSQKAIQN

SEQ ID NO: 26268 - protein, 464 aa, synthetic construct
MARSVTVIPARSQKVQTGHKAVQEKKIRVAAYCRVSTDQEDQLHSFEAQVEYYTKYINEHENYEMAGIYADEGISGTNTKKREQFKKMIADCEGGKTDLVITKSISRFARNTQDCLAYSRKLKNLGIGIIFEKENINTLDSTGELLFTILSSLAQDESRNISENCKWGIRTKFKNGEMHLNTFKFLGYDKDENGKLVINKEQAKTVRRIYRDFLIGINPAQIAKELTEEKVPGCLGQTKWYPSTVTGILKQEKHMGDALLQKTYTADFLTKRQVRNNGEIAQVYVKDSHKGIIDKQTWNAVQEEFDRRERFMESHGTDRYSYGADCMPFCEKVFCGECKSLFTRHSWRSRGIVQWQCKNHRKDGKVACTNAYVDNADLEKGFVKAFNRLVTDRDKHMERWQQMKSDGTPLEKIRAGQMMEAVENEPLTRFVPEIAQLVLCEVTVLGAKKYEFFFLEGSRVKVSV

SEQ ID NO: 26269 - protein, 558 aa, synthetic construct
MDKKILCIIRASTEKQETESQKKELVAYCITKGYAVEEMEFIEVAGASAVKLNKKYIQMLEDIKATILSIPTITAVALWHLNRLGRVESKLHEMKEWFLQHKIQVYCKNPDFTLLDDTGKESAAGSLAFSMFASVVKFETDEMFAKMKRGRERNKVNGIFYGGKIKFGYTLDATKHFIINEEEAQTVRLIFNLYSSGKYSFYDLIEELKARGITKGGMKITYEMIQNALADEAYYSSKILPSIIDKELFDKCAAIKANTVAVKRTKESVNVNFAVGLLKCKCGNNFIANGDFYRCYSKINQQRKKKVVKCDAPIIRRDIMDDTLWLVTRLLQQRFLMDKDSVDISEQKDKINVLTAKLSTAQKGLSSIKDRKEKLEDAYYVDGEMNEAQFKKRLASLHSKEVQTESLIRNYKTEIEDIQKVIKQIELPSNDRYLQSLLLSDLDVEELEDRKKIKEMMFNHIDKVTVNRVMKGNHKCVEITITSKTKLTFVFLYDSWLNSHRKGECNLFYEDKPVYEIDGAIIRQNKAVTKMLYQKIGLPELTSRELGEAAARYAKKQE

SEQ ID NO: 26270 - protein, 548 aa, synthetic construct
MSTGTELRAVFYARVSTEEEKQLNALEKQIQENKDVIRDHGWRLVGEYIDEGKTGTTTKRRNDYKRLLKDMTENKFDIVVCKDQDRLQRNTLDWYLFVDNLVTNNLKLFMYLDNKFFKPSEDALITGVKAIIAEEYSRNLSKKLNNSNKRRIERALNGEEVSAMGNGKSLAFKIVNGKWVKDEEEAKLGKKIFELYLEYDSIRKVRDWVNEHGYTNSVGKPFTSESISRILKNEKAKGVIVMGKYHHDFDKKKIVRRSEEELVRIPAPELAYVSEEVFDKVQERLRAKTGNGRGVNAYSDPLSGKIYCGSCGRKLWKHASNGYVNWMCASQVAKGDVECNGTRITTVAIRNIYKKITDNLEVNKGVVKQDIVKWLNELKATLSDTSVNEKIQKDLDKLERKRTKLLEAYLEDFISKDDYKAKYEAIEGQIEEKKKLLVPVEENEDIKVIESVLQNIDDEIDAYVKTLDMEESKVDFLIEHTKRITVLENRDIIIELDLVAGAIIAGKDFLLYVHDTMPQHHGPKHLHPSGPQTAPRCCFRDRFSCDQP

SEQ ID NO: 26271 - protein, 539 aa, synthetic construct
MSTGTELRAVFYARVSTEEEKQLNALEKQIHENKDVIRDHGWRLVGEYIDEGKTGTTTKRRNDYKRLLKDMTENKFDIVVCKDQDRLQRNTLDWYLFVDNLVTNNLKLFMYLDNKFFKPSEDALITGVKAIIAEEYSRNLSKKLNNSNKRRIERALNGEEVSAMGNGKSLAFKIVNGKWVKDEEEAKLGKKIFELYLEYDSIRKVRDWVNEHGYTNSVGKPFTSESISRILKNEKAKGVIVMGKYHHDFDKKKIVRRSEEELVRIPAPELAYVSEEVFDKVQERLKAKTGNGRGVNAYSDPLSGKIYCGSCGRKLWKHASNGYVNWMCASQVAKGDVECNGTRITTVAIRNIYKKITDNLEVNKGVVKQDIVKWLNELKATLSDTSVNEKIQKDLDKLERKRTKLLEAYLEDFISKDDYKAKYEAIEGQIEEKKKLLVPVEENEDIKVIESVLQNIDDEIDAYVKTLDMEESKVDFLIEHTKRITVLENRDIIIELDLVAGAIIAGKDFLLYVHDTMPQHHGAERIRPSGGGSKHGRLF

SEQ ID NO: 26272 - protein, 498 aa, synthetic construct
MQIEVRKADMGKEKKRLKVCAYARVSTEASEQENSLENQVSYYTEMIQSNPAYEFAGVYADFGISGFKESRPQFQKMMQDAKNGKIDLIITKSVSRFARNTAIVLKASRELKERNVGIFFELQNINTLTEAGELLLTILAAFAQAESESASESSKMAYLHRIENGEVVAYLERSYGYGKDENGEYRAKEPEASVIREIYDLVIQGVNCTNIARVLNARNIQTVQGAEWTASTVFRIVENEIYKGDVLMQKTFIDGKRHQVQNRGEKAMYYAKDNHPPIVSKKTWEKAQRKLEDMRAERAEHSVIQEFTEENYPYMNHIFCAKCGWPLKPRVYSHGHRLSWDCSGQKRGTKKFCTGIHVLDNDLRKMKIEGNRYFSETVDKYGEVHLKHVGERTWKNKHKKKKFNHKDLYPELNEENYPYYKRLYCARCGSRLGRYISHGTVRWICSSYKRKGQAKCPGVRIPDEIIKEWNLPDGKIYIMGKEDKNGEKHYSYTSESAL

SEQ ID NO: 26273 - protein, 465 aa, synthetic construct
MARSITVIPASQPYRVGGRTQQKTRNLRVAAYCRVSTDQEEQLNSFENQVEYYTKYIQDNPLYQMAGIYADEGISGTNTKKREEFKRMIRDCEEGKIDLVITKSISRFARNTQDCLEYSRRLKNLGIGIFFEKEHINTLDASGELLFTILSSLAQDESRNISENCKWGIRSKFKKGIPQVDCTKFLGYDKGEDGKLIVNQEQAKIVKRIYREFLDGYNPAAIAKMLMEDHIKTGTGREEWRSASVRAILKNEKYMGDALLQKTYTADFLTKKVKKNHGEVEQFYVKESHEAIIPKEQWEAAQLELERRDSYMQELGLTFYGYGSEVNPFSCRVVCGKCGAVCGKKSWKSRGVEVWQCNNRSKNHGVKGCASENLPHENLLKGFITAWNQIVAEREQYLPKWEKKKKEGNPLEKLRAEQMIELTLQPPLTKMLPELGQMVLERVIVQGKEIMVIRFLDGTEIKVRI

SEQ ID NO: 26274 - protein, 536 aa, synthetic construct
MPRKKKLQEVGGLRLVAYYRYSNGGQQTEQSIEGQRRDCEAYAKAHGYKIVHEYIDRHISGKSDSRPAFQQMISDSDSHLFDAVICWKTDRLARSRYDSIIYKTRLRRNGVKILYAAETVVDGPEGIIIEGLMESLAEYYSAELAQKLRRGQRESALKCIALGGNRSFGYDIGPDKHYCINEKQAPAVRYIFEQYAAGATAADIVRELTSRGYRTSRGNPFNKNSICRIITNEMYLGVYKYADIRIEGGVPAMIDRELFNRCQTQLAFNRAHGGGKGAPRADYVLVGKLDCGLCGHAMKGASATGHTGSKHYYYTCTQHVEKKCPKTSIEKNYLEQVIVDGVAKYVLTPEKISQIVDCMMELQAKEQEPKDNPEKDALEAELAECRRKQNNILEAIEEGGSARLAARLRALEEQEAQLTFALGEINNAPAPPQFSREALTFMFEQFRREEDEVDEEYRRRILDTFVSSILLYEDWAEVKFNITDQKTGDFERVILPISANKKPPEDDDTTSNSEGSTALRLVEAMGVEPMSEKSSV

SEQ ID NO: 26275 - protein, 550 aa, synthetic construct
MYYQPKINFSPNEVIAYLRKSRSDDPLLTVEEVLSKHETMLDEWAEKNLGAAVPEENKFREVVSGETIAERPEINRVLRLIESPKYKAVAVVEPQRLTRGDLEDIGRIMKLLKHTSTLVITPQRIYDLRDEYDWDTFERELKRGNDYLEYTKKILNRGRLLSVSQGNYIGNVPPYGYSKTFVTEGKRRYPILVPNKEEADVVRMMFDLYVNKDMGCQNICNRFDEIGIKPPKGEHWSPSAMAKMLENIHYIGKVKWNYRKTLTIVEEGEFKKTRPIAKAGEYLIYDGKHEAIVSEDLFNAAQAKKGKHTRQKPNTKIRNPFAGLLWCKCGRAMSLRAYKSNISAPRLLCDGQTHCKTGSCLYSEMNERVCSILTNCIHDFEIRLQNNEGDSVKQHMRLIKKLEVRQKELEEKELAQWEAQADPDPAKRMPQHVFQQLNERLLKEKEEVRQTLCKAYESMPEPVNYEEKIAQFTEALNALKNPKVDAATKNRLLKACIDRIEYYRDAPQRIRSQKVIYYDPEQKRTRCKSPLNVGGNWTSPEIILDVKLKV

SEQ ID NO: 26276 - protein, 463 aa, synthetic construct
MTTKVERCAIYIRVSTTEQMMHGKSLEAQKEYLTNYAREHNMAIVGVYADEGKTARKELKKRKAIHSLLQDVEAGKIDVIIFWRIDRWFRNLSDFYKVQDILDNHNVRWISTSEPGINMETRDGRLQLNVVLSIGQNEVDTTSERIKFVNEASIRSGKLIFGDVNMGYGYKSGIVDGQKRMIKDPDREHVVNAFYEYFFKHQNKCATLRYIQETYDPDFSFGIMRTLLSSEFYKGTYRGFPYCPAYLTEDEWNKLQKIQKRNVKATPSGRIYLFAGMIRCPVCGQKLCGTGCSSIINRKTGAKRTYCYYRCNRAMIDHICSYRHRLSQNLVENYLLDNLENEYKNYKVKCEKIEKEKEKQKKKQSPEKLRKELDRLNFLFQKGRIDWDYYNEEYSRVESELNNLQKVLPEPAPNYSYLEELLNTDFRTMYDQLSQENRRAFWRSIIQEIHINEDSTITSVDFL

SEQ ID NO: 26277 - protein, 481 aa, synthetic construct
MGKAVQNKTRIAAYCRVSSLSQEQLHSFDAQVNHYKTAFANDDSVVFVGIYSDAGISGTQAATREGFMRMMDDCRKGLIDCIWTKSVSRFGRNTVDTLIYTRELRSLGIDVFFEKENLHTMDAAGEMLLTLMAAFAESEIESHSQNVKWGKHRRFERGLVEVINISNLTGFHQSNGIVSIVESEADVVRRVYKEYLDGFNMYEIADHLNTDNVPRRKSGTVWTGTQIRNMLTNEKYAGDCLLQKSFTIDPITHKHIRNRGELDQFFVEGCYPAIIDKENWLVVQEMIKQYGHSRLTSSESHPLEGKMFCAVCGKAFNQTVTTAKDRTHVSLYRCLSRRDHSGVEVPGMTYVQPHPSTYNINPSPALVEYREKYCRKQEPRRYLCSDTRIKIDQPGKAFVRAWNSLMSHAQRYLPTLQSNTTSENLLYKYHSGILIDLLETGTRLKEFDARLFRKTVEKIDVNPNSTLTFYFKAGIRITEKV

SEQ ID NO: 26278 - protein, 545 aa, synthetic construct
MTEKKIKKIEATKPLYSNNFQNYSRKRRVAAYARVSTDKEEQESSFDAQVSYYTQKIQANPQWVFVEVYADEGITGTSMKKRDGFNRMINDALDGKIDLILTKSVSRFARNTVDSLTTVRKLKDKGVEVYFEKENIYTLDSKGELLITIMSSLAQEEARSISENTAWGRRKQFADGKYSLAYSTFLGYDKGPNGELVINEDEAPIIRRIYDEYLAGLSPYMIAKKLTADGIETPAHKTVWQPSTVQSILTNEKYYGAATLQKTVVVDFLSKKVRPNRGELPSYYITEDHEAIIAPVKFRMVQEEMERRKKAGGKAQSVSVFSGRIVCGDCGGFYGRKIWHSNTENASWHWHCNNKFLKRKYCNTPTLKEESLQETFVEVFNGLIKQKKEIEENYRLCLDAITDTTEYELQMEKLDKEATEVQALIRSLLIEYGRSADSNDIAAQYEEYEGRLDTIARLRQELDMKIASCGLKRTQITAFLMELKKHDHPLSEFDPLVWQATVNHARVDHDCNIVFCFRDGSEVKTKIRNGVRQYRKRSKGEHTDG

SEQ ID NO: 26279 - protein, 427 aa, synthetic construct
MAKSIVTIKQDKLIGMLRKRVAAYARVSCGKDTMLHSLAAQIDYYKALILNNPAWTFAGVYADEAKTGTKEDREQFQELLNQCRAGMIDMVITKSISRFARNTVTLLQTVRELKELNIDVFFEEQNIYTLSAEGELMLTLLASFAQEESRSVSENCKWRIHHGFEEGKPNTCRMLGYRLIDGEITLIPEEAETVRRIFDLYLKGYGKQKIANILNEEGLVTVNGGTWHPEPIVKILTNEKYSGDLLLQKVYRPDHVQKIDFHNDGQLPSFLVEDDHEAIIDKQMFLRVQTLREGRAIRKGLRQEPSLFSGLVRCGCCEARCRRKKTHGIVKWWCSTFDRKGKQYCPDAKAVPEEALIKSACDVLEADVLDEAFLRERIDHIDVCTDNVLRFFLKDGSKPERQWRDHSRAESWTPEMKETARKKEVLR

SEQ ID NO: 26280 - protein, 491 aa, synthetic construct
MRFLNVALYVRVSTDIQVDGYSIDEQLERLEKYCDAKDWIIYNKYIDPGFTGSNINRPGLTKLLQDIHKGKIDLVLVYKLDRLSRSQKDTLYLIEEEFLPNNVDFISMTENFDTSTPFGKAMIGILSVFAQLERENIKTRLAMGHIGRAKAGYWRGGSNPPIGYDFINGKLIINEYEALQVRTIYKMFLDGETIHGITRYMSEHFTNRYSNYRTPGQTGVILRNRLYIGKIKYKGVEYDGVHDPIIDIDTFERVQKRYKEISGKWSDHYRSPFKAKHLLTGLLYCGNCGARYFACTQRRKDKTTGKYIKSTESYVYYKCYTRDGNKSMRKGDYCKNPTIRVDKLDKVILDEIKKLKLDPDRLERIINTESKEKVENTELTVLRNKLDNTQSKIDKLMDLYTIGTIPITEIGDRIKPLYEEKEKIELEINTRENELQEPHGLSISETRDILDQFADIDNLDHDLKRELVQSLIERIEVLPEPDSIKIYWKFV

SEQ ID NO: 26281 - protein, 514 aa, synthetic construct
MKQCVIYARYSSERQTEQSIEGQLRVCYEFAKNNDLIVVHEYIDRAMTGTNDLRKEFQQMLSDSEKTKEWDICLVYALDRFGRNSIEQAINKYRLQKTGKIVISATQRTSRNIDGSQNLDGIILENMYVGMAEYYSAELSQKVKRGMNESRQKGNFTGGYIPFGYCVTGDRKTGRKVQINEDQAIIVRKIFEDYAAGRLVTDIIDELHEKGIENRGQPFARNTVYYLLKNEKYAGIFRHGDEVFTNIYPPIISQTTYDIVRARIENNKYGKHKPDVEYLLKFKVTCGYCGSPINSDSGTSKSGVIMRYYKCSGRRKGKNCQSTPIRKEVLEKVVIDATYKALATPDLIEDIAERIMGAHQKRMDDQSILHILEERLAEKKSSIDNLIAAMEQGIISQTTKERLNALEAEKAELINKIAVEKLKSNLIIQKHDIVKYLQSAVKKRPLQMIQLLIKQVVLYNDKIEIHFNYTDGKRPDDELHQAFSFYSFNQRITIDQHKIGKEPIVTDYEITLFI

SEQ ID NO: 26282 - protein, 521 aa, synthetic construct
MKKITKIDGVQNNSTVNKELRVAAYCRVSTGSDAQLESLEAQKTHYERYINSREDWKFAGLYFDEGITGTKAEKRPEFLRLIADCETRKIDFVITKSISRFSRNTTDCLALVRKLQSLNIPIFFEKENINTGSMESEIFLAILSSMAEGESASISENSKWSIKRRFQNGTFKLSYTPYGYDWDGENMIINPAQAAVVKRIFADILSGKSTNAIADELNAEKIPSKKNTNWTSSTIRGILANEKYTGDVIFQKTYTDENFNRHKNYGEVDQYMAPDHHEAIISHADFEAANALVSQRALEKGVKKGSDKYQKRYAFSGKIICGECGDTFKRRIHTCITYKYVAWACNTHLKDKTACSMKYVRDDDIKAAFVTMLNKLIYGHRLILAPYLKALENSSGDEALQRIQHLELLLDQNSEQRETLTKLMAQGYIDQILYNQETNALLLQAETYRSDIEAITICMTGDSAKVTETNLLLHFVSHADMLTTYSEELFESYADHIEITDRNEIKFVMKCGLTFTERIGD

SEQ ID NO: 26283 - protein, 522 aa, synthetic construct
MGNVMVIPARRQVGNTVKQSDQKKLRVAAYCRVSTDSEEQETSYEAQVTHYTEYIQKNPEWELAGIFADDGISGTNTKKRDEFNRMIDECMAGNIDMVITKSISRFARNTLDCLQYIRQLKDKNIPVYFEKEAINTLDAKGEVLITIMASLAQQESQSMSQNIKLGLQYRYQQGKVQVNHNRFLGYTKDDNGHLIIDPEQAEIVKRIYREYLEGSSMDKIADGLMADGILTGAGKTKWHTSTINKILRNEKYMGDALLQKTYTTDFLTKKRIKNNGTVPQYYVEGDHEAIIAKELFMQVQAELVRRRVVHVSPTGKKRSFSCNHCFAQMVFCGDCGELYRRVHWNNHGCKSIVWRCISRLEPTSAEMDCTNRTVNELLLQEVTVKAFHQILTERDFFLKTLQQNIAKAVVNADTLSPDGIQARLEELQKELIKKANNKQDYDAIADEIFRLRDQKEQSELDSHHREEAMNRIKELQDFISGQETDITEFDEALVKKLFEKITVFNDHFTVEFKSGITIDIES

SEQ ID NO: 26284 - protein, 509 aa, synthetic construct
MRVVLYMRYSSDRQTEQSIEGQNRVCTAFCEQQGYEIVDRYIDRATSAFKDTDKRTEFQRMIRDSEKQLWEGIVVYKLDRFARNRYDSATYKARLKKNGVRVISATENISDNPEGVILEAVLEGMAEFYSKELSQKITRGMFESANKCHSIGGHIPLGYKIENKKLVIDEAGAAIVREAFDLYANGATVAEICETFNTKGYRTAKNAEFNKNSFRSMFKNERYIGIYKYKDLRIEGGVPAIVDKDTFAIVQKKLSKNAEAPSRGKAKIDYLLSQKLFCGHCGSLMTGESGTGKGGTTYFYYTCGKRKREHTCDKKPLKKDFIERAVVEDALTLLTPETIEELADIAVNESIREMEENSIIPALKNQLHEIERSINNLVKMVEKGVESDTIADRLKELEKEKRAIEKRLVVAQDDYVILEKEHIVWWLSDFCNGDIDDEEFRRHIIDLLVNSVTVWDEPDGWYKITSVYNLTSNKIKTFRCSDLSGQAPPERYRTNAYFFSGSFAVKCSL

SEQ ID NO: 26285 - protein, 531 aa, synthetic construct
MKGAVIYARYSCERQTEQSIEGQLHECYKYAEKNGLSILGEYIDRATTGTNDNRPAFQKMLADSERTTAWDIVLVYAIDRFGRNSIEIAINKQKLIKNGKNLISATQRTSTNIDGSKNLDGILLENVYIGLAEYYSAELSQKIRRGLTESRNKGLFCGGKVVYGYCVKDKTIHINEAETETVRYIFQEYNNGKTIPDIIEVLDARGIKYKGETFKKNFLYRMLRNEKYIGITKYDGVEYKNIYPPIIKEDLFNAVQSRMVTYSVGAHSKDADLLLKGKVICGLCGHMMNGDCSTSRSGKLMHYYKCSGRKRGTGCESRILRQDKLDEFIVDVTKQVFCTKENIQLLVDKVIAVHKQRQKDESILNSLKNRHSDLVKSINNMLFALQEGIITPSTKERLNMLESDKAEIEEQIAKEELALSKQISRDEVEYYLRRAIKSSPKILLNNLVDKVIVYDDKIEIYYKYCHKIPDDPDDQRGYFFEELRIPINCGKRNKQFLPITIDHQKMIASVKYILNRRKKMLAPINYKKNPS

SEQ ID NO: 26286 - protein, 528 aa, synthetic construct
MSRTAARSVTVIPPTINPLTHLSKVAVQKRRVAGYARVSTDSDEQFTSYEAQVDYYTQYIKRNPEWEFVKVYTDEGISGTNTKHRIGFNEMIADAMSGKIDLIVTKSVSRFARNTVDSLVTIRKLKEKGVEVYFEKENIYTFDGKGELLLSIMSSLAQEESRSISENVTWGQRKRFADGKVNLPYKQFLGYRKGADGFPEVVPEEAAIVRRIYTRFMAGLTPGAIAKELTADGIPTPSRKQRWQTSTVESILQNEKYKGAALLQKCFTVDFLTKKRKVNEGEVPQYYVEHSHEPIITPEEFDKVQTELARRKRISRQYSGKSIFSSRIICGDCGSYFGSKVWNSTSKYRRVIWQCNGKFKGEHKCETPHLNEKTIKARFIVAFNAILDSKDNILEDCRLMQTALTDCTGIDAEIESLLEEIDVVTELTKRCIAENSQTAQNQEEFTARYNGFVERYEKAKAQLEQLRTTKAEREAQAEAIGAFMFEVQELDALTEFDEKLWLTIIDTVTVHTDGRMTFKFQGGTEIDI

SEQ ID NO: 26287 - protein, 434 aa, synthetic construct
MERVVERVDALIPAQPRALRVCAYARVSTGKDAMLHSLSAQVSYYSKMIQSHNGWMYCGVYSDEAVTGTKRERAGFQHMIEECRQGNIDLVITKSISRFARNTVTLLQTVRELKSLGVDVFFEEQHIHTMSADGELMMTILASYAQEESLSASENQKWRVRKAFENGEIINLRFLFGYDITPDGIQVNEKDAAIVREIFARFNGGESMSSISRDLDARGHKGVLGGTWCAERMRNTLSNEKYLGNALLQKRYRNNHIEKKLLSNRGELPMYYAVGTHEPIIDQATFDKAQERLKMLAQQAANRKKPTRSAFSGLIRCGLCGSTYKRVTYRKKHYWNCTIFQTKGKSECAAKRIPEETLEVLTCEVLGEGSIDCDMVRSKITTIRAEKNNVVVYCMDDGSEIVKRWTDRSRAESWTPEMKEQARQRALQARRHKV

SEQ ID NO: 26288 - protein, 590 aa, synthetic construct
MRTIRKIERSVPNLRRRKKVAAYARVSMDSERMHHSLSAQVSYYSSLIQKNPDWEYAGVYADYGISGTGTKKRQEFQRMLEDAEAGKIDIILTKSIQRFARNTVDLLRTVRHLKELGIEVWFEKENIHTLSGDGELMLTVLASFAQEESRSISENVRWRIKKQFEKGNPNGHFRVYGYRWKGDELVVVPEEAAIVRRIFQNFLDGKSRLETEREFAAEGITTRNGCRWMDSNIKVVLTNITYTGNLLLQKEYIADPILKKRKKNRGELPRYYVENTHEPIIDKETFDYVQKEMARRKELGALANKSLNTTCFTGKIKCGICGRSYMHNLRTDRGFEEFWNCGSHKLAGRSCGAKGSIPHKILIKECTEVLGLDNFDEQVFLKQVEKIVVPEYHVMIFCMKDRQKITRHWESTAKKDSWTEEHKNHQRAWMKNYMANGKGTRFYPFTTRIRCAVCGSSFRRCKGNIKSGESVHWRCRQGGKCEAVSVREDDLERVIAEVMGMKDFDEDAFRNKVECVEVGKKACLTVRFKDGRKIETSYTPSKKKMPPHTKEYREHMKKVMKEKWTPERRKQESEKMKRIRKERGKNWRKQ

SEQ ID NO: 26289 - protein, 522 aa, synthetic construct
MAKTVRAIPATISRYTAAPINSRKKRKVAGYARVSTDHDDQVTSYEAQVDYYTHYIKGRDDWEFVGIYTDEGISATNTRHRDGFKRMVKDAMDGKIDLIITKSVSRFARNTVDSLTTVRKLKDKGIEIYFEKENIWTLDAKGELLITIMSSLAQEESRSISENVTWGHRKRFADGKVCVPYRHFLGYDKGPDGNLMVNKEQARTVKLIYRLFLDGYTFHSIARELTARGLETPARKKRWYPGTVESILTNEKYKGDALLQKRFTVNFLTKETKANEGEVPQYYVENNHEAIISPQVFDWVQEEIKRRREGRGRYSGVSIFSSKIKCGQCGGWYGAKVWHSTDKYRRTIYRCNDKFKSHCKTPHLTEDDIKEAFVRAVNQLIENKADVLDSITLLKERLTDTEDLEEERDRISTDLNLLADKIQQLIAENARVAQNQDDYDRNYNELVSRYEAAKTQYDKTCEAIQYRKARSRQMDSFIKELRNQDLIKEFDARLWGSLVDFITVYSKDDIRVTFKDGTEIRA

SEQ ID NO: 26290 - protein, 504 aa, synthetic construct
MEDFIYARQSVDKEDSISIESQIELCLREVGNNPHRVFRDKGYSGKNTERPDFQDMMAAVRAGGARRIIVYRLDRISRSVLDFANVISELQKYGVEFVSITERFDTSTPIGKAMLMIVMVFAQLERETIQQRVMDAYRSRSRKGFYMGGRVPYGFELENTVMEGVKTCMYKPIPEQIQVVQLIFSLYAMPQVSFADVVRYLSQNGIKNPNGKNFSRMRIRDIITNPVYAKADASIFEFFHGQGTEIINDISQFIGTNGAYLYTGNKAAKRKSISLDGHVLVLAPHAGCIDADTWIRCRRKCLNVRQIAKPVKAKNTWLAGKIKCIDCGHALSLKSYPRKRSADARYYICNSKYVSASCDGVGAIQAAGIEDIVFDEMSRKLKEFNKLSYKEKHGDPIELTKLKIRAEEIEKEIATLIDKIVSASTATMEYINERIDALDEEKKTVKEKIAQMSAEMYDRQNIGVISDYMSKWNDISIDDKLTVVDTLIESIHVGHGKVKIAWKI

SEQ ID NO: 26291 - protein, 597 aa, synthetic construct
MANKVVKVIPARPQGIIIDQAGVIKRKRVAAYARVSTEKDEQTNSYEAQVNYYTNYIQANPEWVFVGIYSDAGITGTSTKKREGFKRMIDDAMNGKIDLILTKSVSRFARNTVDSLVNVRKLREKGVEVYFEKENIYTLDTKGELLLTILSSLAESESVSISQNTTWGQRKRFADGKVSFAYSNFLGYDMGQDGKLHINEEQAKVVKRIYEEYLLGYTPSYIAKRLTADNIPTPQRKKVWYQGVIDSILTNEKYIGDSILQKTFSTDVLTKKRKKNEGELPQYYIENNHPAIITDEIFEMVKEEMARRKSAGLMTNVSCFSGRILCGDCGGYFGRKVWHSNQPNRTIVWQCNKKFSNPDACGTTSIKEKAIEEAFVRAFNEMFSRKDEIIENYKLCIDVICDDSKFYERKNELDKTLEEKTIVIKDFLLKCSKTEENIEESNARYDVLIKEFEALNAERQKCLDMISSLAAKRVKINSFLNILNSTEGVINSFNEVLFQKSVNHMVINHDLTIDVIWRDESKTTTYIERGVKEVKKSAPRIKPEKVLSDHICLCCGKQLYITPGKVQRIFCNKKCGETYRRAKAKEARLENNTISHA

SEQ ID NO: 26292 - protein, 431 aa, synthetic construct
MMKKIVKDITPELRANDTIKRVAVYARVSCEKDTMVHSLKAQIDYYRKFIMKNPGWKFAGIYADEGKTGTKEAREQFQALLTECRNGNVDMIITKSISRFARNTVTLLSITRELKELGINVYFEDQKMDSMSSDGQLMLTLMAGIAQAESKDCSDAVKWRIRHGYEHGRASSFKILGYRWDDGNVVMVPEEAPLVKRIFDLYLSGKGANAISKILNSEGVTAAGITKWAPTTIRNVLMNEKYYGDLLLQKSFVEDHINKRKVINNGELPQYFIEDDHEAIIDRQAMSDVKNEIAIRRARFYHGQGKESCLTSKIKCPYCHANYHRKKINGISKWSCATSNRKGKSMCPKSKDIREDVLLAILAHQLGYKDFDEKLFAEQVDYIECFDDHIITHFYDGSIKNSKWSNPSRKDSWTDDMKEKARQRGLNQYGK

SEQ ID NO: 26293 - protein, 615 aa, synthetic construct
MGNVKVIAANPKKAHGIKGLIKKLLRVCAYCRVSTGTDEQKTSYESQIKYYKQKIKQNADWELVDIYADEAISGTQVYKRINFKRMIDDALAGKIDMILVKSISRFGRNTVDILKYIRLLKEHGVAVYFEEENINTMQMQGEILLTVLSAIAQQGSATISSSVALGARMKMKRGELVGHYAPYGYRYDKDKEELIIYEEEAQVVREVFRLYVEEGLGTARIARVLNNRKIPSPTNKMWSGTVITRMIRNEKYCGDLLTGKTYTSDPISKKKIINHGEKDNFYTKNHHAAIVDREIWEKANALLDRRTSEYKEKNKLNKESHMYPFSSKIDCGCCGQKFIRRSWAPHKPGQPKRVAWSCRTFMRRNDNYCQNIGNVKENIIEEAFVQAYNSVCENHTIIINQLLDTMEKILSGNNYDKEIAKVREQINTFKDRESNLVDMKLDGIIDSNIYVQKSDEIKNKILLLEEKLDEYKNIMKDENDIKRRIGEFKSIFKKKNILTEFDSVVFNSITDKIIIGEKDEFDVLDPNVIKFVFRNGKEVKQALPRKLNSKQTVIEKYAEEIRKQQSSASSDEKNIIQVNTKEVDENESVEFDSIGANCNNEKYCSSKSKRLNCCN

SEQ ID NO: 26294 - protein, 530 aa, synthetic construct
MALLPKKTAKHPAKPKRGKKLEIEEPGVLYGRYSSHNQKDISVEQQFEKGYELAAEYGIRIIDTYADRAVSGRTDKRKDFQRMMSEAAKGKFRYVIAWKSNRMGRNMLEALINEARLQELGVRVLYVEEDFDDTAAGRFAARSMMNVNQFYSENMAEDIKRGLYDNASNCMVANGHLPYGYKRDETLHYVIDEPKAAVIREIFTRVAAGEPFVDIMNSLNARGIKTSYNRPWGRSSFQKILSNERYRGIYIYGDVRKEDGIPRIISDELFFKVQEVITTKKNPQGRHRVNGDYLLTGKLFCGKCKSPMVGISGTGRSGKLHYYYVCQKHRTEKTCDKKNVRRDEIELQVAQAIKDYALKDDVIEWIADSTVAYNERKEAESKVGILEDQLAGTERGIKNIMSAIEQGIITETTKSRLVELESERATIKAKIAAARADIVTVSRDDIISGLEMFRDGDVYDKKYQARLFDTFLVAVYVYDDDLRLVFSFSGNKNTIQIPIESAVNAVENNAAECSFKLCSAPPKIPITLFG

SEQ ID NO: 26295 - protein, 520 aa, synthetic construct
MARSAKKIEYAPAEQIGVIYARYSSHNQKEESIEQQIAECTEFAEKNGIRIIGIYADKAVSGRSDRRPNFQRMMRDAEKRHFQIVVAYKSNRIARNMLNALQYEAKLDLFGIKTLYAKEEFGNTAAGRFALRTMMNVNQFYSENMGEDIKRGMVDNANECKVNGMLPLGYVKSKEGKYAIAPDEAAVVREIFDSVLKDVPVAEIARSLNQRGIHTKLGREWNKNSFHIMLKNDNYIGVYRHSGVVVEDGIPPILEKEVFAAVQEKLANKKKTAGRRSANGEYLLTGKLFCGYCGSYMIGVSGTGENGTVHNYYQCQKRHAEGRCEKKNVRRDFIEKLIARLTQDYILQDDTIEWIADSTMSFQAMARRESGVAQLERDLADNRKVAKNIMAAIEQGIITETTKARLLEVEGTIHDLERSLSIAKAASQPIERERVVFSLEQMREGNVGSKDHQKKLIDTFVKSVTLWDDRIQIDYYHTPGKHKFSYSLEELTSKAENESNASDVRTDSLELHHFNRWSNT

SEQ ID NO: 26296 - protein, 538 aa, synthetic construct
MSTAPNVTIIPAKVQTAENRSKYHQLRVAAYCRVSTAQEEQQNSYQVQIAYYTDLINRKKEWTLAGIFADEGISGTQTKKRTEFNRMIRMCRNQKIDLVITKSISRFARNTVDCLEYVRQLKDLGIGVIFEKENINTSTMTSEFMIALYGSFAQAESESISKNVSWGKEKAYCEGKVQFQYKYLLGYKKGEDGKPEIVPEEAETVRLIYTLFLDGYSMSRIKKLLENKGILTSQGKKVWNESLIRSILKNEKYVGDALLQKTFTSDCITHKVVKNHGERPMYLVTDHHDPIIDRDTYNRVQQELARRSSKRKVSDKTITEQGKYSSKYALTELLICGKCGTPYRRTTWTSRGKKLIVWRCISRLEHGKRYCPDSPTIKEEQLHKAIIRAINNYYSCGNDVEKILKANIGNVLECQGQEEIIAAENRLKEIDQARNDLISLIATGGCDEDKLDSEFEKLYKEEQSLSERLAMLKSKNQTSAETQAKLDKIIDMIEHEKFELETFDNVLIRKLIECVKVLSKTEILLIFKGGYEVRTEIE

SEQ ID NO: 26297 - protein, 531 aa, synthetic construct
MEQYCLYLRKSRSDIEAENHGEEETLARHEKILLELAKKREYNVTQIYREVVSGETIAARPVMQQLLSEVEHGMWSGVLVVEVERLARGDTIDQGIVAQTFKYSDTQIITPMKTYNPNNEYDEEYFEFGLFMSRREYKTINRRLQRGRLSSVKEGKCVCSIAPYGYDKVKLKGDKGFTLAPNPNEADVIKMIFELYTKGELQPDGTYKRIGVALIARKLNEMKIPARKSEYWVPASIKDMLRNPVYAGKIRWNWRSQNKRMQSGSISISRPRSEEDNCIIVNGLHPALITEETFGLAQEYLAKNPPRPTKRNAPTKNPLAGIVVCAFCGRKLVRRPYTSASCPPTLICSVPHCPNVSSFLHLVEERILKSLEEWLRNYKLQWNLSNNKPSELISESEILRQSLNDINSQIAKLNKQMIKAHELLEQDIYTTDVFLERSRTITERLNQLSYDKAEIEKRLGVETIREKSMKEIIPKVEKLLDVYHELPSAKEKNDMLKDVLEKVVYRKTQNTRWSGSPDDFEITIYPKLPKS

SEQ ID NO: 26298 - protein, 447 aa, synthetic construct
MRKITKLETKKIDLPKLKRVAAYARVSVERGRTLHSYSAQVSYYNELIQKNPEWEFAGVYSDLGISGTGIEKRNDFKRLLQDCEEGKIDIILTKSISRFARNTVDLLNVVRHLKELGIEVRFEKEGISSLTGDGELMLSILASFAQEETISISNNVKWGIRKRFEKGIPNGGFIIYGYRWKNKKLEVVPEEAEVVRYIYDNYLQNKAYQKVASELNELGYKAYKGGKFSPSSVREILSNITYTGNLLLQKYYIVDPIIKKEKKNTGELNQYYVENSHEAIISMEQFEAVQKEFERRNKLGQRANQSLHITCFTSKVKCPLCGKSYRRSGKKNRMGKDYTYYVWVCRTKSEKGAKYCGAKVIPEEELKIAACNALGWNEFDSDLFDETIEKVVPIGEDMIEFYPYDGGVIKQEWHSTARQRGWNEERKRTTTEKRLKTLEARKNAKEC

SEQ ID NO: 26299 - protein, 525 aa, synthetic construct
MPKNVRKIPASVNLYNAVPITNKKKRKVAAYARVSTDQEEQLTSYEAQVDYYTNYIKSRDDWEFVDVYTDEGISGTSTKHREGFNKMVKSALDGNIDLIITKSVSRFARNTVDSLTTIRKLKDIGCECYFEKENIWTFDGKGELLLTIMSSLAQEESRSISENVKWGHRKRFADGKVSVPFNNFLGYKKGEDGNLVIDEEQAMIVKRIYREFLSGSSSVAIAKGLTNDGIETPGHKQKWYATTVRSILTNEKYKGDALLQKHYTVDFLTKKQKINNGEVQQYYVENNHPAIIEPDVFEMVRLEIDRRLMLKGKYSGTDILTAKIRCGECGGSYGAKVWHSNDKYRRVMYQCNSKYSGKEKCKTPAIRSEDIESRFVNVVNILIESKDEIISNLEKVLDKICNKKELLEEKEKLENSLTEQVEKIQDLIDINSRVAQNQEKYKKEYDALIKNYDETKCKFEQLEIKLSQQAAKHQMIKDYINTLKKQEKLLTKFDGLVWGSLLESATIKDKDVIVFRFKDGTEING

SEQ ID NO: 26300 - protein, 512 aa, synthetic construct
MQRAVIYARFSSDMQREESIDAQVRACKAYAKNKGYIVVDTYADEAKSGRDVTKRDAYNQMLADAMEDKFDVIIFHKIDRNSRNELNYFTFKDKLERLGISYEYAAQPIDTISPEGQVMETIMVGMSAYYSRNLAKETKKGLNENAYKALFNGGCPPLGYKIVDKKYVIDESEAAAVRLIFELYLAGKGYAEICRALDSKGFTTKSGKPFGKNSLYDILGNEKYIGTYTFNKIPKGKGKRNMHSQKRPDDYISIEDALPAIISKEDFFIVQAKRERNRCHAAKYTAKHDYLLSGKVFCGECGSAMVGHRVRQRYYYYGCTRKEQTPTSKCQQRMIRAEVLEHWVMQILERVVFTVSGMRRIADAIAKGYQEEESRHAAEQEALAKRKAAAEKKLNNIYKIFEEGEADEFDRQRLNQIKVELREINKSICEASVKSVESLDNKKIVAFLTTIKSEIFVKNNMDYAKRAIDLLVTNVTVTGTVIKVTLSTQNVCAYLVPRTGIEPVRVSLPEGF

SEQ ID NO: 26301 - protein, 586 aa, synthetic construct
MTGFTFQSLKPQDSLSNELRSVIRDNVLQFYAKGLSTEAEEEGLTALYERLSQEDKLDGESNSIANQKKILERYCKDHGITAYRHYDEDDGYSGTNFNRPGFQRMLADIKAGRIKRVIVKDMSRFGRDYLQVGMYTDVVFPEFGVHFIAVNDGVDSTRGESEFTAIRNVFNEMYARDTSKKIRATWQSKGKSGEHLTTIPPYGYMKSPEDKKKWIVDEEAAAVVQKIFSLCASGKGPTQIAKWLKQQQILNPTAYCHAKGLPTSNKPTADPYKWTNETVSRILERVDYLGHTVNFKTTKQSYKSKKKIWNDPENWVIFENTQPPIIEESVFLIVQNIRKARRRPTKMGEMGMFSGLLYCAECGGKMYQCRATNFAENQKYFICSTYRKGKDLCTTHSIKNVVLHEIVLRNLREAISYVSEHEAEFIQDAAESDMRDRDAEFVRKRETLAKADTRIAELDRIISRLYEDNVIGKLSDERFIKMSHDYELEQSNLKSMADVLRKDLKQQEQQKTNVKAFIAAVKKYTDLQELDAAVLRAFIDRIEVSHVDKKSRTREITIVYNFIGAFDFTRAIENARNTSKKEQRTA

SEQ ID NO: 26302 - protein, 502 aa, synthetic construct
MEIQIREGNSRQKQKLKVCAYCRVSTDADEQENSLENQIRHYEEVITSNPDYEYAGVYSDFAISGFKEKRPGLQKMLADARKGKIDLILTKSVSRFARNTSIVLEATRKLKELNVGVFFELQNINTLSGEGELMLTILAAFAQAESESGSVGAKMVYQRKYEAGIPVQYLERSFGFKKDERGVYIADEEEAAWVRKIYEMAADGYTPASIKRYLNENGVKTAGGAEWIDSTVFRLIENEIYKGDYIMHKHFVNEERKLVRNRGEVDAWYIEDDHEAIVSPKLWQKAQDALEAKRDYLAEGSVIEEFTEENYPYMNRIYCARCGHPLYKRIYSNGNRLNWGCSGTKRYGKSFCEGINIPDGVLRGAWHFDENMYIGEKQTDKGKKEFTYLKEASWKRRHKKKEPEPIPENTETEYPYREKIFCGLCGNKLVRHVNTKSHKVIWVCNGRKRKGKDFCDGTRVPDTIIKGWGEIKKDIYIQRKDDKNGKKRYSYTSKKPKGADRA

SEQ ID NO: 26303 - protein, 428 aa, synthetic construct
MPKKVAKVAQIPKLQRKKQVAAYARVSSGKDAMLHSLSAQVSYYNDLIQKEDGWEFVGVYADEAITGTKEGRTDFQRMLTDCRNGKIDMIITKSISRFARNTVTLLETVRMLKALEVDVFFEEQNIHTMSADGELMLTILASYAQEESRSASENQKWRIKKNFEEGMPWCGRMLGYRIRAGQYYIIPDEAEIVRRIYREYLDGAGPNGIANRLTEDGVPTRNGGIWQPQTIAKILRNYTYTGNLLLQKTFRENHITKKTIRNTGQKTQYLLENAHEAIIPLKTFNAVQTEIERRSESRKSSPPAKPNFTYTGLIQCAKCGKNYRRKTTATRIVWICATFNTRGKKYCASKQIPEELLDALVAEVFDTPANIQKIIADDGNTLHFHLVDGSVVTRIWSDRSRAESWTPEKRESARKRAKERSQTQCQKQ

SEQ ID NO: 26304 - protein, 528 aa, synthetic construct
MPKAIKVIPATKDRFTALPTVSIAKRRVAAYARVSTDSDEQFTSYEAQIDYYTQYIKKREDWEFVKVYTDEGISGTNTKRREGFNDMVADALAGKIDLIVTKSVSRFARNTVDSLVTVRKLKEHHVEVFFEKENIYTFDSKGELLITIMSSLAQEESRSISENVTWGQRKRFADGKVSMPYKQFLGYDRGEGGVPVINEKEAEIVRMIYRLFLEGKTASGICKHLMSLGIPTPGGKTKWGQGTVMSILQNEKYKGDALLQKKFTVDFLTKKQKVNEGEVPQYYVEGSHPAIISALDFDRVQAEIARRQSLGRSYSGSSLFASKLICGDCGGFYGKKVWHSTDAYRREVWRCNSKFNGKAKCGTPTLSTESIQQMFLQAYNQLMGNREQVIQACEVMREVVADCSKLDSEIATMNEEIQVIAGLVSQCIKENTTTQQPQEEYTEKYNRLVKTYEKAVSQLNKATADRESRMQRDRELRIFIGSIKEKPLVLEIWDEGLWITLLETATVHADNRITFRFKDGTDIEVGAE

SEQ ID NO: 26305 - protein, 463 aa, synthetic construct
MSEKIKRCAIYIRVSTSEQMMHGKSLEAQREYLERYAKEHNMIVVGIYADEGKTARKELKKRKAIHALLEDVKAGKIDMILFWRLDRWFRNLSDFYKVQDILDEYDVHWLSASEPGINMETRDGRLQLNVVLSIGQNEVDTTSERIKFVNEASIRQGKLIFGEANMGFGYKSGIVDGVKRMIKDPETEEATEAFFKYLLSHQNKSETVRYMQKHYYPDFSYSMLRTMVSSEFYKGTYRGIPYCPAYITEQEWLQLQELSRKNIKQTPSGRIYLFSGLIRCPVCGQKLAGTGCSSIINRKTKEKRTYCYYRCNRAIFDRLCTSRHRVSQNLIEKYLLENLSEEYKKYQIRYTKICEQKKKIKDTRTPEKLNKELDRLNLLFQKDRITWEYYSTEYDRIEKELKELSAIHPEPEKDFTYLEELLRSDFKKIYEQLTPENRRTFWRSTIEEIHLNEDYTVESVDFL

SEQ ID NO: 26306 - protein, 523 aa, synthetic construct
MKKVQVIPATLRSYTKKPMNSQKKRRVAGYARVSTDHDEQLTSYEAQVDYYTRYIQSRNDWEFVGIYTDEGISATNTKHREGFKRMIADAIAGKIDLIITKSVSRFARNTVDSLTTVRKLKDKGIEIYFEKENIWTLDAKGELLITIMSSLAQEESRSISENVTWGHRKRFADGKVSLAFTHFLGYDKGMDGNLVVNKKQAEIVKLIYRLYLNGYTFHSIAKELTERKIPTPAGCKIWRANTIRSILMNEKYKGDALLQKKITVDFLTKETKKNEGEVPQYYVEHNHEAIISPQVFDWVQEEIKRRRKRKKRYSGVSIFSSKIKCGQCGGWYGAKVWHSTDKYRRTIYRCNDKFKNHCQTPHLTENEIKGAFIRAVNQLIENKEDILSNITMLKKRLTDTASLEKERDALELDLNMLTDQVQQLIAENAQVAQDQDEYGRKYNGLVSRYEETKKKYDQVCDAIQQCVDRYWKLDNFMKNLQKQNLVYEFDERLWCSLVDFIIVYSKVKIQIVFKNGTKIHVGM

SEQ ID NO: 26307 - protein, 684 aa, synthetic construct
MSILQTIKTIIRVVLYLRLSDEDKNKLSKEELSQSIKNQEIMLRDYAEEQGWEVVGVYNDDDWSGSDATRPDFNRMIEECKNGNVDIVLCKTQARFARDMELVEKYVHNLFHEWNVRFITVVDRIDNARKETKKTSQILGLTDQWYLEDTSLNIRETLKSKRKDGQLTSSFATYGYMKDPENKNHLIIDPISAEVIKRIYDEYLSGTGLDKIARKLNEDKILSPYEYKLLNGSKLKIPVIKDYVNYGYIEKTGTYMLDVSFTNKEEYILKDLVSFNYITTDMKSFNNKCDIVLKKYTNNRTKIYYSENDNIDINNFNIDDCILLNENDVIPKTAKVIISYTKELDRTHTINYQFEITLKENREHEDYYINICGKATDEIKKSDFIHNIRKKFKWSSSTIRTLLTDEVYIGNMVQFKSTTVSYKNHTVVWNDDETRIRKDNTHEPIIAKDIWYTVQERLENTARSCKGGTVHPLCNKVYCSNCNQIFTKTGNRRSDGTGYLCCKDKKTNWSNCDNKASIREDGLHQFILEKMNEMLKKFYEEDDLKEMQNEVIEQDLYKDKLNSLEKELQSINKELQGKSTYFQKLYEDRTNGILPEKEFLILMNKYKDDNEKLEERQKIVKKEISSTLAKKETVKTKKNIFKKYRHIEELSIEIVEDFIDKILIGSYDETTNSRDIKIIWNFTI

SEQ ID NO: 26308 - protein, 684 aa, synthetic construct
MSILQTIKTIIRVVLYLRLSDEDKNKLSKEELSQSIKNQEIMLRDYAEEQGWEVVGVYNDDDWSGSDATRPDFNRMIEECKNGNVDIVLCKTQARFARDMELVEKYVHNLFHEWNVRFITVVDRIDNARKETKKTSQILGLTDQWYLEDTSLNIRETLKSKRKDGQLTSSFATYGYMKDPENKNHLIIDPISAEVIKRIYDEYLSGTGLDKIARRLNEDKILSPYEYKLLNGCKLKIPVIKDYVNYGYIEKTGTYMLDVSFTNKEEYILKDLVSFNYITTDMKSFNNKCDIVLKKYTNNRTKIYYSENDNIDINNFNIDDCILLNENDIIPKTAKVIISYTKELDRTHTINYQFEITLKENREHEDYYISICGKAKDEIKKSDFIHNIRKKFKWSSSTIRTLLTDEVYIGNMVQFKSTTVSYKNHTVVWNDDETRIRKDNTHEPIIAKDIWYTVQERLENTARSCKCGTVHPLCNKVYCSNCNQIFTKTGNRRSDGTGYLCCKDKKTNWSNCDNKASIREDQLHQFILEKMNEMLKKFYEEDDLKEMQNEVIEQDLYKDKLNSLEKELQSINKELQGKSTYFQKLYEDRTNGILPEKEFLILMNKYKDDNEKLEERQKIVKKEISSTLAKKETVKTKKNIFKKYRHIEELSIEIVEDFIDKILIGSYDETTNSRDIKIIWNFTI

SEQ ID NO: 26309 - protein, 558 aa, synthetic construct
MTNAVIYARYSPGPNQTDQSIEGQIHECTRFCEDNDLRIVGTYIDRKQTGRNDNRADFQKMLRDSSRHGFSTVVVWKIDRFGRNREEIAKNKAVLRMNGVRVLSAKEHIPDGPEGIILESVLEGLAEYYSANLSQNIKRGMRESALKCQFNGSGLSTGYTVDADHKYRIDPDGAAVVRTIFEMYDGGKKIADILRYLQQSNIKTMRGKEYTHYGISRILRNRVYIGEYHWHDIVVPGGVPQIIDNDLFDRVQKRLEVNKHAPAARRGDVDFLLTSKLICGNCKSTMIGDCGTGKNGARWYYYTCRAKKTKSSKCRKKSVPKEALEREVTALTAAYVLRDDVIDYIANKVVEIQKSEHDDKSMLRYFESQLKDTNKAIANIMRAIEAGIITETTRSRLEELEDTKRDLETEIIKEKVARPTIEREQVIFFLEKFRGGNVDDKEYQRKIIDTFVHKVILYDDKITITYNYSTDSTKNAENTVESIESAASAAECKCSNKPSSSPPVTRILLLRCSCYFFRRGSNRTVLQSRIPSVRWTVGKSACVSAHGSAPSDPLRLHQ

SEQ ID NO: 26310 - protein, 580 aa, synthetic construct
MPEKIINCAIYTRKSTEEGLEQDFNSLDNQYEFCTNYLKSLNDPALQLLPARYDDGGYSGGSLNRPALQRLLADIQCGLVNRVIIYKIDRLTREIRDFFKLLDVFEKYNVEFVSVKENQYYNTTTAIGRLMVNMFLVFAQFERENAGDRIRDKIATSKAKGMWMGGCPPYGYDIGDRCLVINETEAQNVRFIYQTFCNTHSLADTTDALNSGGIRTKRYTTRQGRTFGGRKYSVKTVQRILQNPLYKGMVAHRGKQYPGQHAAIIDAVQFDMVQAVFAAHKEKRETRRPKMPSSGGERETAALTGLIYCGCCGSAMTPSYCCKGEIRYHYYRCYRRASKLEDKCPINQIRTSEIDRVVMEQVLAILKSRDFFVQYISHHHEFDVSTAFALFNSLDDVWNSLFETEKRRILRELLAKVTIYKDKIVLDVKKAGLAGVFAELSQNNRLAEVEYKENETFQISVAYRATRLANGAKIIVPATAKEESRFNGSLRLARQIAKGFAWRKMMESGLSLQELTASAKTNERDIRFAMRLSMIDPAIVESVLSGKSPEFLTYAFMKKHPIPLLWSDQRKLYGFEERKQ

SEQ ID NO: 26311 - protein, 490 aa, synthetic construct
MKAALYTRVSTDEQAEHGFSLEAQKKRLIEYCNKNNIEIFKLYSDEGISGHSIIKRKALQEMLQDAKEHKFNYVIAYKTDRISRNLLDLLTIKNQLDEADVELLLSDEAIDTKDDAGMTMFSIMGAFAELERKKITERMMAGKRQKLMNEHIKLKNGRVPYGYLYDDENKKYIIDESRRSIVELIYKLASQGWSYNKITRHIAEETAANSSDSKKKWYISDIRAILTNPMYKGYSGISYYYNFNDRAKKPKNSAILYKATNVEPYFTEEYWDTLYSQLEKKTQYFKRKHPIDSYIFSDVLFCATCGLKIGTRQHHANYLYYVCNSKHKMYDNDHICDYAININKFNNWFIEFIRGIDENNIKLSVSKPKDLDRELQAVRSQISIKEKNREVLLDKLMNGVIDDTEYRLASNMVIASLNSLKSQEKELSDKMDSLKEKEQTKRYNRLKIKALKVLVNDWDNLTDQAKKTLINSSINKIMITKDGIQEIEFN

SEQ ID NO: 26312 - protein, 464 aa, synthetic construct
MARSVTVIPARSQKVRTGHKAVKEKKIRVAAYCRVSTDQEDQLHSFEAQVEYYTKYIHEHENYEMAGIYADEGISGTNTKKREQFKKMIADCEDGKIDLVITKSISRFARNTQDCLAYSRKLKNLGIGIIFEKENINTLDSTGELLFTILSSLAQDESRNISENCKWGIRTKFKNGEMHLNTFKFLGYDKDENGKLVINKEQAKTVRRIYRDFLIGINPAQIAKELTEEKVPGCLGQTKWYPSTVTGILKQEKHMGDALLQKTYTADFLTKRQVRNNGEIAQVYVKDSHKGIIDKQTWNAVQEEFNRREKFMESHGTDRYSYGADCMPFCEKVFCGECKSLFTRHSWSSRGIVQWQCKNHRKDGKVACTNAYVDNADLEKGFVKAFNRLVTDRDKHMERWQQMKSDGTPLEKIRAGQMMEAVGNEPLTRFVPEIAQLVLCEVTVLGAKKYEFFFLEGSRVKVSV

SEQ ID NO: 26313 - protein, 514 aa, synthetic construct
MRRKKVEGGNRLVAYYRYSGGSGQTEQSIEGQRRDCENYARLHGLTIVHEYIDRHISGKTDDRAAFQQMMNDGDKGAFDMVICWKTDRFARNRYDSAVYKKRLRDNGIEILYAAESNVEGAEGIIIEGLMEALAEYYSAELAEKMRRGMRESALKGQAINRCRSLGLTTDENKKYVIDEKTAPTVRFIFEHYAAGESSTSIVDQLNAKGLRTSQGNLFNKCSIPRIIQNEMYRGVYTSKAYNVRIEGAIPAIIDDDLWKRAQAMMKTNRQLKAKYEPKAEYLLSGKLFCAKCGCTMKGVSGHSGGNGEVYRYYACSNPQCRKRNIPKDDLEGKVIRSICDHLLQPETMELLAETMVEVQKADMEKPNAERDVLEQELRDVRRRSKNIMDAIETGSANHQLVARLDDLTQQENTLTYQLSTMEAEKPLLFTKEQYLFLLQQFYAQPTEQDDAYKRRLINTFVTNIEVSDSELLIYFNISEETENKNKNAPQLNFDKSSSTEKRLVRVARIELTAS

SEQ ID NO: 26314 - protein, 573 aa, synthetic construct
MKITKFPIDLSMLTEEEIDQFRQDPSTLFEGDTDVSLYLRFSSERQREQSIEGQLRDCRTFCKLNSYRITAIYVDRATTARKDVEKRVHFQEMIRDSEKKPWEYVVVWKLDRFARNRTDSALFKFRLRKNGVKVISATENISEKPEGIILEAVLEGMAEFYSADLSQKITRGMRESALKCHSIGGHIPLGYKIEDHKLVINPATAHIVQEAFELYANGETVADICRMFNAKGYRTAKGVEFNRNSFKSMFRNKRYIGVYTYKDIEMEGGVPAIIDKELFETVSRRLSKNAEAPARGKAKVDYLLAGKLFCGHCGGSMNGESGTSRTGAVHNYYTCYTRKRKHACEKKPLKKEWIEYIVAQDAMELLTDDTIQELADMAISQTEKDLRENTRIPELTERMKETESGITNITNAIEKGIASDALMNRLVELEKEKKNLLRLLAEEEKYVCKIERSQIVYWLTEFKGGRIEDERYRRIIIDLMVNSVTVWDEPDGFRITTAYNLTSCKSKTFRIDPSGEKGFGFEGSKSTKRNGHDFSSCPFLLAVELFRTSPILAKERSRVSYPGPLLFEADFTR

SEQ ID NO: 26315 - protein, 522 aa, synthetic construct
MGNVMVIPAKRQVGNTVKQSEQKKLRVAAYCRVSTDSEEQETSYEAQVTHYTEYIQKNPDWELAGIFADDGISGTNTKKRDEFNRMIEECMAGNIDMIITKSISRFARNTLDCLQYIRQLKDKNIPVYFEKESINTLDAKGEVLLTIMASLAQQESQSMSENIKLGLQYRYQQGKVQVNHNRFLGYTKDENGNLVIDPEQAEIVKRIYREYLEGSSMDKIAAGLMADGILTGAGKEKWHTSTINKILRNEKYMGDALLQKTYTTDFLTKKRIKNNGTVPQYYVEGDHEAIIPKELFMQVQAELVRRRVVHVSPTGKKRSFSCNHCFAQMVFCGDCGELYRRVHWNNHGCKSIVWRCISRLEPTSAEKNCTNRTVNELLLQEITVKAFNQLLTERDVFLKTLQQNIAKAVVNADTLSPDGIQTRLEELQKELIKKANNKQDYDAIADEIFRLRDQREQSELDSHHREEAMNRIKELQNFIAGQETDITEFDEALVKKLIEKITVFAEHFTVEFKSGITINIDT

SEQ ID NO: 26316 - protein, 628 aa, synthetic construct
MKAAFLIRCSTKNQDLNRQTRDLTRLAKSMGYEYDLENLVYGEKITGKDDVTKKNRDSIDRLLRAAKEQRFDVVLVSEVSRMSRDPASGRIYVRLLINMNIPVYFKDIDLWTINPETGKKVRDAELVIGAAFDAAWKYLKSMKTQIASARRNELDNNRISIGQPYFGYKRYEGTDKSKKNQIVVNEEEAEVVQAVYNEYLKEGATLKSTALAITDKYGEKLNRKFSLGTIEHILTYESYATGIKKVNLKDPDTDEVEVFDVSTPIIIDKELYEAATNKRKKNRVKDEPYPNQQVYLLSKLIKCPDCGYTLTPRRKAGEFGQTYRLVNGKPAVSWLCMSGINNITDCTNRTSIANEKLEPIIWELVKKELIGYANMNDEKREEQIRECEEKIEYQNYSIQNFTKEIDKLKKRLSTAYQFSINAAEMAGDDEDMRTMAMEEFNRTAKGVRQEMKNFEKSIEQAKGELEKLRDLKTFYSQPTLPKDYLEQIEGNFTEKRNLVKQLITKIVPYRITTFKKKERESGVKTCNKMITVKNGAVLLEVYTIGGVYNVFYNANSKFQVKTAYYVHGEYATFQNGIRKFPAYDEGEYFVISNANMVMETDNIDEVVTVNEFVDIAIANNWVIEYQYQ

SEQ ID NO: 26317 - protein, 516 aa, synthetic construct
MPKTEEKQAAKAVIYARYSSDRQREESIEGQLRVCEDYARRNNITILHTYADRAMTGRSDQRPEFQMMIRDAATMAFNVILVYKLNRFARNRYDSAKYKHKLKKYGVKVVSAMENIADDPSGILLESVIEGMAEYYSAELSENVLRGMTQNALEGKWPGGVIPLGYKLDKGGRLIINEEKAPIVRMIYQMFLDGMSVARIERKLNDKKYTTDAGKVFSRSRVYYILHNERYIGTFQWKDIKKEGIIPPIISKEAFHAVQERINAMKSSSYRTNNNYLLAGKAFCASCGAKVSGTSGKSQNGNKYCYYGCSHHHRSARYEYCETKNIRADVLEKLVCDKTHEILSSKKAIKEIARQAVKLRPWDESELEIRAIKNHISSCQKKIDNCIKAIENGVMSNALVESLNENERTLDVLKEKLAKASLMQGSGLLTEEKIQFFFETIREKAKETEKYNDILLTSLVRAVYICNEYVEIQYNYAEQLPILTNPVRIESCSYKCTNGGTIWIRTKDLFDVNEAL

SEQ ID NO: 26318 - protein, 523 aa, synthetic construct
MNICCYGRKSIYSDHSDSIDNQFRMCRDYVEMKFSGQVDSFLEYQDEAFTGANTKRPDLQRLLTDISAGNCDVLIVYQLDRLSRDVRDFANIYAILEEHRVKFISIKENIDTSTPIGRAMMYVTVVFAQMERETIAARVADNMIGLAKKGYWTGGNPPEGYVRTRIEVNGKKHCSIVPDPEGVKYVNWIFDTFLQNDYSLQSMETAFKNQGIRTRRGAFFSTAQLHKILTMPYCVQATPEVYDYYVARGCQMDPESPRESWDGTCGVMIYGRTTQKNKKHQMQPPEKWLVCLGAHEPFMPADKWLAVQARFCRNKFDKTMKYDVPLLKGVLRCSCGSIMCVARKKKKEGVSSWYYCLKRMRQGKEVCDSHQIKCELLDQKVLELLQSIERDPALIHQFAEQNAEVLAGPDPKVLASKISTCQTRIDRLVSSLSLAAESSAQKYILAELERLDLEIQALRREHNLALTAERNRTRQQQDTFSKVSEISRLIGDMDSFSASEKNAIVKDVIKKCVWDGESLSIML

SEQ ID NO: 26319 - protein, 461 aa, synthetic construct
MVQMKKAKSETTLVRAALYIRVSGEEQKIKGLSLEAQEERLRDFCKERGWLICGVFIDAAKTARKNIRKRIEFQHMIEGVKKDQYDILVFCRLDRWFRSVADYYKIMDILNAHNCGWVTSDEDYDTTTANGRLYINVKLSIAQNESDICSERISVVFDSKIQHGTVLSGFSPFWLDVKDKKLVVNEERAAIVRDAIDYFEKDMTQNGTSRYIRNKYGINWDINMLKRVFKNKLLIGVYDSNGRYNDHFCDPIISVDQFNRVQSIFDKRIKVVPTKRVYIFTSILKCPVCGCRLSGQAAGTNTRYYYRCNRHFIRKDCSYRKITNERLIEKWLLENLKSKLSECEVAWSVKEAKKKLEPSAKQKASLKRKLSKLKDLYLNELIDLEDYKRDYIMYSSALSELSTSQKEETPPDFAAVHRILDNDFLSTYNTMDRTEKRTFWQSIIKEMVLDDNGHVTSLSFV

SEQ ID NO: 26320 - protein, 517 aa, synthetic construct
MNIVIYARFSSHSQTEQSIEGQLKVCYEYAKRNNMTVIQEYIDRATTGTNDNRQQFQQMLDDSNKKQFEAVLVYQLDRFSRNRYDSAINKKKLKQNGVRVISAQENITDDPAGVLMESVLEGMAEYYSVELSYKIKRGMNVSIDKRQTLGGRCPLGFKVDKNTKKYVIDDDTAPIVKQIFEMYAKDISIAEIVKYLNANNYKTSIGGNFNKNSLNKLLQNKKYIGSYIYKGNELEKDVFPQIVSLDIFEMVQRRMNKARKAPATTKAYEDYILTTKLFCGHCKNMMVGVSGTSKTGKKHCYYTCNGVKKKICKKKSVQKAYIENLVLTECRKVLTDENIEKIANKVMFLIEQEKDTEKVRILRHKLKKCNVEKQNLLKSLKDGASDTIRRIIFEEIEKLDNNSKIIQKEIDVETMRALPIEYSEIKFFLTNIRNGNIEDLKYQKALIAVLINKIYLYDDKMTIVFNTQNTPVEISSDLISKAKSSFLTENAPPFKTSGTHKISAERRFFSMFESSSP

SEQ ID NO: 26321 - protein, 542 aa, synthetic construct
MLAGVSIPHSLHMGNRPEGSVIMPRKKTTAADAPRLVAYYRYSGGSRQTEQSIEGQRRDCEAYARAHGMTILREYVDRHISGKTDDRPAFQQLVADSAKHTFDAVICWKTDRLARNRYDSAVYKKKLRDNGVEILYAAESNISGAEGIIIEGLMEALAEYYSAELAEKARRGMRESALKGKALGSSRPLGLTVDADKHYIIEPTGAEAVRYIFEQYAAGLSSSSIVERLNAMGLRTSHGGPFNKSSINRIIQNEMYRGVYVSKKFDVRIEGAIPAIIDNDLWKRAQNMFERNRQSRTPHASRADYILSGKLYCGECGCLMKGVCGRSSGNGQMYHYYACPGRSIGRACTRKNIPQDELEAMVVNSVADLLLEPELLEQIADAIVELQQAEAARPDPEKQALEKSLSDVRNKIQNILSAIENGTSSAALSARLADLEQQESTLSYQLSSLAAKKPLTFTRDQILFLLQQFRVSPSERTKAYCRRLVDTFVDHIELTNTELILYFNISDETIDKNKKAPRSNPSKESSTEKRLVRVARIELTAS

SEQ ID NO: 26322 - protein, 571 aa, synthetic construct
MMHDRTTPASTNRVAIYIRVSTTHQIDKDSLPMQRQDLIAYAKLMLNTDDYVIFEDAGYSGKNTDRPKFQEMMSQIRQGAFSHLLVWKIDRISRNLLDFATMYKELKDLGVVFVSKNEQFDTSTAMGEAMLKIILVFAELERNMTSERVTATMISRASNGQWNGGRVPYGYNYDYETKDFSINPIEAEIVRLIHDKYEEMRSLVRESRYLNEKGLRTRAGNLWNPVSLHIILHNIFYCGDYRYNVLKEGDRKKVKDESEWITVEDHHEPIISREQKERVIAMLDANKRLDRKRNTYKSEKYVHVFAGLLYCGNCGKPMGATPAAAKKDWQYSKYTCPTRRKLASACNGKFTSDPIVGEFVFNYVLNMLNVQKNFADIHSPEELQAALLIGNTFSYIDHIDEDGLNDLFNMLSSGKIKGTVFGKSAKLKKKKVVSELSKLRNEKQKIERALDRLTKLYLYAEDAMPESEFIIQKSKLTEALDEVNEQIGFSNTDEWNQSVSDEEFVRRASEFIIAQKLTDRNYVSYKRLATSVDTAVIKTFVQGIIDSIIMDAGQVKQIIFKNGLSHTFIFK

SEQ ID NO: 26323 - protein, 575 aa, synthetic construct
MKKKFSSIPDPDIQDAVIYARYSSHSQRDCSIEQQVADCELFAQQNGLRVVKIYADRHLSGTTDNRPQFQQMLKDAAHGHWPFVICWKIDRFARNRYDSATYKYKLKKAGVRVLYAKESIPDGPEGILLESVLEGSAEYYSASLAQNIRRGMRFNAENCKVNSGSIPFGYCKGPDGRFAIHETNAEIVRDIFRKAAAGVPFVDIATELNNKGLKTSRGGRWNKNSFVLLKNESYIGVYHFSDIRIEGGMPAIIDPGTFLAANERMNANRRVRGRHHDGGDYLLTGKLKCAHCGSYMVGFSGTAKNGESHYYYGCQKRRRERACKKANVPREWIEKVVVKAALDYVLRPDVMEWITDSVMEYQEREAASSQLAALTAELEENQKATDNLMKAIEAGIITATTKQRLLDLETKAKDLKRAIELEKLSHVRLEREQILYWLEQFQGGSLQSQEFRRKVIDTFVSVVYLSDDHLRIAFNYSGQNRSEADFNLIMDAETASADYPINSFSLPLCPPHKKNPNLFPSGKGSDFFVCRISYRVIFISSLSSAAFLSMPPAYPVRLPFVPTTRWQGMMIEITL

SEQ ID NO: 26324 - protein, 453 aa, synthetic construct
MECVAYMRVSTEKQAVEGNGLDSQKRDIENYCRKNELVITDWYIDDGYTGTNMDRPELQRLVNDCSRKRVSCVVAFKLDRLSRNMIDGIYLIEKVFQKYNVVFKCVHDSVNYDSPMEQAYTQMMAVFAQLDKNTMMLRMRGGMLERIKQGYWMGGGNLPYCYSYSKEQGILIPIPERAEQARKGLELFISGYSDAKIKEICGFKSELVTRSILTGVVNIGMIPYKGKIYQGKHEPIFDKDRFNLGLELRKSRCSAKTYCITEPNLLTGLCYCGICGCKMRYQKWGSEKHKIYCCSRNKSLSYLPNYNASCNNSLEWADEIEKQVEEEILKISLDLSSYKPKEKATKLEIMQSQLEKEQIKLKRLYNLYADGNDTVLEMIKELEAQIKEMKLNIAAESKNAINMQKKEFVYENIKKLADIWDKVDKKQKNLILKTIIDKIVIVNGNIEIQLKNF

SEQ ID NO: 26325 - protein, 505 aa, synthetic construct
MPKTEEKQAVKAVIYARYSSDRQREESIEGQLRVCEDYASRNNMTIIHTYADRAMTGRSDQRPEFQMMIRDAATMTFDVVLVYKLNRFARNRYDSAKYKHKLKKYGIKVVSAMENIADDPSGILLESVIEGMAEYYSAELAENVMRGMTENALEGKWPGGVVPLGYKLDEQHHLVIDGPKAEVVRLIYQLALEGHNQKYIIDELNRRHYTNSAGGPFSYNTLRTILRNEKYIGVFTWGTVRRENACPAILDKATFEAVQEHLNFRTKHHIRSCNEDFLLTGKLFCGCCRSKMIGVSGTSKTGAIYYYYACAAHLKKKCKTRNIRKDAIEDLVCEVTTRILSSKEAVEAIARQAIEMQKNKKDSLELQAIKNQIADINKKLQNCVKAVENGLISETITKHINEYEKELTRLKDDAARVKLLDGDIELTQQHIEFFFWSIAQKIKAADKYKSILLSSIVRSVIVYKDYIEIQYNYKNELPILQNPVKVESSYLNHMVTQEGLEPPTL

SEQ ID NO: 26326 - protein, 566 aa, synthetic construct
MPTSKNTARKYAAGGSSDNSCGVEPLRAVIYARYSSSGQREESIEGQLRDCYEFAKKHGIIVIGEYIDKAMTGRVDRRPDFQRMMKDSEKGRFNCVLLWKMDRFARNRYDSAMYKYKLKKNGIRIFYAKETIPDGPEGIILESVMEGYAEYYSENLAQNVKRGNYDSALELKTLGKTCLGLKTGPDGRYMIDQAEAAIVRRIFEEYAEGERAKDIYERLNSEGYRTSRGGKFNKNSLRRILSNKKYIGVYEYEDIYVENGIPAIITDRDLFERVQKMLKINHDAPARGKAQNFLLTTKLFCGLCGSPMIGDGGTSHTGKAYAYYSCTKRKRGRSCKKESVPKDWIEDLVVGELVKIVHNDELIEQIADRVMEYQKREKDQSGLHALEIRQKENEKAISNMLAAIEAGIITPSTKTRLMELEADRADIEKGIAHELLAEPEFERDQIIYFLERFRSGDINDEAYRIMLVDTFLNSVYLYDDDHLVLVMNYSGENCKVDLKLVEGAVSGDGCKGSAFAPSSALKTPCENHRGFFCAGRDLESGFKVSAPLRSVHCHRPPDDVHPVIRT

SEQ ID NO: 26327 - protein, 656 aa, synthetic construct
MSLRSKYTEHQICKLEKKEFMKEASFDDIFIDYGHDLNTLILCRESTAHEDQQKALNDQVERMKAIVDKHRQLHLVDEGIIIEDAKSGLAMDVRPKFQATIKRAVAEDIDVILVQEASRFSRNTGDFFYNMNILQNSGVGILIMEGEFWTYFMAPADYPRLANEVAKGQAESLTTARRVNRGIETYRSRGQLVSGNMFGYDLVKAVERKDNTYKINPVDGATVQLIFYMYVNKGIGTELIATHLNANNYPTAKRKGEWSASKVRRVIINEKYANLIMYGKYKVVDTSTKKKIATHIKPVRTTTYDKDGNIIQERNVQYGTWEPLVDEETWWKAQEIMDSRSNSYNLKDDTGKSKRCANGLRTSNDAYANKAYCCCGHTLSPQYTHAATDTKYAQFRYNCRWQINSHTDEYRKKHGLPPSDCTCKLPAVTDVAMRLMSIKVFEYLFTDIRDTIDDTVRIIEMANKQAVDPLNNSGVSVEDLEATYAKLNNRLSRFADMYADGDLTREQYRDKKSSVEEELKHTKELIDSKKLAISEQKKKSLDIETIKARLNTYVDLKGYGVSNEMIEFFVERIIRRPNNEYVWELNLTGQPSKPNKYKIKKYNKEYSDSLQDDSNFNIIKTFVISLDECKKFCETLAHRQFRASYWNQITVKIAVK

SEQ ID NO: 26328 - protein, 548 aa, synthetic construct
MANKTVKKIEATKPTLSAQYSTFTRKRKVAAYARVSTAKEEQENSFEAQVSYYTQKIQANPEWVFVEVYSDEGITGTNTKKRDGFNRMIEDALAGKIDLILTKSVSRFARNTVDSLVTIRQLKEKGVEVFFEKENIYTLDAKGELLLTIMSSLAQEEARSISENTSWGRRKSFADGKVSLGYSNFLGYDKGPDGELVINEEQAKIVRRIYSEFLAGKTPGGIAKGLTADGIETPGHKKVWQASTALNILKNEKYYGAAILQKEITVSYLTKEKRPNTGELPMYYIEKDHEPIVSPETFQMVQEEMRRRKEAGSNMQCVSIFSSRVICGDCGGYYGRKIWHSNTKHASWHWHCNAKFQKRKYCETPTLKEESLEETFVEVFNGLIANRKEIEENYRLCIDAVTDDSEYRRQLGDLNNGCGEVQTLIRSLLMTYSRQDTADDIHEKLKEYEERLDTMARLKQELDLKIAACAAKRVQITGFLNELMKHDAPLAKFDPLVWQAVINYATVNRDCTITFTFRDGTEKTVPIKNGVRPYTKRNKPQEVDGNDG

SEQ ID NO: 26329 - protein, 487 aa, synthetic construct
MTDKNLLVITPHRKGPGKQRIAAYCRVSSRSDEQLNSLTNQINFYRSLFENDDTVVFVGIYAEEGLSGTQAESRPQFMKMIEDCRSGLIDCIRTKSVSRFGRNTVDTLIYTRELRSLGIDVFFEKENIHSTESSGELMLTLMAAFAESESETMSENIKWGKRRRYEQGITGSITLNGMYGFRQNKGIVTIVENEAELVRRIYKDFIDGYSYCEIADRLIADEVPTRMPGASWAKTTVQNIIRNEKYCGDCLFQKAFIANPITHQQVRNNGELPKYLVEDCLPAIVDKETWKLAQAVAARHTPHRQAPNERYPFTGKLFCGVCGKPYYYYHYMTTNKKPLAAYRCMSHKTQSAVEVPGQTYNKATFNYNASAKLIAYRERYCKPPKERPMLCTDVRIPTDLPQKAFCRAWNLIVAKKLRYQATLRSTVDNAEDILVRYRAEEMCLLIDEIGKINEFSYPLMLKTLDRVVVNANGKLTFIFQSGIKITV

SEQ ID NO: 26330 - protein, 434 aa, synthetic construct
MKKTIVNIAPAVAETPRTKRVAAYARVSCGKDTMLHSLAAQIDYYRDYIMMNPEWRFAGVYADESKTGTKDNREQFQLLLTECRSGNIDMVITKSISRFARNTVMLLETVRELKSLGIDVFFEEQNIYTMSAEGEVMLTLLASFAQAESLSCSDNCKWRIRKGFEEGRASTCTMLGYRLVNGEITLIEEEAEIAKRIFDLYLAGYGLQKIANTLNEEGMYSIFGNEWHPTTVRKVLTNEKYCGDLLLQKVYRENHLTKRKCHNTGELPQYFVEDDHPAVVTRQIFMAVQDELKRRAKEKTQPVGSKSSFTGKIRCSCCGKNYRRKTTPYNIVWCCSTYNSKGKKYCPDSKVIPEETLKRVAAEILKTDGFSDEAFETQICTIEAHPGNLLRFIFTDDSTTDYVWKDRSRSESWTDEMKAAAGRKTKERNVNHGK

SEQ ID NO: 26331 - protein, 479 aa, synthetic construct
MNAVIYARYSCDRQTEQSIEGQLRECKAFAASEGIHIIGEYIDRAISGTTANRPEFQRMIADSRYKTFQAVIVYKLDRFARNRYDSAMYKSKLKANGVRVLSAKEHITDSPEGIILEGLLEAMNEYYSAELSQKIKRGMRENAIKGKTTGGNVALGYRIGADKQMEIDPAGAALVRRIFTSYDSGMTFTEICDDLNHAGYTTSRGKQFRIDTISRILANQRYTGTFQCAGEDAHCPPIIEPELFRSVQERLTESRHKHRHTQSPHEYVLTGKAICGTCGRRLTGRAGTSKTDKRYYYYCCPNKCCGWLPAAELEHAVLDAIAQYTTPEACEQIANATYALYQQSTHENADLTAAQRRLQETEKKLENAVNAVLNGITSAALQATMQQLEQQKAALETEVRLLQTDAPELKLEHFQYFAHRLLEVQAEGTEKILQLLVNQVIVYKDRITVLVNLTDKTKTPPLEQVTAALRESSCSIACA

SEQ ID NO: 26332 - protein, 464 aa, synthetic construct
MNSTYFRPQPELFGLRVVKYIRCSHDGQVLHGDTLEAQDALLDEFIKVNRMVLIDTFIDEALTARKKFTRRKEFVRLLDGVRAHSFDMILFTKLDRWFRNIGDYHKIQEILEANGVQWKAITESYDTTTTNGRLHINIRLSVAQDECDRDSDRIKDVFAYKLKNKTYLSGSLPRGLKLDDEKHVIIDPEWKQFALDMFDHFEQTNSKRGTLLYLKEKYGIYLCYDTISRNLRNSLYKGMYRDDPDFCEPLIEPERFDRIQVLGKRNVRQRYSNRTYIFTGLLICSSCNHYLVGQTTHRTLSDGTEKHYPSYRCNQRYQSHSCDRNRSYREDYVEEYLLQHIRPALSEYAAEYEVTGTNPARKNPAAEAAKIRTKMQKLYELYMDDLIDRDTYKRDYSAFQEKLKELDSIVVAPSRDLADLKKLLEQDYEEIYRTFSPQEKNAFWKSFVQSITVHEDGEMDIVFL

SEQ ID NO: 26333 - protein, 523 aa, synthetic construct
MAKVTTIPATITRFTAAPISEKKKRRTAAYARVSTDSEEQLTSYTAQVDYYTNYIKSRDDWEFVSVYTDEGITGTNTKHREGFKRMVADALAGKIDLIVTKSVSRFARNTVDSLTTVRQLKEKGVEIYFEKENIWTLDSKGELLITIMSSLAQEESRSISENCTWGQRKRFADGKVTVPFKRFLGYDRGPDGNLVLNKDEAVIISRIYSMFLQGMTPHGIAARLTADGIKSPGGKDKWNAGAVRSILTNEKYKGDALLQKSYTVDFLTKKKKVNEGEIPQYYVEGNHEAIIQPEVFELVQQELERRKRGRGRHSGVHLFSGKIRCGQCGEWYGSKVWHSNSKYRRIIWQCNHKYDGEKKCSTPHLTEDEVKAKFVSAANKLIGKKAAIISPLRASLDVAFDTSALEAETAELQDEIMVGSDLIEKCIYENAHVALDQEEYQKRYDSLTARFDTAKARLEEIEAAIADKKSRRAAIEAFLDTLTKADLMEKFDPALWCGLVDFVTVYDKKDVRFTFKDGREIKA

SEQ ID NO: 26334 - protein, 545 aa, synthetic construct
MNIAIYPRKSKFSPTSESIANQVAMCREYCDRCFDDPHYLVYDEDEGFSGKSTNRPAYTKMIEDMRAGKFQVLCCYRLDRISRNVRDFAELLDDLQRHNIAFVSVRNNFDTSTPFGRAMVYISSALAQMERETLAERVKDNLYEMARSGRWLGGVTPLGFVAKAQEVHRDDKKRKLLMLSPVEEELAQVRDLFDHFLRLGSVTKLLQYCLEHRIVSRNGNDYSRTTLRLLLTNPVYCTADAEAWAYFSSGDYQLCAQREDFDGVRGIQPFARTRKDDGGTVSRPTSDWIIAPGLHRGILPGAIWVRAQQILQDNRDLGSAYKAPRTENALLSGVIRCAGCGAYMRPKAYGKPLPDGKRRFSYVCLTKIDSCGARCAMPNAPGRDVDALVIKELTSLTSDGGAISTLRSEARLAQGEARRTHAEAVATHEKAIASMQKKVDKLVDALAAGAPEGARQRILCEIDRYEQEIEQHRDALSELNASVLLDADPSALLDAAFSALESFRTSFSSLTHDEQRRAIRALVDRVSWDGKNVSIEVFGEKTLPK

SEQ ID NO: 26335 - protein, 511 aa, synthetic construct
MNVIEITAEKKPAQETIRLAAYCRVSSDSEDQLHSFAAQIRYYKDYERRHPQYKLVDIYADEGITGTCMDKRDDLHRLIRDCKKGLIDRIIVKSVSRFARNTQELLATIRFLKDIGVSIYFEEQGIDTDKLNSEMIVTFPGMAAQQESESISGNMRWSYKKRMESGDFNCCAPAYGFDLVDGDLVINKTEAAVVRRVFSMYLQGYGKQAIANKLNEESVPRRHGTKLWYAFGIDYMLNNERYMGDALLQKKYTTDTLPFKKVKNRGERPKYYVENANPAIVSRETYSAVQELQKSRQKNVGGKKTSYPLTGMLRCPGCGRTYRRQLVRGKAYWMCSGRASGATICSSQRMSESDVYEAFNRMLFKLKEHHHAILGALIRDIEVMQSKTSENHEKIVEIDKEIADLAARNLVIVRLHTSGILNGSDYAAQSSEINNKISALRSERKRKLAEDEGNEQLDKLKELQGILDEYEPTKAFDEDLFHQIIEKAVVMSKSEIAFHLIGGLKLTETIA

SEQ ID NO: 26336 - protein, 545 aa, synthetic construct
MQTAIQATPPKVVHTIPATINLQEEVKNAHKQLRVAAYCRVSTKQEDQLNSYDVQRRAYTDKINGEPGWTMVGIYADKGITGTSVKKRDDFNRLMRHCKQGKVDMIITKSVARFARNTLDCLKHTRMLKEHNVDVYFEEQGIHSIQPGAEFYITIYGSIAQSESENISANVRWGKAQSAKEGNVPFHYKRFLGYRRGSDGKPEIDPEQAVVVKRIYERFLAGDSLATIANDLNTDGIPTPSGVGKWQRGTIESILTNEKYKGDAILNKTYIRDCLSKKVMINNGERPKYYVENNHPAIIDSATFGRVQEEMARRCGKRKVKQVGTKTEQGRYSSKYALTELLICGECGTPYRRCTWAANGKKKVVWRCINRLDYGKKYCHYSPSIEESVLQEAIMKAVMQTAKQNAEVLKTLKLHIGMGLSAGTTEDNSLDLQIRIAEIEAEFQKMLKAIAADNVEAFDEEKAKALMDEKAKMQIQLDRIADTKQKRENAKSRLDEIFTIIEALANHPISYDDQIVRQILESVIVESKEKIKVVFVGGLEVTQTI

SEQ ID NO: 26337 - protein, 500 aa, synthetic construct
MNVVIYARFSSHSQTEQSIEGQLKVCYEYAESNHYTVVGEYIDRAISGTTDNRAEFQRMISDSDKHTFEGVLVYQLDRFARNRYDSAINKAKLKKNGVRVLSAKENIADDASGILVEGVLESMAEYYSVELSQKIHRGMAINAEKCLSNGSNPGLGFKVDAERRFYVDEEEAAIVREIYERYASGETKAEIIRDLKRRRVKTSLGKEFSPNSLSHLLSNKRYIGVYLYKGRETPGGMPRILDDDLFYRVQSMMNKNKNAPARTHGEGEYLLTTKLFCGHCKEMMVGYGGTSKTGRQYHYYMCKNARRKKCGKKIVSKSYIEDRVVNECLKMLTEEKIRFIAKKVAEECAKSPDNLTAKALKKAIREADAAIENLWKAIERGQTVEMLTDRLNKRMAEKAELEAQLAIEENKKITLTEAQILAFLDYVCEMPSDDVNKRRAIINIFVQSIYLYDDHFTLIINASKKPLSIDNIPLDDIETAFEGETGASEGCSSLNAPAPP

SEQ ID NO: 26338 - protein, 579 aa, synthetic construct
MIPFSVSSSALPDGCSGFLRAVIYARFSPGKNQKEISIEGQLRECREFADRNNYEVVGEYIDRRISGRSDNRADFQRLMRDCEKRCFDVVIVWKFDRFFRNRQESAIYKKHLADFGVKLVSAKEFIPDGSGGIIMAGMIETVAEWYSANLSENVTRGMYETASKAQSTGHLPLGYVTGPDKRLKIQPVEAEAVQIAFQMYSDGANLKEIADALNESGHTTQTGRPFCVNSFGAILTNPKYIGVYKWHDDIEIRDGCPRIVSDELFFSVQRRLERTRRTSGRGRATTEYFLSTKIFCGHCGKPMCGESALKRGMRYYYYACSEKKRFHNCKKKNVPKDKIENLVFEKTLAMLTDDNIAYIAREVERIAADENINLAALRQLEGQLAEVNKRLSNIGNAIAQGIITETTKELLVSAEAERAAINKKIAQERLLMKGTVKAENVACWLHSFKTKKRSDLEFKRQLFASLVHSVYVYDDHLKVIFNVEKYGAVEISFDELSSATSSDVVGLAQPAKRPQRTLILCGLLALAAHTPAAPPSCFFIRQAARLFQGAPWRAAPPCKHNRQKIFVSKALHSCKQLLY

SEQ ID NO: 26339 - protein, 430 aa, synthetic construct
MIQKVVFPQKKQFPLKRTAAYARVSSGKDAMLHSLSSQVSYYNQLIQSNPEWLFCGVYADEALTGTKGNRAEFQKLLNRCRQGEIDLILTKSISRFARNTVTLLETVRELKSLGVDVYFEEQRIHSMSSDGELLLSILASYAQEESYSASENRKWQIRKDFSIGKIGSITILGYRRNAEGVLEIEPNEAELVRMIFSDYISGMGQQRIANKINEMGIPTRQGNLWTNPRIREILTNEKYIGNLMLQKYYRNNHIEKKKTRNQGELQKYYVEEAHEPIIDLETFAKAQTILAQRHEQYTHDGATNRYPLSGLIICGLCGKNYQRKQLPQGIIWMCATFLRRGKKYCPGSKQIPESILYALICDVLKLDEFDAAVFRDNIHHIVIPKPFEVQFFFHDGTSDIRHWKYPSRAESWTEEMKQAARERNQKWVEK

SEQ ID NO: 26340 - protein, 525 aa, synthetic construct
MGRKVTVIPPTISLQTHQPTTQKVRRKVAGYARVSTDFEEQLTSYEAQVDYYTKYIQEREDWEFVKVYTDEGISATSTVHRDGFNQMVADALDGKIDLIVTKSVSRFARNTVDSLTTVRKLKEKGVEVFFEKEDIYTLDSKGELLITIMSSLAQEESRSISENVTWGQRKRFADGKVSLPYKHFLGYRKGADGLPEIVPEEAEIVRSIYRWFMEGMTPYKIACILIEKGIPTPSGKEQWHLSTVKSILTNEKYKGSALLQKKFTVDFLTKKTKVNEGEVPQYYVEESHPAIIPPEEFELVQAEMARRKELGKRYHSGNIFTAKIVCGECGGFYGPKIWHSNSRYRRVIWRCNKKYTNDCYCKTPHIDEDTIKRGFLKAYNQLLTDKGSVLSLCEMLLRAFSDCSDLDAKMSVLDDEEKQITKNIRKMVVTNSRTVQKQPEYTLEYQSYEREYEALKAKYQKLQAEKLDRINKTTVIQDFMEQIKKRKEPIKVFSSDVWLTVIETVTICEKGELQFRFKNGTEITV

SEQ ID NO: 26341 - protein, 456 aa, synthetic construct
MKYVACYCRVSTDEQARFGFSIQAQKDALEKYCKENGYKYEFYIDEGISASSMKKRKALNEMLSKSSIFDMVLFTKLDRLSRNVLDANNINKLLIDNNCTMKAIDEDDIDTSTADGTFIFNLKVSLAQREIGKTSERINFVFKNKREKGEITSGTKKYGYDIVDKHFVVNEKEAENIRNLYQKFIDTNGSPLKTYEYFVTCFPFKGYDAMSNYLRETAYIGKYKLYRKSIYLENYIPRIMDDELFYRVQNLLKRKQKMLTKNDKPSLFVGLVFCSVCGNRMYKKQDNRVASQLIRYCCDNFRKFKIGSTERKCYNSNSIREDTIEDYLLKNLKMKLDEYKVTTKIIKEKAVKSNPKKEENIKNKMYKLKDLYLDDLIDKETYKSEYQKLQAQLQEVQKQTTIVNEKKDFSKVEKILNSDYIKIYNNLSLENKRKFWLSIIDKIYVENGEIKEVTFL

SEQ ID NO: 26342 - protein, 526 aa, synthetic construct
MAQRKVTAIPATISRYTATPINSTKKRRVAGYARVSTDHEDQATSYEAQVDYYTSYIKSRDDWEFVAIYTDEGISATNTKKREGFKAMIADALAGKIDLIVTKSVSRFARNTVDSLTTVRKLKDEGIEIYFEKENIWTLDSKGELLITIMSSLAQEESRSISENVTWGQRKRMADGKVSFAYSRFLGLDKDKETGKIVVNPEQAETVRLIFRLFLEGMTPHSIAAELTRRGIKTPAGKDVWNQQTVRRMLSNEKYKGDALLQKEFTIDFLQKKMKKNEGEVPQYYVEGNHEAIISPAVFDMVQAELAKRTKGGSRYSGVSIFSNKIKCADCGGWYGSKVWHSTDRYRRVIYRCNRKYNGEKCETPHVTEEEVKAAFISAYNQLVTEKKEIIANAEIIRKTLCVTDVLQEEKGKLEEEMAVLVEMTQNIVAENARVAQDQDEYQKRYDGLVKRYDEAKARYDEVVAAISAKEAQSERLADFIKVLKAQDGTISEFDGSLWGGMVELITVSRDKAITVTFRDGTEIQA

SEQ ID NO: 26343 - protein, 591 aa, synthetic construct
MAKITRVEQAVPTIKTKKKVAAYARISMESERMNHSLSAQISYYSSLIQKNPDWQYAGVFADDGISGTGITKRDEFKRMIEAADNGEIDIILTKSIQRFARNTVDLLETVRHLKDIGVEVRFEKEHINSMSGDGELMLTILASFAQEESRSLSENCKWGIRKRFEKGIPNGHFRVYGYRWEGDDLIIVPEEAEIVRRIFQNFLDGKSRLETEREFAAEGITTREGCRWVDSNIKVVLTNVTYTGNLLLQKEFISDPISKQRKKNKGQLPQYYVEDTHPAIIDKETFDYVQSEIARRKELGPRANKSLNLTCFSGKLKCPFCGISYAHNKRTDRGFMEYWACGSRKKKGGRCPVGGSINHENLKKACAEVLGLDEFDEDAFSDKVDFINVPERYVLEFHLKDGGIVTKDCPNTGHRDCWTAEYRAKTSEKRRKKPNCKGSSVMTGKIKCVHCGCNFRRASQPSATSESGKAYYWRCAERNECGTVGLREDLLKPFIARTLGIAEFDDGEFDRQIDHIDVLSAAEVVFHFKDGRTVSRTWEQPKRIGRPWTDEQRAKFKESVKGRYTPELRQQMSEHMKQLRKERGKAWRKEK

SEQ ID NO: 26344 - protein, 474 aa, synthetic construct
MLNAVIYARFSSDMQREESIDAQVRACKAYAKSKGYTVIKEYVDEAKSGRSTLTRDAYNQMMADAMENKFDVIIFHKIDRNSRNELNYFIFKDKLEKLGIRYEYAAQPIDAATAEGQMMETVMVGMAAYYSRNLAKKTKKGMNENAYKAIFNGGYAPLGYKIVDKHYVIDEKEAEAVRLIFNLYLDGKGYGEICLALAARGYTTRSGKNFPKNSLHDILRNERYMGTYTFNRVPKTKRRNSHSYARPNDFISIPDAIPAIVSKETFLAAQEKMLLNKKRKGGAYTAKRDYLLSGKFFCGYCGSAMQGYSCCTRGNMYYYYSCARKDRVPADRCKEKMIRAEVIEHWIMSTLEREIFSDAGIQHVADSMSTAFGNANKEVKNATTVLLQRKAAAERKLNNLYQVIEDGDADEFDMQHLKKTKEELRNINNEICETAVKSAPDIDTSKIISLLKNMREEIFAKKIATTQNKRLNCL

SEQ ID NO: 26345 - protein, 513 aa, synthetic construct
MYLVAYARYSSDNQREESITAQLRAIHNWANANGHVIVKEYVDEALSARTDKRPNFLKMIEDSKIEDWNGVVVHKLDRFSRNRYNSAVYKKTLKDNNKKLFSVLEKLDDSPESIIMEAMLEGLSEYYSANLAREVKKGLTENALDCKHNGGIPPLGYSVKDSHYVVDKRESEIIKLIFNMYKTNHSYVEICSELNLRGYKTKRNKNFSKNSIHDILVNEKYIGNYTFGYGNRAKKRGQPNPDMIKIEGGMPAIIDKDTFFIVQEKMKGRKHMGGSYKAKQVYLLSGLIKCGICNEKYVGARKNKYWSVYECSGHKKGMCENKAIKKEEIEKIVVDELKVKINGLFNNVELLEKVNTKYKELHNDTENNLKIEEEKLSNVQTQINNINNAILDGFYSPEMKDKMKLLQSEKEFIERSIYLIRNISEKDEITSADINNILNTDLLKLESDNLNNIKEIIQKYIKEIIITPENINIKVVLDNTNITGDRDVCGSPPPKFEKRTAIILNLAVLFFFI

SEQ ID NO: 26346 - protein, 551 aa, synthetic construct
MDTSKYMPACYCRVSTVHQIDKESIPAQVHMLTNYCVGMLQCKKSDIEFYIDAGYSGKNTKRPQFEKMMDDVESGKRNIVLAFKIDRISRNLLDFAHFLEVLKSHNADFVSLSESFDTSSVMGQGMLKLVCLFGEMERGITRERVMAVSKDIISRGGHLGAPTPLGYNYDKATKKYSINESEAKTIKLMFKMVQDGYSTNYIANHLNDHNITSKRGGLWTSTTVNHILHNPAFKGLYIWNRKTSGRQKVKDKKEWMYQKDVYPVIIPEKDWQAVQDLLKNRKTGRAFMQSTAPHFFSNLIICGECGRLLRYRSDRPRRSGFTPTIYTCPGHTFHWGCPNSAYLSDIVLAPFVLRYISNMYKLSWITDSVQSSQQLNSILLDGMPSNCRLANLSTIYGLFTRANTEPVPGDVAIIKAAANNAKVEREKELAKYYKALDRLKDLYLYGDSDLSKENYVAERKKIELKIASIMGKTQKEEKQVSPKLSIDASKYETILSMLHDTADYMQILEKCGHKLLADFFHDCIKSIVTSNRQVVRITFRNGVSHNFIYEN

SEQ ID NO: 26347 - protein, 545 aa, synthetic construct
MKGIAYLRVSTEQQDLIRQKSLIDEYIVRNNIELIKKFEDKETGTTFNRKGLIELLNCNKNDADIVIISEISRFARNEDILEFLNQIGKVLRNGLDLVFLDNPNTIYKAGQELNITEILLLIVGAYTASQERKLILERLETKREYLIKQNHYAYHVGTNYWGFNVVPNPEYRFNKSVAKRIIQIDKEKAEIIREIFRRYSEGETSYNIWRWFCSLDIEDKRGRTFIMKMLNNPIYIGERYCKGNMYKIEPIISQNIWEKVREKKAENKIYYSNVRNHPLNLFKGLIKCGKCGASMTIMYPPINRKEGKSFYTCLHKIEDKIPQNKTKCKSFNIPRKLVEEIVWHSYHQNIGDKAFSDATKLQTDIIQNKINDNTTNLKHLEKIIKKNEREIERMQKFILEYVEEKELVQVYIKEFHELSEKNTNYNKQKEEYKKENILLQQQINELEKNALFEDDLEITDNELAKQYQTHIKSITVYSKQARKHFIQIIYKNKLHDTFIVKWWHKNNEVYNIGNGIIIIENEIPLYVNNEIKYDWDNIFEICSCK

SEQ ID NO: 26348 - protein, 592 aa, synthetic construct
MQVKVIKKVDGRIDRKTGNVYNERLRVCAYCRVSTDSEEQKNSYDSQLKYYKEKITTNSNWSFAGIYADEAISGTLDYKRDDFMRMITDALEGKFDLIMTKSISRFARNTVDTLKYVRKLKEKNIAIIFEEENINTLEMAGELLLTILSSIAQQESENISTHVKLGLKMKMERGELVGFNNCLGYRYDYKTNTMSINEEEAEIVKYVFRRYCEGAGSTVIARELAELGHKSPKGEDTWAESTVRGIIKNEKYIGNVLMGKTYTIDPISHKRVTNMGEEDKYYIEEHHEPIIPLEVYEKAQYILNSRRVSRETGRKGSNYSRMYPFSSMLYCGFCGEHYVRKNLYPHTNYSHRAWQCMKYVKKGKKFCPDSKILKEEIIENCFVEAYRILTNDNKEIIKNFIDKIDDILEQNNAKSIIEKLELEKQNLEDKQNKLLNLVLDGTIDKEMYASRKDELNKKIKKIDKQQEELSREVEDDAIMNSGRNKIKAFFEKEDLRLEEFDEEIFETLVHKAIIGEVKDNGEKNPYVINFVFKSGFEYDKIKTKTDSLISSEEVLILQFDSFQNFVSFEKQPDGSLQKKLKTKIKVKVTLNN

SEQ ID NO: 26349 - protein, 558 aa, synthetic construct
MDIHETRQKLKLKNIFDINLRVTFYARVSSEKDEQLNSLDNQISYYKNLIKKNKNWQYVDGYIDEGISGISVKKRENFHNMIKDAKAGKFDLILTKEITRFARNTLDSIKYTRDLLSYGVGVFFQNDNINTLDEDSELRLTIMSGIAQDELRKLSSRIKFGHQQAIKNNVVLGNSRIFGYVKDGKRLVIDETEAEMVKELFTLYATDNYSMKQIENIFWEKGYRNLNGNKIVHSTMSNMISNPKYKGYYCGNKVKIVDMFTKKQKFLPPEEWVMFKDETGEIVPAIVDEDLWERANKVLQKRSNDVKNRKGICNHDNLLTGKLFCTHCGKPYYRRDSKDRNGNKNSIWVCSGKVKNGKDSCPSFSIYESEIKPILFQVFKDTSADVDSLIEQYIEMYKSLDEDNCISKSIKSIRNKVDLANRKKSKLLEYNISGKLSDNDFINMNNQISKDITKFEEEIAALEEQKNSKDKLKEHIEKMKKLLKQAEAEAQEKIIDKEFIKKYIDKIYVSPENGHLKLSIKIFTGEVTEKYLEDFKSRTGHTFKTNCRTFAKNFQVSN

SEQ ID NO: 26350 - protein, 537 aa, synthetic construct
MQEKLRVAAYARVSTDKDDQTNSLENQKTYFKNYILDHEDWQLAEVYYDEGISGTQTKKRQSFRHMIEDAENKEIDLIVTKEVSRFARNTVDTLSYTRKLKDFGVGVIFTLDNIDTRDSDGEFRLTIMASIAQEESRKISERVKWGQKRQMEKGIVFGRDLLGYTVHHGVLAINQEEAPIIKAIFHMYTNEGKGTHVIARELSENGMRPKRVHQWSNTVILKILRNEKYVGDLCQKKTFTPNYLTHAKKYNHGEEDTVYLKDHHEAIIDRDLWERTQNELERRSPSADQKSKHSNRYWCSGKLFCAECGNRFVSRTKRLKNGEQYKAWRCHATAAHGTLKEDADGNSIGCNNNSINDKALQACMSYCISLIQSEKDSLREEILSEIAFVQKNTVKKTDTKRIKKKIEQLESKKRKAIDLILDELISKEDLKAQTDWYNAEIEKLNIQLSESLHEAKEESRQKNKLEKYIAALDDIMSADSNNELLYKEVLDHIDIHKDNILTIWLKCIPFGIQLKIKTSGRQSCFKTDILETTFIQI

SEQ ID NO: 26351 - protein, 529 aa, synthetic construct
MSNMKIIEIPAYLRDGAGQKGTARKLRVAAYCRVSTEEEEQQGSFEIQKLYYTEKINSTPEWEVAGIYADDGISGVHTKKRDGFNQMIQDCKKHRIDLILTKSISRFARNTLDSIQYVRMLKQMGIAVVFEKENINTATMNSEMILTVLSAFAQAESESISQNVARGKRMGYKHGKFAFPYGRIIGYRKGADGKPEIIPEQAEIIRLIFNSYLQGDSLQSIKTKLETAGALTARGNTAWSAQSIQRILQNEKYCGDVLLQKTFTEDVLTGVHKKNTGQLPQYYIENYHEGIVSKQMFREVQTEIARRNSKSAANQRKRRRGRYNSKYALSERLFCGDCGSPYKRVTWNIHGRKQIVWRCVNRIEYGTKFCGNSPSIPEEELHRAILKAVQDLAANFTDEVATQINGILHNIQTGESTKPNLQERLEQTQQEFDRLLEMSLDFDEDTPFLDDRLKKLNNKIKSLKKAIEDSATRQEKASRPEMLLSAKDLQIQEYDDALTARIIEKITVRSRNEIEIRLIGGYEKAMLLL

SEQ ID NO: 26352 - protein, 550 aa, synthetic construct
MADGQQWLSAVFFSLYAKKRKVKGNLRKHLLLLAFRVIYRLPKRKEVRLVEIQIREGSREQKRKLKVCAYCRVSTDADEQENSLENQIRHYETVIKANPDYEYAGVYSDFAISGFKEKRPGLQEMLADAEKGKIDLILTKSVSRFARNTSIVLEATRKLKELNVGVFFELQNINTLSGEGELMLTILAAFAQAESESGSAGAKMVYQRKYEAGIPVQYLERSFGYTKDERGVFVADEAESVWVRKIYEMAADGYTPASIKRYLNENGVKTVGGVQWVDSTVFRLLENEIYKGDYIMHKHFVNEERKLVRNRGEVDAWYIEDDHEAIVSPELWQKAQDALAVKRDYLAEGSVIEEFTEENYPYMNKIYCAKCGYPLYKRIYSKGNRLNWGCSGTKRYGKSFCDGINIPDGVLRSAWHFEENTYIDEKASDKGVKEFTYLKERSWKRRHKKKQPSAIPENTETEYPYREKIFCALCGSRLVRYVNPQNHKVTWVCNRRKRKGKEACDGTRVPDTVIKGWGEIKNDIYIQRKDDKNGKKRYSYTSKKPSGIRV

SEQ ID NO: 26353 - protein, 505 aa, synthetic construct
MEITVEKARANIQKPGTQALGTLKTVRVAVYARVSTDMEIQLHSLEEQMRSFRTKIAQHPGWTLVDVYADKGISGTSVKKRTEFLRMMKDCEDGKVDYVMTKSISRFARNTVECLSYVRHLQSMGVQLYFEKEGLDTATAVSELILTVMAAFAQEESRSISENLKWGIRKRFEAGEARWCATYGYRKGPDGEIVIEPDEAAIVRMIFKMYQYGITMPDILEELNFMRTPSARGKEAWNKTALKYLLQNEKYIGDVRLQKWISVDHISHKSVPNDSTVVPIYNVKNHHVPIIDRHTFLQVQRIMELKTPHGEYSRYPYFDTTFVCPYCGKKMIPKTMKTNSFGRIIGCFGVDGCRKYAMITNLVDTALLEAYNTLKIKEKSRSAEMMRMLEIKEESPKMETVQYYWLDDLIDRVEFKDDTMKVFWKCGLTNKVDMNIPKNRKPEVIAKRYCAMQDRILESANKPVNSEEPVKESKIKRPADAQRTAARQAAMNLRSRQKGKVANDN

SEQ ID NO: 26354 - protein, 558 aa, synthetic construct
MSKRVRTLLRVSSRQQLHDDDIPIQRAEAEQFIAKQKDWVFDKEYLEKGISAYHNGVDDREVLQEIMQDAKQGEFEILLAYMSDRIGRQEEYSFYVAELNRMGIEVWTIKDGQLKTEEHIDKLLNYIRFWQNEGESKKTGMRVHDTMVEMVKDGRFVGGKAPYGYKLVLSGEISNHGRALHKLVIVPEQADIIRQIYSYAVNQGMGYQKIANTLNENGVPAPILDKWKGGTVRSILTNPIYMGYIAYNRRKNGHANSTRLDRKEWTYAREQNPEIAIVSQELWERAQEIREARKNKINAARQATNELYMEQYNVPFSTRGRLALTGMVYCGYCGKRLKNTGYANHWTCKKTGEKKVSYVGRYGCPNGCKPRSTYSQEYLESIVFATVETYLENLKKIDISKELEEMQTQQGKTIKREIKDLEKEIKNLLADIETLEEKLPEAIRGEFAFSVDKLSAIISDKESLKKEKEIQKKSLQKQLEEISLQSNELMTFVEAMPKWNEIFSQADVQTKQMILSTLIDKIIVKDDDITIKFKIRLDNFLDEKLLESSGVDVPEQRL

SEQ ID NO: 26355 - protein, 538 aa, synthetic construct
MKETKLNKTAIYCRLSQDDGMVGDSSSIQTQKMMLEQFVKDNNFVLYDIYVDDGYTGLNYNRPGFQRLLEDIENGKIDIVVTKDLSRLGRDYIMTGYYTEIYFPEHNVRYISVNDNIDTLYDNNDIAPFKNILNDMYAKDISRKVKTAKRQRMYKGYYISCQTPYGYKVNPNNKTQLIVDEEVRENVKLIFELSLMNLGSKRICNELNKRGIPTPGAYKAASGEQRFINLLESTKSSRRNYDVRLWNTDTVNKILKDRVYVGDMVNHKYEVKNYKTKKRTKVPEHERIIVKDTHEPIISRDDFEKVQLMISNRKYENNYASPNLFKSIVKCKKCGRTLTFCYNKRNKSGIRVYKYACMGRYLGDKDIHESVSIMYKDLEEIVTSRLRSLMESIKNKGDAFIEDIISSIDIDSESKQLDIQKTKIESRLNVITKSMKKLYEDNVCGRITDDNYQILLTDFQKEQRELISKLEVLTTKSNKYKTQFDRIKEFRAVANKYLNFTELTNELVHSLIDHIEIDVNTIDNKKIKEINIIYRFIC

SEQ ID NO: 26356 - protein, 583 aa, synthetic construct
MKPIIIEANKNTTSQVSLFSKKQTGAYCRVSSEKEMQLNSFDAQVKYYTEYINQHEDWELVKIYADEGITGTNTKKRSGLKDMLRDCRNKKLDLIICKSISRMGRNTSDLLKIVRETRELGVDIYFENENIHTLGSGGEFLITVFASLAQDTSRQISENVIWGQDKAMRNGRIFCNRYIMGYDLVDKKLVVNETQAKTVRRIFDLYLEGCGVRTIAKQLEAEGHKTAKGNSKWNPISVRAILENEKYCGHLLLGKSYTQDYLTHKRVKNKGEKVKYLFTEDDDGNFCVPPIISAETFQAAQQEIKRRQELSDSKSKNGGRTRYSNRHALSGKIKCGKCNATFRRAVWNRGKPYERIAWSCTTYDERGKDVCDNESIPQDIIYKGITLILQDLKRNKDCVLDNFMKSAEEVINSTGYETEMLDVQTQISQLNTELKNLRLMRRRNEISEEEFLEDADEIRENIQTLNRVYSTLETDHSLITNKKDKLKLLKKTLQQECGSIECTDEIIKGLVKSIVVHSRKNIEIYLSGDIEANLSVTTKDISECTVQPVLLNTYVYDFSLMLPTSKIAKNLYSNIKFTVYINI

SEQ ID NO: 26357 - protein, 468 aa, synthetic construct
MVKEINNNMNDFTKKVEEVALYIRVSTEEQAINGDSLRTQREALTKFALANHYHIYGIYEDDGFSATNLNRPALQRLLEDVRKNKINRILLTKLDRLSRGVRNYYKVLDVLDAHCVFWQTIFEKYDSSTASGRLHINIMLSVAENESAQTSERIRSVFNNKIHQKEIISGKIPIAYKKEEKKLVVDEDKKALVIDAFNFYLKSGSVYKTFEYLALFDPSINYPRTARLLANPLYIGTKVCKYGSIENYCEPIISKETFDEVQNLLKKNQRKRDNSDHEFLFSGLLRCNECGYKMSGKYCKNFPTNCTFYYLCSNARLKKKCNMLKQLNETKIEKKLLEQIVPEINKYIDKNNILELEKAQIRDISKERDKVNKQLEKLRDLYVNDLIQIDHYEKQYKELTSKLDSLKEEEKPVEEKKTVNYDEFRSFLSRDFVTLYNSLSRTEKRLIWASAIDTIYIDDNYNLRIVFI

SEQ ID NO: 26358 - protein, 498 aa, synthetic construct
MNTVIYARYSAGPRQTDQSIEGQLRVCTDFCKQRGLTVIDTYCDRHISGRTDERPEFQRLIADAKRKKFEAVVVYKTDRFARNKYDSAVYKRELKRNGIQIFYAAEAIPDGPEGIILESLMEGLAEYYSAELAQKIKRGMHESALKCQSTGSGRPLGYRVDEQKHFQIDPESAQTVQTIFEQYIKGESNAAICELLNSRGLRTAQGKPFNKNSINRIIKNRKYIGEYRYHDIVVEGGMPAIISKDTFNLAQAEMERRRTRKAPKSPKAEYLLAGRLFCGHCKGPMQGVSGTGKSGNKWYYYYCGNTRGKNKTCDKKQVSRDRLERAVVDFTVRYILQEEVLEELARKVHAAQERQNDTASEIAFYEKKLADNKKSIANVLRAIESGAATQTLPARLQELENEQAVILGELSFLKGKRLAFTEDQILFALMKHLEPYPGESEQDYRRRIISDFVSEVYLYDDRLLIYFNISSEDGKLKSADLSNIEGGEFDEGLVSSTI

SEQ ID NO: 26359 - protein, 497 aa, synthetic construct
MNAIYARQSVDRADSISIESQIEFCQYEMRGEQYKVYTDRGYSGKNTDRPAFAEMMNDIESGVIGKVVVYKLDRISRSILDFSNMMEKFGKHRVEFVSTTEKFDTSSPMGRAMLNICIVFAQLERETIQKRVADAYYSRSQKSFYMGGRVPYGFRLIPTTIEGIKTSMYEINAEEAEQVRLIYELYSKPECSYGDIIRYFQAHGILKNGKPWGRTRLADVLRNPIYVRADLSVYEFYRDQGAIMANDPSDFIGTNGCYYYKGQDSVGRKQMNLEGNHLVLAPHEGIIPSDLWLKCRAKCLEAQQIKPYQKAKNTWLAGKIKCGICGYALVDKHYSTTRSRYLLCSNKMNSKACEGPGTIYTDEFEQIIYNEMRKKMAQFKTLRRCKGNYINPELTALNVQLTQVETEIGSLMDRLSAADDTMFRYISGRVKELDGKKQELMKRISELKLHKEADYTEIYNHLTMWDELSFDDKRQTVDQLIRVIYATSDSIKIEWRI

SEQ ID NO: 26360 - protein, 485 aa, synthetic construct
MPTSDLKIAAAYIRVSTDDQEEYSPDSQVRLIREYARKNGYLLPEEYVFQDDGISAATARKRPAFNRMIALAKEKGRPFDAILVLMFSRFARNREESVLYKGLLRKQGISVISVKEPAVDGPFGTLIESIIEWFDEYYLINLSAEVKRGMSEKFLRGEAMGTAPFGYRIDSANKTFTVDPERAEIVCDVFRSYADGAGLRDIAVQLGDAGITTRRGNRPDSRFVEYMLRNPVYIGKIRWTPGHKTRYSRVHIADGVEVVDGKHPPIVSMDLWEAVQRRMDQRKAAYGRYQRQAPAAWMMRGLVRCSACGATLIMAGRSSSCPFLQCHSYAKGACHTSHFLSLRRANAAVLAGLRRSVGTLTFHMVPHLTSAPSRTADYGRLLEQERRRLARCKDAYQAGVDTLEEYRDNKARLEERIRRIEEQAASAAAAPESFDKAAYGKKAADILRFLETSADEGAKNEVLRSVVDHITYEKASRHLAIYFYT

SEQ ID NO: 26361 - protein, 518 aa, synthetic construct
MTTIPATISRYTAVPINSTKKRRVAGYARVSTDHEDQVTSYEAQVDYYTNYIKGRDDWEFVAIYTDEGISATNTRRREGFKAMVADALAGKIDLIVTKSVSRFARNTVDSLTTVRMLKEKGVEIYFEKENIWTLDAKGELLITIMSSLAQEESRSISENTTWGQRKRFADGKASVAYKRFLGYDRGPNGGFVVNPEQAKTVKLIYKLFLDGLTCHAIAKELTERKLPTPGSKAVWSQTTVRSILTNEKYKGDALLQKEFTVDFLQKKTKKNEGEVPQYYVEGNHEAIIDPVTFDYVQAEMARRTKDKHRYSGVSMFSSKIKCGECGCWYGSKVWHSTDKYRRVIYQCNHKYKGGKPCSTPHVTEEQVKDAFVRAVNILLSEKAELGANVRAVIAMLCGSAELEKQQAELKEELEVVVGLVERCVAENARTALDQDEYSERYNGLVSRYEAVKAQFDEVTQAIADKNDRKKLLEQFLRMVETQEPVTEFDERLWSSLVDFVTVYREKDIRVTFKDGTEI

SEQ ID NO: 26362 - protein, 592 aa, synthetic construct
MPNLRKIEAAVPTIREKKKVAAYARVSMQSERMLHSLSAQVSYYSGLIQKNPDWEYAGVYADDFISGTNTVKRDEFKRMLADCEAGKIDIILTKSISRFARNTVDLLETVRHLKDLGIEVRFEKENIRSMDGDGELMLTILASFAQEESRSISDNVKWGTRKRFEKGIPNGRFQIYGYRWEGDHLVIQEDEAKIVRLIYDNYLNGLSAETTEKQLAKMGVKSYKGQHFGNSSIRQILGNITYTGNLLFQKEYVIDPISKRSKINRGELPQYFVENTHEAIIPMEVYQAVQEEKVRRRELGALANWSINTSCFTSRIKCPLCGKNYRRSGKRQRKNPDEVYYIWICRTKSEKGAKSCPAKAIPEKALKNACAEVLGTAEFDDAVFSAQIEQLYVVGDDTLEFHFYDGSVLEKKWKSTAKKDWWTEERRAAWGELHKHKATNPNRRRFYEFTGLIKCGQCGESFRCQSMTRKDGTRIRSWHCGRTCGNTNIRDEILKSMVCDVLGLDAFSEESMDAALEKITVNGTAVRFHLRDGSVAEREYTQPKRKGTKHTEEFKEHMRQLMKAKWKEGKMHGTKKSDNHSSHDQPVHGGAD

SEQ ID NO: 26363 - protein, 597 aa, synthetic construct
MDIKKAREDLRKGKTIYDMPLRVVYYARVSTDKDDQLNSLENQQNYFEEMITENKNWVFCGGYIDEGISGTAVKNRDKFLKMIEDATLGKIDMVVTKEISRFSRNTVDSIKYTEYLLKQGVIVYFLSDNLNTIQEDSEFRLTIMSSLAQDEVRKLSERVKFGVNRMIKDRKLIGGNLTGYFKKDGRYEINPAEAPIITYLFETYASGKVGLKKIGQELAKMGYLNSKGEPYSQTTMAKFLTNPRYKGYYTARLTEVENYKTHKKKKVPKERQIIEKDDRVPAIVSEELWNKANELHEMRKKSSARHILNSEKSLENSKYSCLLYCKDCGNVFIRAGGSNRANNPTWACKKYKTEGVGACASPILREDYLDKIFVQIFSDFIDNKKEYLNGVINEYENIISSNKSSDDIGSINNQIIKIEKQKDKLLDLSIKGLIDDLEFKKRNDKFNNEINSLKAKIDRLNNPDAELTKLKEKITEVRNTLTSKVDLQSQLPNLLRILVERVEVEKINGDRKHVRLIIYFNFNADTIYRELEIDNKRKKLELSNFYPEKCSCTDTEIQNSQYRNIEIDCGSLEIKGKNALLCSDSNTKQPRFCITWI

SEQ ID NO: 26364 - protein, 497 aa, synthetic construct
MPKTEEKQAVKAVIYARYSSDRQREESIEGQLRVCEDYASRNNMTIIHTYADRAMTGRSDQRPEFQMMIRDAATMTFDVVLVYKLNRFARNRYDSAKYKHKLKKYGIKVVSAMENIADDPSGILLESVIEGMAEYYSAELAENVMRGMTENALEGKWPGGVVPLGYKLDEQHHLVIDGPKAEVVRLIYQLALEGHNQKYIIDELNRRHYTNSAGGPFSYNTLRTILRNEKYIGVFTWGTVRRENACPAILDKATFEAVQEHLNFRTKHHIRSCNEDFLLTGKLFCGCCRSKMIGVSGTSKTGAIYYYYACAAHLKKKCKTRNIRKDAIEDLVCEVTTRILSSKEAVEAIARQAIEMQKNKKDSLELQAIKNQIADINKKLQNCVKAVENGLISETITKHINEYEKELTRLKDDAARVKLLDGDIELTQQHIEFFFWSIAQKIKAADKYKSILLSSIVRSVIVYKDYIEIQYNYKNELPILQNPVKVESSYLNHMVTR

SEQ ID NO: 26365 - protein, 561 aa, synthetic construct
MASIGCYIYTRVSTSMQVDGYSLDAQKDKLKKYADYMGMKVLREYSDEGKSGKNIEGRPSFLRMLNDIERKLDDVKYILVFKLSRFGRNAADVLTSLQLMQDYGVNLICVEDGIDSSKDSGKLMISVLSAVAEIERENILVQTMEGRRQKAREGKWNGGMAPYGYKLVNGFLEKVPEEAEIIKFIFDKYAYSNMGAGQIAKALNNKGVIKQPRLNTKLPFFTSEFIVKVIDNPIYMGMISYGRRSTEKIDGTRNKFRTVRKSEFMLNEGVHEGIVTKEVWEIAKKKRDKSRGKHEKKHSLEHEHILSGIVKCPICGAGMYGRVNRKKKRDGTYYPDYFYYCCSHRTPVDGKQCNYNKQIGEVLLDTTIVSIIKDIVRNPMFAYTLKQALNSEIDISNIEKEKESLQKRRRQIEGAKNKLAEKMDLLDIDTPSYHNIYDDMEKRLYKLYNEIDEIDVLIQEIDVKINNVKGDRITFENVYKMFEYFEEYYETCTDAIKKELMGALIESIELYPEKRPDGRLIKAINFAFPIKYDLDSDALNFPCNFVIDETIVLLQRKTSQN

SEQ ID NO: 26366 - protein, 514 aa, synthetic construct
MPQVQIIEPTIRPQKQKIRVCAYARVSSNSDDQLNSFSAQVEYFTQLIQAHSDWEFIDIYADEGITGTRADKRDDFQRMMRDCRAGRIDRILVKSISRFGRNSADCIEAVRELKMLGIAVAFEKEGIDTGRMTNEMYFSMYSAFSQEESTSIAKNMRKGAVMRMKNGTYRLSQAPYGYRLDEKGGFLICPEEAKVVRKIFGDFLSGKSIREIANELAQAQVPKLKGNPVWSATGVSYILTNERYMGDELFQKRFTTDAFPFKKVKNRGEKSQFYAENTHEAIVSPNVFRLAQELLKKKNQLHGRKKEIQTYTFSKMLECGECGSTFCRRVTKAGTVVWACYRHFRDKKLCAIENVQESEVESAFVTLYNKLGRNRSEILTPFITQVEKLRDKNFMSHPGAMQLNKEIADLLEQNHALATLRAKECIDSAFYMSETNTNNTKLENLRKELQRYRDLNDYHEILNGSYLLLKIFEEQESISEFEPVAFRNMVIKVRIFSDTICFRLINGMELTERR

SEQ ID NO: 26367 - protein, 547 aa, synthetic construct
MEPQAPIRQKIIREIKPSPVLQARTRNHKLRVAAYCRVSTEQEEQQTSIENQITYYDDLIRSNPEWEYAGVFSDDGISGTRDENRPGFMEMIKQCKKGKIDMILAKSLSRFSRNTLQCISYIRMLKDRGIIIRFEKEGLDTSRVTSEIFFTWTSAFAQGESESLSNNVKWGKRKGYSQGNFAFPYKNMLGYKKGEDGEPEIVPEEAEHIKMIFNLFLLGRSLRQIKEALERRNILTPRGNTEWGLSSIEHILRNEKYMGDVLLQKSYTVDFLTKKKKKNNGELTQYYITDNHPAIISREDFLNVQLELTRRNSKKKVSQKKTKSALGKYCSKYALSERLVCGECGSMYRRTTWVKKGKKKVVWRCISRLEFGTKYCQHSPTISEEALHQAILQCIQKVVEDKEDILKNLRDVQENIILFSGNQITPQSLEKQIDKLQQEMSALVKIIAQGGDSEFYAAKLRQLSEQKMGLTSQLQEIQKKKMADQTQEYQYQQALLYINNEENLNLTEFNDDFIRRIIEQITVLSATQIRIRFVGGYEQDANLPLKK

SEQ ID NO: 26368 - protein, 523 aa, synthetic construct
MRFFSYGRKSVFSDKSDSIDNQFRMNREYCESKFSGQVDSWQQFSDEDFTGANTSRPDLQRMLSFIKGGFCDVLVVYQLDRLSRDVRDFANIYALLEEHGVMFISIKENIDTTTPIGRAMMYVTVVFAQMERETIAARVTDNMLGLAKKGYWTGGNPPVGYVRKHIVVNGKKHCSIEVDPDGARYVTQIFDTFLAYNCSLQGMETRFKNQGIRTQSGKFFSTTQLHKMLTMPYCVEATPEVYDFYAAKGCIMDPGSPREMWDGSVGVIIYGRSTEKNKKHQAQPPEKWTVCLGKHKPFMPAEKWLAVQSRFTQNKCIKDAKWPVPLLKGVLRCKCGNLMQVSRKKKVDGTCSSWYYCRKRMRQGVDACDMGQIKCDLLDEEVLELFRGITADPALIQKFVKAEAPADVPDLKAAQARVSACERKIGRLAASLALAEDSAASKYIIAEMERLDVELGALKREASLAEMESHQAAASAKDAKATAAEIAKLIHGLDGFDDKEKNAIARAVIQECTWDGERLFIKL

SEQ ID NO: 26369 - protein, 700 aa, synthetic construct
MDSNAFLNDLMSKMKLPEAKGKKKAEQSESVAQILAVMQKVKTEKKKPPVTSYAPVKEMPMNEPESMEEFSQLASDVMQECWPAMPTVSAASQEKAVRVAAYIRVSSTNPAQEDSYEMQERYFMSLLAGNAGWTSAGIYSDHGISATSREGRTGFNRLLRHCKQGKIDRVICKSISRFARNTQDFLVALRTLKENNVTILFEREAMDTADAYSEFILTTLAAIAQEESRSISANIAWSNQKRFPAGNVCNKDIYGYEFRKGEYTVNENGYRYRAVFIIPEEAEIVRMVFRLFTKEELSFTQIAQKLDALHIPPPNSGCRQRQKRKPTVLPAGALKEEDKRGWTATDVRYMIANVRYCGSVLCQKTFTDHRNGHKQKVNKGEKPKYLIRNHHPAIISEELWQEAQEVWKAYTAKYRGIEKGRNERNYSKLLLCGECGRYFQGHSTTRTTIWRCATKLAQQGQKRCRMEPIYEEQIQTLLCKAFAEKFKLGEKMDAEVHEVMQMISKAPIDNARNQALKNLTEKLREIHDFDHMEQEGDFLKRQLSAVNYSIRDVHQHIRDIQAEKEALKVRCEVLGEPRDKEAVTELENRLLNEEEQLEKLEHEAQQQAEQVRYMEDYWKKLEQTHEIREKTLQWLDSLAGGTQMFLDEAVGTYVKAFVLSVTIFSPKHFRIHWFDDTCTEVECDSVFEGYQQPGMIRRKY

SEQ ID NO: 26370 - protein, 518 aa, synthetic construct
MIEQIKAALYVRLSQEDRNKLHPEDNSESINNQIMLLKSRCEKEGWIIYDIYNDDDFSGSDRQRPEFNRMIEDARLHKFDVLLCKTQSRFCRDLELVEHYLNYMFPVWNIRFLSIIDNADTSNRQNRKARQINGLIDQWYLEDISENVKAVLSAKRKKGEWVGSQAPYGYAKSPEDKHKLIIDEPAAKIVRYIYRLYINGLGYASIVRRLNDEQIPPPAKYKNLKEVSSHKKTATRGLWCYYTIQKILSSQVYIGNTVQGKSEKLSYKGEERRYKPQSEWDIVENTHDAIVSYDTWHKAQIIRSTRSTPYKQDMKNTVFSRMCKCVYCGATLNKHTYHNSPMLECPTKHIKTGICPGCVITVKRLEEIVIDEIKDHCQRLMDVSAVKSKIDSNVEINNRRQEILKSIESAIKKQKLLKNRLTSLYMDKADGIISIKDYYQFKNAIDADSVEIDTTIKLLESKLLSIDDEIKALESNHTIVNQYSNIEKLTHNELMFLVDYIEVGGTRDNRIVRIHWKF

SEQ ID NO: 26371 - protein, 527 aa, synthetic construct
MAKRKVTTIPATINKFTAKPVDSKKKRKVAGYARVSTDHEDQLTSYEAQVDYYTNYIKGRDDWEFAGLYSDEGISATNTKHRDGFNQMITDALAGKIDLIITKSVSRFARNTVDSLSTIRKLKEHSIECYFEKENIWTFDSKGELLLTIMSSLAQEESRSISENVTWGQRKRFADGKVSFAYKRFLGYDKDSDGNIVINEGQAKTVKLIYKLFLDGLTMHSIANELTKRGLKTPAGKDKWSQSTVRSILTNEKYKGDALLQKSYTVDFLTKKTKINEGEVPQYYVENNHPAIIDPELFDLVQTEIQRRGKGNARYSGVTIFSSKVQCAECGGWYGSKVWHSNDKYRRTIYQCNNKFRHKTRCSTPHLTESEIKDFFVKAMNQLITEKSEILENLQLIRTTLCDREDLIKQKESLGEEIAVAVEMTQNIVAENARMAQNQDEYNKRYNSLVERYEKLKKEYDNACAVISEKDAKYEQMGRFITVLNDQSEFISEFDEALWGSLVEKIVVKSKDDVMVVFKDGTEIKAE

SEQ ID NO: 26372 - protein, 597 aa, synthetic construct
MRTITKIESTMPEIKKRKKVAAYARISMESERMNHSLSAQISYYNDLIQRNPDWEFAGVYADNGISGTSTAKRDEFRRMITDAEQGKIDIILTKSIQRFARNTVDLLETVRHLKNMGIEVRFEKENIYSLSGDGELMLSILASFAQEESRSISENVKWGIRKRMKEGMLTANGHFNIYGYKWEGDELVIVPEEANVVKRIFQNFLDGKSRLETERELEAEGIRTRQGCVMRDSNIKKILSNITYTGNMLFQKEFISDPINKKRMKNRGELPQYWVEDTHEAIIDLETFQYIQDEMERRKQLGPLANKSLNISCFTGKIKCPYCNQSYMHNTRKPRTPNARRLEFWVCGSRKKKGGHCEVGASINQENMKKVLSEVLGIDEFDDEVFLEKIDFINVPKQYTLEIHFKDGDVITKPCRNTGHKDCWTKEYREKVSVQRRKKNTNPKGASVFTSKLKCRHCGCNYRRCTQPSATSKDGKFYYWRCAEKNDCNAKGLREDFLKPQLAEALGMEEWNDESFAEKVEHIDIDGYMLDIVGKDGSVTSMNFKPPERGGIHCSEKQKEHMRKLMKERWTPELKQQMSDYMKKLRKERGEAWRKEK

SEQ ID NO: 26373 - protein, 526 aa, synthetic construct
MPKVTIIPATVNPLTHLPKAAVQKRRAAGYARVSTDSDEQFTSYEAQVDYYTRYIQSKPEWEFVKVYTDEGISGTNTKHRDGFKEMISDALAGKIDLIVTKSVSRFARNTVDSLVTIRKLKENGVECYFEKEGIYTFDGKGELLITIMSSLAQEESRSISENITWGQRKSFADGKIHLAYKHFLGYKKGEDGRPAIVEEEASVVRLIYRLFLDGKTQAGICRYLEDLEIPSPSGKAKWSKTTVTSILTNEKYKGDALLQKSFTVDFLQKKTKQNEGEVPQYYVESSHPAIIEPDEWDHVQAEFARRKALGNAYSGKSIFSAKLVCEDCGGFFGSKVWHSTDCYRRTVWQCNNKFKGGERCLTPTVDTETVQQLFIKAYNQMMGNRKQIIEDCEIMRKKLTDFKSLDADIERQFEETQIVAELVKAAVKDNAVTAQSQEAYLKKYEALTKRYETAAAELERLQNLRTLRSQKDKAMALYIRTLKKQPTVLSEWNDTLWTVMVEKAIVHRNSEITFVFYNGTKVKVRQ

SEQ ID NO: 26374 - protein, 492 aa, synthetic construct
MSDIAVIYARVSSKEQETGGYSLPAQLDFLKEYAKSKGLEVVKVFTESMTAKEAGRIEFNNMLKFAKKQRYGCHVIVEKNDRLLRNEDDEALIINLTVRQGLIDLHLVKDHLILNRYSTPHEIFMFHMMCGMSSMYPRNLSGEIKKGLDKKADLGDYPAKAPIGYKNVRSSKKRSTIEIDPTNAGYVSKIFELYATGMYSYKTLAERISLDGFYPKNKPCSPKLVEKIIINPFYMGEFEFNGKRYHEANHTPIITKELFYTCKKIRERHDNPRKITHDFLYSGLITCSHCGCQLTAEIKKGKYIYYHCTGNKGGTCKRNKYLKEEYIDEHIRTLLEKIQPSKEDAKAIVEKFKEIVNANFDYDKKSMEEIGKKISLLKNRLNKLYIDRLDGMITDEFYREKKNEFQGELDELELKHDNFLAETDTLVDMATQIIELCKNAYNHYLRSDNENKRLLLKILCSNFLYDGSNLVIKLKSTVEPMLLGANFNNGGG

SEQ ID NO: 26375 - protein, 430 aa, synthetic construct
MERTIQKVNLTAIQKAPKQKRVAAYARVSCGREAMLHSLSAQVSYYSRLIQKTPGWEYAGVYADEALSGTKDTRGEFQKLLADCRAGKIDLIITKSISRFARNTVTTLQTVRELRQIGVDVYFEEQNIHTLGEEGEFVLTLLAAYAEEEARSVSENQMWRIEKQFQQGKPTSIDMFGYAFVKGRLEIIPEEAALIREAAKQYLDGATQEQLETIFNEAGVVGRHGKKFTGTGIITLLCNEKVVGDLLLQKTRCIDPITKVQKVNHGEWPQYFVSGSHEPILDRETQEMIFAERARRVEARGMNNRDCTRKHRPFSSIMVCGKCGKHFIQRTWDTQKHGLRAKWGCRTHLRSSASCATENIPEPLIEKLAAEAMGRRNFDAELFKQKIKEIHVPENGRLVFVFKDGHTVEKSHSFEWPEERRAGVCRQQQM

SEQ ID NO: 26376 - protein, 581 aa, synthetic construct
MAYAMKVPAASADDRIVAIYVRVSTGYQVDKDSLPFQKKELKAYCKHILHVDMSRVEIFEDAGRSGKNTKRPAYERMMQKVRAGLVSHVLVYKIDRISRNLVDFSLMYDDFKYNRVTFVSLNEQFDTSSAIGEAVLKIILVFAELERKLTSERVKDIMIGRANEGKWNGARVPYGWDWDSSAGWPVHSKKEAPFGRAMYEMYLEVKSTGKIRDYNNAHKIPTKRGGEWTSKTVGDFLRNPMNKGDYRYNYRESARGRKKPINEVVYLEGVFDPLIDPEIWEKVNKIMDSNRDKRNMGGLHPVEKNCNVFAGLIQCGSCGSGYLVGKKDKRRKNGFTPSMYYCGAKTRAIHCQNLNVSDVKIGPFVINYISAMVRVSNERRKIKAPEDLEEMLLSDKAVFADIMGLSSDSLNNTFELLTGKSATGGALWRADLVDQKGVAADPAEIESLKDQIRKYERAKERLEDAYYFSDDGMSEKEYLEKKNRFDSGRVAAENKLKELTETHIASGVDESAFVKSASAFLLTHKIRAGSHIVYSDLAGMVEEESIKEFFNLVLDHITVKDRRVTEIVFANGLSHKFIYRD

SEQ ID NO: 26377 - protein, 523 aa, synthetic construct
MIDNIINNMERYAKYLRKSRKDIEAELRGDGETLAKHELILNNLSDSLNIKPEQIDIFKEIVSGDSIASRPVMQEVLQLVEQGIYAGVLVVEVERLARGNTLDQGIVANAFQYSNTKIITPQKIYDPNNEYDQEYFEFGLFMSRREYKTINRRLQNGRTISANQGKFPGSKAPYGYKRKKLENDKGWTLEIIPEQAYVIKTIFNMYAYQHIPPSDICRYLDNLGIKPSKSDTWSSSSIRDILSNPVYAGKIKWKDRKVVKVFKDGKLVNTQPKNKGNDVILVDGLHSPIVDSQTFNIVQQRKKDNIIPMPSVYNVHNPLAGIVRCAKCNRLMSRNSNNVLCCINTKCNNVSSKLDIVEKKILESLELWLVNYEEEINSVSTLKNTTDDIINIKQTSLNKLKKELEEYNAKLEKIHDFLENGIYTVDVFTERRNKILESQKNTSVKYYEIQKELQEIEQTEKAKKNLIPQTKNVLTEYSKCNNIKKKNELLKSVIQRVEYLKKEKCYNKNSDPENFELLIYPKF

SEQ ID NO: 26378 - protein, 527 aa, synthetic construct
MAQRKVTAIPATISRYTATPINSTKKRRVAGYARVSTDHEDQTTSYEAQVDYYTNYIKSRDDWEFVTIYTDEGISATNTKKREGFKAMIADALAGKIDLIVTKSVSRFARNTVDSLTTVRKLKDEGIEIYFEKENIWTLDSKGELLITIMSSLAQEESRSISENVTWGQRKRMADGKVSFAYSRFLGLDKDKETGKIVVNPEQAETVRLIFHLFLEGMTPHSIAAELTSRGIKTPAGKDVWNQQTVRRMLSNEKYKGDALLQKEFTVDFLQKKMKKNEGEVPQYYVEGNHEAIISPAVFDLVQAEFAKRTKGGTRYSGVSIFSNKIKCADCGGWYGSKVWHSTDRYRRVIYRCNRKYSGEDKCQTPHVTEDEVKAAFVSAYNQLVTEKKEIIANAEIIRKTLCVTDALQEEKGKLEEEMAVLVEMTQNIVAENARVAQDQDEYQKRYDGLVQRYDTAKARYDEVVAAISAKEAQSERLADFIKVLKAQDGTISEFDGSLWGSMVEFITVGRDKEITVTFRDGSEILA

SEQ ID NO: 26379 - protein, 522 aa, synthetic construct
MPTSKNTARKYAAGGGSDNSCGVEPLRAVIYARYSSSGQREESIEGQLRDCYEFAKKHGIIVIGEYIDKAMTGRVDRRPDFQRMMKDSEKGRFNCVLLWKMDRFARNRYDSAMYKYKLKKNGIRIFYAKETIPDGPEGIILESVMEGYAEYYSENLAQNVKRGNYDSALELKTLGKTCLGLKTGPDGRYVIDQAEAAIVRRIFEEYAEGERAKDIYERLNSEGYRTSRGGKFNKNSLRRILSNKKYIGVYEYEDIYVENGIPAIITDRDLFERVQKMLKINHDAPARGKAQNFLLTTKLFCGLCGSPMIGDGGTSHTGKAYAYYSCTKRKRGRSCKKESVPKDWIEDLVVGELVKIVHNDELIEQIADRVMEYQKREKDQSGLHALEIRQKENEKAISNMLAAIEAGIITPSTKTRLMELEADRADIEKGIAHELLAEPEFERDQIIYFLERFRSGDINDEAYRIMLVDTFLNSVYLYDDDHLVLVMNYSGENCKVDLKLVEGAVSGDGCKGSAFAPSSALI

SEQ ID NO: 26380 - protein, 505 aa, synthetic construct
MQINVMEGRSKAGRKLKVCAYCRVSTDADEQENSLENQMSHYESLIKSNPDYEFAGIYSDFAISGFKEKRPGLQKMMSDARAGKIDLILTKSVSRFARNTAIVLEATRELKELNVGVFFELQNINTLSGEGELMLTILAAFAQAESESGSEMAKMVYRRKYEAGIPVQYLERSFGYSKTEEGYYIADEKEAFWVRKIYEMIADGYTVAAVTRFLNQQGIKTSGGAEWLNSTVIRIVENEIYKGDYIMHKHFVNDERKLVTNRGEVDAWYIEDDHEPIVSPELWQKAQDAVAQKREYLATGSVITDFTEDNYPYKDRIFCAKCGHPLYKRIYSNGNRLNWGCSGTKRYGKKFCEGVNIPDIILREAWKYDGNMYIGTKDNNKGTQEFTYLKETSWKRRHKKKIPEHMAPECNEENYPYLKKIYCGICGKRLTRRINTKSGKIAWICSGRKRKGASFCPGTQIPDSVLKMWGDIKNDIYIVRKDEDNGKKRYSYTSKKSADGSKKQL

SEQ ID NO: 26381 - protein, 444 aa, synthetic construct
MAAYCRVSTDQEEQLLSYENQVNYYTNYISENPLYEYAGTYADEGISGTNTKKRDEFNHMIADCRAGKIDMIITKSISRFARNTLDCLNYVRELKDLGIGIIFEKENINTIDAKGEVLLTILSSLAQDESRSISENSTWGIRRRFETGKHKMSTKRFLGYDADETGKLVINGLQKPIVVRLYQEFLDGKTTDYIKRIFEKEGIKNWDGGTKWQATTLMSMLENEKYKGDALLQKSYTVDFLTKKRTQNKGEIQMFYVEDDHDAIISKRIWECVQLEIKRRKKYLEEHGTNSYSHRPESNPFASKIICGDCNKVFARKGWRSSTGVDRKVWQCSERYKVKGVMGCVNRHVEEETLIKAYLMAWNALVENREDFMEQWTEQLQSENLLEGYRAEKFIEYTDGAEPLTEMDTDFMLKTLDHIKVFEDGTLLVVFLDGTEIECKNEEE

SEQ ID NO: 26382 - protein, 426 aa, synthetic construct
MRVKVINKRPASVLQKKRVCAYARVSTDSRRQEDSLENQMETYERLITGNPEYEFIGVYADQGISGYCENRPQFQRMMEKARAGEIDLIITKSISRFARNTVTVLKFARELKELGVGIFFEEQNINTLSGNGEMMLAVLASFAQEESRSMSENNKWSIRKKFERGEVMITTSRFLGYDKNEYGDLIVNRKEAEIVSLAFDLYLMNVGSSRIGELLDYLGVKTVTGTTWESGTINGMLCNEKYKGDFHLQKYYTPENKRNHTKKNNGEVQSYYISENHEPIVSPEVWERVQEVREQRKRDRNIGQDNTMKFQNRYPLSGMLICPYCGKTLRRRQVYKKKIQWLCSTYIEKSVKACKGIRIDDTELQGLSITEQTVVEEVIQNGKKHYCYTSKADFDCGIRNSASSTETENGSVLPSVNRPRRTVIKL

SEQ ID NO: 26383 - protein, 577 aa, synthetic construct
MALPKKTIPQIEQKRAAIYVRVSTQYQVDRASLPVQRSELVNYAKYALDIPDFVIFEDAGYSAKNTDRPDYQQMMARIRTGEFSHLLVWKIDRISRNLLDFAAMYSELKQLGVVFVSKNEQFDTSSAMGEAMLKIILVFAELERNMTAERVSAVFLSRANDGIWNGGKVPFGYAYDKQTKTFSILEDEAKTVRLIYALYESSKSLVTVSKALNERGIKTRNGSEWSPTTVHTMLSNPFYSGTYRYNYRNESDPHHHVPKKKEDWILVKNHHPAIVSPEHQAAVELILASKSYGKNQTYQRKNIHAFAGLLTCGYCGSTMAATIDRARADGWRPSVYICSRRRMSNDCQNKYVSDVTLGPFVLNFFANLIKASNSFGKSTSIETLEKKLLRGDALSIVDHIERPGLEELYNHLRSGFDEKPFDSLAVNAAEASSDVQERDLLLADKRRLERALKRLNAIYLYGDEEIPGKDFILDRKSITDSLQQIDDRLKELDAAAVFDVSLSDDEFMEKASQFILTQQLLDKRSVNYEKFIRKIDPRIVKDFLNETVSNFCIKDGLTTSVLFKNGIELRFCYKAQQ

SEQ ID NO: 26384 - protein, 599 aa, synthetic construct
MIDDCVRAVFYARVSTQEEQQLKALPKQIQENRDRIREKGWVLVDGYVDEGKSGTVIKRRDEYQRLLEDMELNKFDVVVVKDQERLQRNTRDWYNFIDRLVQNKLKLYFYLDNTFYSPDNALITGVKAIMAEEYSRNLSKKMNNSNKRRIEKARAGEEVSAMGNGQTYGYSIVDGKWVVDESQREVVRRMYEIYTELHSVRKVRDALNEQGYRNQRGNLFTDENISRIIKNVMHKGWVILNRHHRDFDTKEIIEKSEEEWVIVKNDHEAIVSEELWDAVNDEIQSHRNKGNSGTRGKRGGTDLLSGKMVCSCCGRVLWKHASQGSYKSKEGRKYTYKRYTQWYCSGKMGRGELACTDPATISGVKLQKYLVEMADMFLDYSTVEYSKNLLKRRTISWLEDLKDKLTTPNDNGKIEQDLKALEGKRGKLIDLYTDELISKEEFKSRSVDLDAEIEKKRALLVPVEENPDIKAIEDTIANIDAEIEALFEDEAMVEEKKVQFIQEHIKKIYVSKNSDVFIILDNVAGAFLFIDKEDTRIEVVPVAEYNPEELSEEGITENDFVPFDRESKPQHHGPKHLHPSGPQTAPRCCFRDRFSCDQP

SEQ ID NO: 26385 - protein, 577 aa, synthetic construct
MALPKKTIPQIKQKRAAIYVRVSTQYQVDRASLPVQRSELVNYAKYALDIPDFVIFEDAGYSAKNTDRPDYQQMMARIRTGEFSHLLVWKIDRISRNLLDFAAMYSELKQLGVVFVSKNEQFDTSSAMGEAMLKIILVFAELERNMTAERVSAVFLSRANDGIWNGGKVPFGYAYDKQTKTFSILEDEAKTVRLIYALYESSKSLVTVSKALNERGIKTRSGSEWSPTTVHTMLSNPFYSGTYRYNYRNESDPHHHVPKKKEDWILVKNHHPAIVSPEHQAAVELILASKSYGKNQTYQRKNIHAFAGLLTCGYCGSTMAATIDRARADGWRPSVYICSRRRMSNDCQNKYVSDVTLGPFVLNFFANLIKASNSFGKSTSIETLEKKLLRGDTLSIVDHIERPGLEELYNHLRSGFDEKPFDSLAVNAAEASSDVQERDLLLADKRRLERALKRLNAIYLYGDEEIPGKDFILDRKNITDSLQQIDDRLKELDAAAVFDVSLSDDEFMEKASQFILTQQLLDKRSVNYEKFIRKIDPRIVKDFLNETVSNFCIKDGLTTSILLKNGIELRFCYKAQQ

SEQ ID NO: 26386 - protein, 535 aa, synthetic construct
MNSYDISFRPEEVIQYLRKSRSDDPNMTIEEVLEKHEHMLRDFAVNHFGAPVPDCNVYREVASSETIDGRPEMLRMLRAIESPDIRAVLVVDVQRLSRGDLEDAGRLMKLLRYTNTQVITPMKTYDLRDEWDRDIFERELKRGNEYLEYFKKIQARGRLQSVQEGNYLGSKPPYGYDRAVIRIGKKNCPTLAVNKEQADVVRLIYELYVNKDWGAQRIANHLDSLGIHPLHNAHWNPAVIKDILRNYHYIGKVVWNRRKTITVVDNQEVYKTRPWNENMLIFDGRHEAIISEELFHAALARQGRSHRCRPDNRVSNVFASILHCSCGYSMSLRHDGRGSLRLSCDDQRHCKSGSIGYEELIDYICKVLTAYIDDFKIKVKHDNANEVDIHRALVSDLEARLAALEAKEVKQWEVYSMEGMPRAIFDKLNKQVKEDKAEIERALKQARKDSPDPVDYRERIAKFGDALNALQNPAASAEIKNQYLKAIINDMIYTRPGAVRLTADNCSDYGINYKDMAKRGGWYSPPFRLEIKFRF

SEQ ID NO: 26387 - protein, 506 aa, synthetic construct
MTKIITAGIYVRVSTSEQAEQGYSIQTQIKACKDKAYELGAIDILEYADEGFSGAKLDRPAMTRLRDDIRNHKLDIIICYDPDRLARNLAHQLLITDEIEKYCREGLIFVSVSFENSPEGRLFYSMRGAFSAYEREKILERIIRGKKGKLQAGRLGNNHLYGYDFDKDTQMYVINENEAKIIRQIFEWYISGISSEQITDKLNANNIPKIWQGKRYKWSGSTVRTIIKNEKYTGIFHGWQYLQVINKCGGYSIKKKDKSQWIDIEIPAIISNEIFEKAQKQIIKNRTYNTRKEKEVHLLTGLAYCGSCGNKIYNHHNVRRKYYVCSILYDKRITDKKICKPKFLHIPEVDELVWNALTKICSSPKLIKEYMTDINNHENTFLNYKEKLCMLDKKLTKLKNSQNDILEWFSDGLIDKEIAQKKLENNKQKIEQLNSNKKELLINISNLKEKHTPEDIYNIFKKSAKISIDDKRNILRSILDKIYLTKLDKSKECKSKLSLKIVFVFK

SEQ ID NO: 26388 - protein, 684 aa, synthetic construct
MSILQTIKTIIRVVLYLRLSDEDKNKLSKEELSQSIKNQEIMLRDYAEEQGWEVVGVYNDDDWSGSDATRPDFNRMIEECKNGNVDIVLCKTQARFARDMELVEKYVHNLFHEWNVRFITVVDRIDNARKETKKTSQILGLTDQWYLEDTSLNIRETLKSKRKDGQLTSSFATYGYMKDPENKNHLIIDPISAEVIKRIYDEYLSGTGLDKIARRLNEDKILSPYEYKLLNGSKLKIPVIKDYVNYGYIEKTGTYMLDVSFTNKEEYILKDLVSFNYITSDRLTFNNKCDIVLKKYTNNRTKIYYSENDNIDINNFNIDDCILLNENDVIPKTAKVIISYTKELDRTHTINYQFEITLKENREHEDYYINICGKATDEIKKSDFIHNIRKKFKWSSSTIRTLLTDEVYIGNMVQFKSTTVSYKNHTVVWNDDETRIRKDNTHEPIIAKDIWYTVQERLENTARSCIGGTVHPLCNKVYCSNCNQIFTKTGNRRSDGTGYLCCKDKKTNWSNCDNKASIREDQLHQFILEKMNEMLKKFYEEDDLKEMQNEVIEQDLYKDKLNSLEKELQSINKELQGKSTYFQKLYEDRTNGILPEKEFLILMNKYKDDNEKLEERQKIVKKEISSTLAKKETVKTKKNIFKKYRHIEELSIEIVEDFIDKILIGSYDETTNSRDIKIIWNFTI

SEQ ID NO: 26389 - protein, 571 aa, synthetic construct
MMHDRTTPASTNRVAIYIRVSTTHQIDKDSLPMQRQDLIAYAKLMLNTDDYVIFEDAGYSGKNTDRPKFQEMMSQIRQGAFSHLLVWKIDRISRNLLDFATMYKELKDLGVVFVSKNEQFDTSTAMGEAMLKIILVFAELERNMTSERVTATMISRASNGQWNGGRVPYGYNYDYETKDFSINPIEAEIVRLIHDKYEEMRSLVRESRYLNEKGLRTRAGNLWNPVSLHIILHNIFYCGDYRYNVLKEGDRQKVKDESEWITVEDHHEPIISREQKERVIAMLDANKRLDRKRNTYKSEKYVHVFAGLLYCGNCGKPMGATPAAAKKDWQYSKYTCPTRRKLASACNGKFTSDPIVGEFVFNYVLNMLNVQKNFADIHSPEELQAALLIGNTFSYIDHIDEDGLNDLFNMLSSGKIKGTVFGKSAKLKKKKVVSELSKLRNEKQKIERALDRLTKLYLYAEDAMPESEFIIQKSKLTEALDEVNEQIGFSNTDEWNQSVSDEEFVRRASEFIIAQKLTDRNYVSYKRLATSVDTAVIKTFVQGIIDSIIMDAGQVKQIIFKNGLSHTFIFK

SEQ ID NO: 26390 - protein, 463 aa, synthetic construct
MTTKVERCAIYIRVSTTEQMMHGKSLEAQKEYLTNYAREHNMAVVGIYADEGKTARKELKKRKAIHSLLQDVEAGKIDVIIFWRIDRWFRNLSDFYKVQDILDSHNVRWISTSEPGINMETRDGRLQLNVVLSIGQNEVDTTSERIKFVNESSIRSGKLIFGDANMGYGYKSGIVDGQKRMIKDPDREHVVDAFYKYFFKHQNKCATLRYIQETYDPDFSFGIMRTLLSSEFYKGTYRGFPYCPAYLTEDEWNKLQKIQKRNVKATPSGRIYLFAGMIRCPVCGQLLCGTGCSSIINRKTGAKRTYCYYRCNRAMIDHICSYRHRLSQNLVENYLLDNLEDEYKNYKVKCEKIEKEKKKQKKKQSPEKLRKELDRLNFLFQKGRIDWDYYNEEYGRVESELNDLQNSLPEPAPNYSYLEELLNTDFKTMYDQLSQENRRAFWRSIIQEIHINEDSTITSVDFL

SEQ ID NO: 26391 - protein, 526 aa, synthetic construct
MPKVTMIPATINPLTHLPSVATRKRRVAGYARVSTDSDEQFTSYEAQVDYYTKFIQSKPEWEFVKVYTDEGISGTNTKRREGFKEMITDALDGKIDLIVTKSVSRFARNTVDSLVTIRKLKENGVECYFEKEGIYTFDGKGELLITIMSSLAQEESRSISENITWGQRKSFSDGKVHLPYKRFLGYEKGEDGRPAVVESEARVVKLIYGLFLEGKTQAGICKYLEELGIPSPGGKAKWSKTTVTSILQNEKYKGDALLQKKFTVDFLEKKMKPNEGEVPQYYVTGSHPAIIEPDEWEQVQAEFARRKTLGKAYSGKSVLSAKLVCEDCGAFFGPKVWHSTDQYRRTIWQCNGKFTSEEHCHTPALDTETIQRLFIKAYNLMMQDRVQIIKEIEAWRQKLMDFGTLDADIERQLEETQVVAELVKAAVKENASTAQSQEAYLKKYEALTERYEKAAAELERLQSLRISRSQQDKKMALYIRTLKKQPEVMHDWNDTIWTVMIEKAIVHRNGEVTFAFANGTEIKVGA

SEQ ID NO: 26392 - protein, 433 aa, synthetic construct
MPRAITIVPKPPKLEQKKRVAAYARVSSGKDAMLHSLSAQVSYYSDLIQNHDDWLYVGVYADEAKTGTKESRADFQRLIADCRAGKIDMVITKSISRFARNTVTLLQTVRDFKAWGVDIFFEEQNIHTMSGDGELMMTILASYAQEESRSASENQKWRIKRNFEGGMPWNGAMLGYRLKNGRYEIIPEEADLVRRIYDEYLSGDGYLTIAKRLNEDGIPSRFGKQWGQSVISKILSNYTYTGNLILQKTFRENHITKKTIINNGELPKYHAEDAHDAIIDMETFQAVQAEKTRRAARFLKKPAPKKAYPFTSLLVCDGCGKNYRRKVTKTGPVWVCGTFNSMGKAACASKQIPEETLQAATAEVLGQVDFSEELLRRLIKSILVCNGNVLIFRFFDGSEVTRIWKDRSRRQSWTDEMKATARQKALERRNQNA

SEQ ID NO: 26393 - protein, 684 aa, synthetic construct
MSILQTIKTIIRVVLYLRLSDEDKNKLSKEELSQSIKNQEIMLRDYAEEQGWEVVGVYNDDDWSGSDATRPDFNRMIEECKNGNVDIVLCKTQARFARDMELVEKYVHNLFHEWNVRFITVVDRIDNARKETKKTSQILGLTDQWYLEDTSLNIRETLKSKRKDGQLTSSFATYGYMKDPENKNHLIIDPISAEVIKRIYDEYLSGTGLDKIARRLNEDKILSPYEYKLLNGSKLKIPVIKDYVNYGYIEKTGTYMLDVSFTNKEEYILKNLVSFNYITTDMKNFNNKCDIVLKKYTNNRTKIYYSENDNIDINNFNIDDCILLNENDVIPKTAKVIISHTKELDRTHTINYQFEITLKENREHEDYYINICGKATDEIKKSDFIHNIRKKFKWSSSTIRTLLTDEVYIGNMVQFKSTTVSYKNHTVVWNDDETRIRKDNTHEPIIAKDIWYTVQERLENTARSCKSGTVHPLCNKVYCSNCNQIFTKTGNRRSDGTGYLCCKDKKTNWSNCDNKASIREDQLHQFILEKMNEMLKKFYEEDDLKEMQNEVIEQDLYKDKLNSLEKELQSINKELQGKSTYFQKLYEDRTNGILREKEFLILMNKYKNDNEKLEKRQKIVKKEISSTLAKKETVKTKKNIFKKYRHIEELSIEIVEDFIDKILIGSYDETTNSRDIKIIWNFTI

SEQ ID NO: 26394 - protein, 523 aa, synthetic construct
MRFFSYGRKSVFSDKSDSIDNQFRMNREYCESKFSGQVDSWQQFSDEDFTGANTSRPDLQRMLSFIKGGFCDVLVVYQLDRLSRDVRDFANIYALLEEHGVMFISIKENIDTTTPIGRAMMYVTVVFAQMERETIAARVTDNMLGLAKKGYWTGGNPPVGYVRKHIVVNGKKHCSIEVDPDGARYVTQIFDTFLAYNCSLQGMETRFKNQGIRTQNGKFFSTAQLHKMLTMPYCVEATPEVYDFYAAKGCIMDPGSPREMWDGSAGVIIYGRSTEKNKKHQLQPPEKWTVCLGKHKPFMPAEKWLAVQSRFTQNKCIKDAKWPVPLLKGVLRCKCGNLMQVSRKKKVDGTCSSWYYCRKRMRQGVDACDMGQIKCDLLDEEVLELFRGITADPALIQKFVKAEAPADVPDLKAAQARVSACERKIGRLAASLALAEDSAASKYIIAEMERLDVELGALKREASLAEMESHQAAASAKDAKATAAEIAKLIHGLDGFDDKEKNAIARAVIQECTWDGERLFIKL

SEQ ID NO: 26395 - protein, 434 aa, synthetic construct
MERVVERVDALIPAQPKALRVCAYARVSTGKDAMLHSLSAQVSYYSKMIQSHNGWMYCGVFSDEAVTGTKRERAGFQHMIEECRQGNIDLVITKSISRFARNTVTLLQTVRELKSLGVDVFFEEQHIHTMSADGELMMTILASYAQEESLSASENQKWRVRKAFENGEIINLRFLFGYDITPGGIQVNEKDAAIVREIFARFNGGESMSSICRDLDARGHKGVLGGTWCAERMRNTLSNEKYLGNALLQKRYRNNHIEKKLLPNRGELPMYYAEGTHEPIIDHATFDKAQERLRMLAQQAANRKKPTRSVFSGLIHCGLCGNTYKRVTYRKKHYWNCTTFQTKGKSECAAKRIPEETLEVLTCEVLGAVSFDPDMVRSKITAIRAEKNNVVVYCMDDGSEIVKRWKDRSRAESWTPEMKEKARQRALQARRKKE

SEQ ID NO: 26396 - protein, 584 aa, synthetic construct
MGKKQKTNGGDAVIYARYSSHNQRDVSIEQQVEACRKHAAELGLTVTATYEDRAISGKTDKRPSFQRMMRDAEQHKFAYVLAWKSNRIGRNMMQALVNESRLVDCGVKVFYAEEDFDDNAAGRFALRSMMNVNQFYIENMAEDVKRGLYDNAKKGLVNGSLPLGYKRGADGKPEIDEPKAAIVREIYTRVAAGELFASIADDLNARGIKTARGREWNKGSFHVLCHNDRYRGIYMYGDIRIPGGMPRIISDELFYDAQEAYSMKKDNRYGRARHGAENYLLTGKLYCGHCGGYMVGISGTSKTGEMHYYYACQKHRLEHTCEKKAIRRDVIENAVARAIMMYCLDDETIDFIVDSTIAYFKQKDHELHIEAMENELAAVQQAISNLMKAIEAGIITPTTRTRLLDLEEQQAKLSAKINTAKAERVEIDRDDLIAGLQLFRTGDIKNKKFLAKLFNTFLIAVYLYDDNRLKIVFSFTGNHNSVEIPLELDNDCPDSEIVSDETEVRMSHLECRKNLGSPPSSGEAEKGDDCSDGRFVRTAPLPPHKKRLHRTVSRLVEPFYVCLCSCFFTTFLPLLDDFGSVRNR

SEQ ID NO: 26397 - protein, 464 aa, synthetic construct
MARSVTVIPARSQKVRTGHKAVQEKKIRVAAYCRVSTDQEDQLHSFEAQVEYYTKYINEHENYEMAGIYADEGISGTNTKKREQFKKMIADCEDGKIDLVITKSISRFARNTQDCLAYSRKLKNLGIGIIFEKENINTLDSTGELLFTILSSLAQDESRNISENCKWGIRTKFKNGEMHLNTFKFLGYDKDENGKLVINKEQAKTVRRIYRDFLIGINPAQIAKELTEEKVPGCLGQIKWYPSTVIGILKQEKHMGDALLQKTYTADFLTKRQVRNNGEIAQVYVKDSHKGIIDKQTWNAVQEEFDRREKFMESHGTDRYSYGADCMPFCEKVFCGECKSLFTRHSWRSRGIVQWQCKNHRKDGKVACTNAYVDNADLEKGFVKAFNTLVMDRDKHMERWQQMKSDGTPLEKIRAGQMMEAVENEPLTRFVPEIAQLVLCEVTVLGAKKYEFFFLEGSRVKVSV

SEQ ID NO: 26398 - protein, 512 aa, synthetic construct
MNAVIYARYSSHNQTEQSIEGQLRDCYEYAKRNDLTIIGEYIDRAISGKTDERPDFQRMIKDASKRQFERILVWKLDRFARNRYDSATYKHKLKQYGVKVISAMENVGEGDESVLLEALLEASAEYYSLDLKKKIARGMRESALRGKFVGGTLPWWCRVDGDQKLTIIDERAVIVREAFMRYDSGEGAKSIVSDFAKRGLRSNRGVPVTLSWLLSILKNRKTIGEYTYNGIEIPGGLPAVVDKPLFDRVQARIARNRRTGGGEARAKTEYLLQGKLFCGLCGSPITAECGQNHKGVVYNYYACSLKKKKHQCKKANERKDFLEWYVVEQTLDYVLTPARTEYIASAIVAEYEREFDKSGIRVLEQKIALTEGEIQKTMDLCIQATTDAMRDRFMKRCEELDAKKTDMEIDLSKLRVAASIVYTKEEVCAWLRQFCTGDCFDPAFRRRIIDVFINTVYLYDEKLIIYYNLRDSRQVSYIEAIGASSEIENLLPVPDNKKSAAECSTADGDGGA

SEQ ID NO: 26399 - protein, 548 aa, synthetic construct
MSTGTELRAVFYARVSTEEEKQLNALEKQIQENKDVIRDHGWRLVGEYIDEGKTGTTTKRRNDYKRLLKDMTENKFDIVVCKDQDRLQRNTLDWYLFVDNLVTNNLKLFMYLDNKFFKPSEDALITGVKAIIAEEYSRNLSKKLNNSNKRRIERALNGEEVSAMGNGKSLAFKIVNGKWVKDEEEAKLGKKIFELYLEYDSIRKVRDWVNEHGYTNSVGKPFTSESISRILKNEKAKGVIVMGKYHHDFDKKKIVRRSEEELVRIPAPELAYVSEEVFDKVQERLRAKTGNGRGVNAYSDPLSGKIYCGSCGRKLWKHASNGYVNWMCASQVAKGDVECNGTRITTVAIRNIYKKITDNLEVNKGVVKQDIVKWLNELKATLSDTSVNEKIQKDLDKLERKRTKLLEAYLEDFISKDDYKAKYEAIEGQIEEKKKLLVPVEENEDIKVIESVLQNIDDEIDAYVKTLDMEESKVDFLIEHTKRITVLENRDIIIELDLVAGAIIAGKDFLLYVHDTMPQHHGPKHLHLSGPQTAPRCCFRDRFSCDQP

SEQ ID NO: 26400 - protein, 511 aa, synthetic construct
MNTVIYARYSAGPRQTDQSIEGQLRVCTDFCKQRGLTVIDTYCDRHISGRTDERPEFQRLIADAKRKKFEAVVVYKTDRFARNKYDSAVYKRELKRNGIQIFYAAEAIPDGPEGIILESLMEGLAEYYSAELAQKIKRGMHESALKCQSTGSGRPLGYRVDEQKHFQIDPESAQTVQTIFEQYIKGESNAAICELLNSRGLRTAQGKPFNKNSINRIIKNRKYIGEYRYHDIVVEGGMPAIISKDTFNLAQAEMERRRTRKAPKSPKAEYLLAGRLFCGHCKGPMQGVSGTGKSGNKWYYYYCGNTRGKNKTCDKKQVSRDRLERAVVDFTVRYILQEDVLEELARKVHAAQERQNDTASEIAFYEKKLADNKKSIANVLRAIESGAATQTLPARLQELENEQAVILGELSFLKGKHLAFTEDQILFALMKHLEPYPGESAQDYRRRIISDFVSEVYLYDDRLLIYFNISSEDGKLKSADLSNIEGSEFDEGLVSSTNDTNPAFAVFVLFF

SEQ ID NO: 26401 - protein, 515 aa, synthetic construct
MSTNAVIYARFSSDKQREESIDGQIRECKAFAQANQLNVIAIYIDRAMSARTDHRPDFLRMIKDSRSGAFDYVLVYQLDRFSRSRYDSAIYKHELKKNGVKVLSAKENITDSPTGIMLEAMLEGYAEYYSAELSQKVRRGMTENLLEHKWNGSPVPLGYALDANHRLVIDPDMAPHVKALFEMFLAGKSYAELARYLDKKHIRTVTGRKYTGPTVHNLMSRQLYTGTYTWGGQVIEDFCPAIISKSDFSRAALRMANRKRTAKDGIPMSVRRSPEYALTGIIYCGECGRTMTGYSGRGQNGDRYYYYRCNSNNNRCRQTEKIKCKNHPIRRNRLEDLVLQTTVNILSDKEAVAAIAEQVSRIKLENPYASELSNIKSRLADLKKRHDNSVKAIEAGVMSQAIMDNVCKYEAEMDNLKARQEKIKLATPSLQIDPVAVEYFLKSLLLNKKQHDKYRLDLFEAFIHRVVVYHDKVEIQYNYLPGHKLENPITTPLPGCSNLNKVVGPLGFEPRTNRL

SEQ ID NO: 26402 - protein, 536 aa, synthetic construct
MKRVYTLYRVSTTQQVDVIKDDIPMQRIACHEFAEKMGWTILKEKEEKGISGFKISANRRDAIQELKEAAERGEFDILLVFMFDRLGRIENETPFVLEWFANHGIEVWSVNEGQQKFEQHIDKLMNYLRFWQASGESEKTSIRVKTRMHQMTSEGIYTGGSIPYGFQLVYQGRKNKKGQDMRDLAICPEEAIVVNMIYDLVIDQGYGSHRLAALLNEKGYKTHKNAPFTSAYVLRILKNPLNRGVLTRGGVTSEPIPDLRIVTDVKFFRAAEILEQRSGKEEEKRQIAMTNRGQALLAGVIYCAHCGCRLATSRSKVQYTRVDGSEYFKSKGRYICYHKSRGLNDCDGKSVYDSDRIDDAVMEAMRQIFASITGCPEEAKIQQAQKRVVADLQLQQKKLLEQIDKDTKQLETLRAEIAKAIAGESFYTQEDLATAIRTIRDRIAEAQSDVEKLKQEETHKKMVSATIIPAYKQFRSWSVEFEEAPLEIKKTIATQLFSRVTVNKDYELTYEMNFTYRQFCEDWLSQTPVFSQKAVT

SEQ ID NO: 26403 - protein, 440 aa, synthetic construct
MIQKTITTIDALPQLERLIRVAAYARVSSGKDAMLHSLSAQITYYQNYIVSHQGWEFAGVYADEALTGTKDNREEFQRLIQDCKDGKIDLIIVKAISRFARNTVTLLETVRLLKSLKVNVYFEEQNLYTMSAEGEMVLTFLASFAQEESRSVSENMKWRIRKDFEQGLIWGSKPQLGYRVVNRHLVLVPEEVDLVKRIFSLYLDGYGFQAISNILNAEGHTSVNGCRWGKTAIDQIINNYNYTGDLLLQKTFRENHLSKRKKPNKGELDQYLVENDHEPIITREEFMMAQELKRQRAEHFNLRHERSKRNLFTGIMYCSVCGRKYRRKVQKERMWWVCTTFNSAGKSECDSKAVPEETLIELTKKVLGVQEVTIEIIAKRIQRIDVLRGNKLIFHLKNGKVIEETWKDLSRRNSWTPEMKEKARQRALAQHSRKAGNNNG

SEQ ID NO: 26404 - protein, 526 aa, synthetic construct
MAKVTVIPSKINPITLTPVGQVSKRRVAAYARVSTDSDEQYSSYEAQVGYYTNFIKGKPNWEFVKVYADEGISGTSTKRRDDFNEMINSALNGNIDLIITKSISRFARNTLDTISITRQLKAKGIEVYFEKENLWSLDDKTEFLLTIMASIAQEESRSISQNITIGKRWGMKEGRVSFAYKNFLGYKKVDGKIVIDEEQAEIVRLIYRMFLKEGRTCSGIAEFLKNNGIPTPSGKNTNWTKNNIYSILTNEKYKGDALLQKTYTADYLEHRLVRNNGELPQYYVENNHPAIIEREIWEMVQTELLRRSLIGAAYSGGSVFVSKLICGDCGKPYGKKKWHSTDKYAREIYRCNAKYNKGQPQCQTPNLTEEDVKAKFITAYNLVMCDKKQVIEDTLVVIELLTGTDELDLEIAERQARIEEISKAVALMVRENARTVQDQIAFAKRYEELTQQYELEKDALDKAVKEKAYKTGKATKMRAYLEAMKQADDYLEEWSVEAWVLMVETATVNRDKTITFKFVNGKEVRV

SEQ ID NO: 26405 - protein, 531 aa, synthetic construct
MNNREKNIGSLALKSAPRRIIIPAADQDLARPLRVAAYARVSSDSSDQLHSYAAQTAYFAKLINSDPNWTFVDVYADKGITGTSTEKREDFQRMMEDCRSGKIDRILVKSISRFARNTKESLAAVRELKSLDISVYFEEQNIDTAQATGETLTAVFSALAQKESEAISERMRHSYQMRMQRGTFSTHCAPYGYRLVKNWLEVIEEEAVIIRQIFDRYLSGISMEDIAKEITALGIPTKQNTPFWQVRSIQYILRNEKYVGDSLLGKTYTTLTLPHRKIENKGEGVQYFIEGSHPPIVSRTVFDKAQQLLSRKSAVIPPRAAAPHPLSRKIVCGHCGAFCKRKKTRGTAYWICQTHNKNSGSCPTMQIPETEIIEAFLRIYFTLKHHGDQVLTRLIQDLQAAKNGKLLWSEDIVELNKQIADIACQERLLAQLKQQAVVDPDIFIFQSNQLAEQRREAKLKKSRILRSEDDQTVQRTQELLDILEDGPDLLTTFDEALFSELVETITIQDNSTIRFRLINGLELPEHIERKK

SEQ ID NO: 26406 - protein, 551 aa, synthetic construct
MTESFPEKKIIVIPAKNESPQEQAKKRNLRVAAYCRVSTGDEEQLTSYENQKAFYTEKIMKNPEWTMVDIFADEGITGTSTCRRKDFLRMIRQCRQGKIDMILAKSVSRFARNTLDTISYTRELRSLGIAVIFEEQNINSIYPESEFLIALHAAFAQSESESISANVRWGKRQSIKDGKVTFQYKTLLGYEKGPDGNPVIIPEEAETVRRIFEWYLAGKSVRDIRLALVSGGFRNAVGTTDWTTSNLRSILTNEKYCGDALLQKTFVKDCISKKSIPNTGQLAKVLIQNNHEAIISHEMFDAVQLELARRRAQDGRSRKSAPTGRGKFSGKYALSGLLFCGECGTAYRRVVWTQHGEKRAVWRCTSRLDYGRKYCLNSPTLDEEPLQQAILSAINSVMSDHSALAEQLRDTMEQELAPVPGESMSLGDIDRAIADLGRQFTALLSEAADADDADGYTARFQSISTAMAEFKRRKAIIQQLRQEQDQANQRIQRVTMTLKSTSNRLTEWDDGTIYQLLEKVTVLSRERVRVTLRDGLEIEQAVEQPKRRKFA

SEQ ID NO: 26407 - protein, 464 aa, synthetic construct
MARSVTVIPARSQKVRTGHKAVQEKKIRVAAYCRVSTDQEDQLHSFEAQVEYYTKYINEHENYEMAGIYADEGISGTNTKKREQFKKMIADCEKGKIDLVITKSISRFARNTQDCLAYSRKLKNLGIGIIFEKENINTLDSTGELLFTILSSLAQDESRNISENCKWGIRTKFKNGEMHLNTFKFLGYDKDENGKLVINKEQAKTVRRIYRDFLIGINPAQIAKELTEEKVPGCLGQTKWYPSTVIGILKQEKHMGDALLQKTYTADFLTKRQVKNNGEIAQVYVKDSHKGIIDRQTWNAVQEEFDRREKFMQRHGTDRYSYGADCMPFCEKVFCGECKSLFTRHSWESRGIIQWQCKNHRKDGKVVCTNAYVDNADLEKGFVKAFNKLVTDREKYMEIWQQMKSDGTPLEKIRAGQMMEAVGNEPLTRFVPEIAQLVLCEVTVLGAKKYEFFFLEGSRVKVSV

SEQ ID NO: 26408 - protein, 559 aa, synthetic construct
MKTKKPAQKRENIIGVNYCRYSSHSQRDASIEQQMAAAQAYAAANGITIIETYADRAITGRTDDRHEFQRMLRDAERGKFECVIAWKSDRLGRNMLQAMQNEARLNAYGVICVYVEENFDDSAAGRFALRNMMNVNQFYSESMAENVTRGMRYNAENCMVTNGQLPFGYKVDSSLHYELDHPKDDIVREIFTRIANGEPIIDIYTDLNNRNILTGRGKPWTKSGFHRLLHNERYKGIYIYDDIRIENGIPRIVSDELFDKVQKVLKMKKNPSGRHRSTAEYLLTGKLFCGYCKSPMTGMSGKSKTGDIHYYYACAYKRANGAASCKKKTVRKDKIEFEIASKIKQRLNDPEVQEWFIDRLMERQERYHRIPELEILKSRQAEVNTSIKNLLTAIEAGIVTSSTKSRLEELEAENATLSENIRVLNELKNKHFTREQILNWFNSLQNGKIEDKQYQKQIFQLFLKKAYLYDDKITIVFDTAEFSGTDSEELELDLDNIDELIEEASSGQSVRLTSTLAHQKEKPPARRFFFLYFYLFTLLSSLFSTVSGRLFQIKDKREK

SEQ ID NO: 26409 - protein, 438 aa, synthetic construct
MEKVIERVQFHTHPWEKQQRVAAYARVSSGKDAMLHSLSAQVSYYSDLIQRQRGWLYCGVYADEAITGTKDSRENFQRLLDDCRAGEIDLVITKSISRFARNTVTLLQTVRELKDIGVDVFFEEQNIHTQSSEGELMLTILASYAQEESLSVSENCKWYWRQRMKDGHMVGLRRMFGYNIKRGVISVDPVEADIVRWIFAEYISGGSTLGIVRSLEGAGVPTVAGGRWNDSRVRDILKNEKYIGNALLQKKYVADHLTKRLVRNHGELAQYYVEGTHEAIIDPDTFEQAQQRMAENTKRCNVQKPTTARYPFSGMIVCGNCGKHFGRKTTHGRISWQCMTFQFEGKSACPAKQIPEPTLLAVCCQVLGINKFDERVFAAQIREIRVTAPNELEFAFSDGHTVTRVWKDRSRSESWTDEMKQAASERSKHLHENRRNGQ

SEQ ID NO: 26410 - protein, 528 aa, synthetic construct
MANTARAVTVIPPSKERFSQRSILQPQKRRVAAYARVSTDSEEQRTSYEAQVDYYTQYIQNNNAWEFVKVYTDEGITATNTRHRDGFKEMIADALTGRIDLIVTKSVSRFARNTVDSLVTVRKLKEKGVEVYFEKENIYTLDSKGELLITIMSSLAQEESRSISENVTWGKRKQFADGKVSFAYSRFLGYDRGEDGIPCINEAEAKTVVRIYRLFMQGKTACGIARMLTSEGVPTPAGKEKWQTGTVESILTNEKYKGAALLQKKFTTDFLQKKMKVNEGEVPQYYVENSHDPIIPPDEWQSVQNEIQRRKALGKKYTGNSIFACKVVCGDCGEFFGSKVWHSTDKYRSVVWQCNAKFKNEKRCRTPHLTEEVIKSRFVAAFNTLLTRREMLLDQCRLMQTALSDNSATDGKIAELQQELDIVGELIRKCIDENSRTVQNQQEYTSRYDGLVERYERIQKRLADLIDTRARNNVTADAIGAFMFELSERAMPIDEFNNRLWTSVIDHVTVYSDDRMQFAFKGGILIEG

SEQ ID NO: 26411 - protein, 668 aa, synthetic construct
MAYVRNKKKILKFWSKKKAALYVRVSTRYQVDKDSLPFQRKKLKEYCKFLGIEDFVIFEDDGYSAKNTDRPHFQEMMSRVRDGEFSHLIVWKVDRVSRNLLDFAAMYQELKDHKVTFISMNEQFDTSTAIGEAMLKIILIFAELERNMTSERVTGIMLDRAEQGLWNGARMPVGYRWNPEIKFPEPDPEETKIVQFIFDEYERVRSTTKIARYLNHNQIASKRGGQWTSKLIRDIIRNPFYIGTYRYNLRESGRGPLKPESEWIVRENNHPAIIAKEQFDRCNAIMDENGTSRDTSDLRARKYVHTFSGRLVCGKCGANMIASKDRARANGWRPSMYRCAQRSRMMDCDNSKTVNESYIGPFIFNYVANLARIQKNFKNIKTLEQLEKELLKGPEFENMKVSKESLRRTFDALAFQEVGKGAYLPDIGLSDGDDDYTAAEQISILKRELDKCKTAIDRLTDLYLYDPDSMTKEEFAKKKRDLVNKIAGYEKQIEASQATGDKDDLADLEFIRKASAFLVAQRIVSKKHVDYIQMALDLDNEILKDFVDQVIDRIEILEGRVQSIRFVNGLVHEFTYSTPADLPVCQKCGGRIGSTCGCRTRTFDFAGKPYRRIKVGDSGDKFHGAAGAVCPECSAQAGRWHHWKCGIERCPICGEQLIACEHGPNGKD

SEQ ID NO: 26412 - protein, 503 aa, synthetic construct
MGRKVTRVAFNAPEIPKKKNVAAYCRVSSGKDAMLHSLAAQVSYYSELIQSHGEWEYAGVYADEAKTGTKDTRENFVRLLSDCRAGKIDLILTKSISRFARNTVTLLETVRELKLMGVDVYFEEQNIHSMSTDGEFMLTILASYAQEESRSASENQKWRIKKNFEEGKPWSSTLLGYRNVNGRFEIVPEEAQTVRMIFDWYLEGLGATAIRDRLNAMGIKTRLGNQWSRSPILKLLRNYTYTGNLLQQRTYRENHITKKCIKNQGEKPMYLAEGSHEAIIDMDTFNRVQAEIKRRAEKYKSPDGKKSSETYPFTSMVKCSLCGKSYIRSGSAKYRTWTCQTRRKEGLTHCNAEIIPEEELIRLTAEVLGGEVTKDAVMDKITVIRAEKDRTLIFCFKNGKEIVKQWKEHEVVYVCTEEQKRQISLKNSGRKPSEEQRRRHSEWMKEYWKNREYPEEWRKKQSEKMKAYWNDPEASDAHRQTVSRLTKERRAREKEAGKGEDNG

SEQ ID NO: 26413 - protein, 526 aa, synthetic construct
MANVTVIPATRNFHTGIRKDAVVQKKTAGYARVSTDSEEQQTSYEAQVDYYTNYIKNNPEWEFVGVYTDEGISATGTKHRDGFNQMIQDALDGKIDLIVTKSVSRFARNTVDSLTTVRKLKEKGVEVYFQKENIYTLDSKGELLITIMSSLAQEESRSISENVTWGQRKRFADGKVSIAYSSFLGYQKGEDGQMEIVPEEAEIVRLIYRMFMQGKTPYAIAKYLMEKKIPTPTGKQRWQHRTIENILTNEKYKGDARLQKCYTVDFLSKKRKVNEGEVPQYYVEGSHDAIIAPAEWQMVQLEMERRRNMGRSHNCCGPFSAKLKCGDCGEFFGSKVWHSNSKYKRTIWQCNAKFKGESKCTTPHLYEQRIQELFLEALGRLLENRETIIDDCRAVMDVLGDCSSIEKELETVSGEMEVVTGLIQKLVVENATRKLDQNDYRRKYEGYVNKYAALESRMDSLKKDRESREIKFDIFSGFLFELSELEELPLEFDVKLFHSLVDYATVYHDGRIVFRFRNGTEIETII

SEQ ID NO: 26414 - protein, 437 aa, synthetic construct
MAENITKIAAKPSLISKKRVCAYARVSSGKDAMLHSLSAQISYYSKYIQSHTDWIYSGVYADEALSGTKDERPNFQRMLADAKDGKIDIIIVKSVSRFARNTLTLLEATRELKEYGVDVYFEEQKIHTLSSEGELMLSLLAGFAQEEARSVSENMKWRIKKDLSEGIMWGGKSHLGYELIDKKLVLIPEEAKIVKRVFQLFIEGCGIQKIANIFNKEGIQPKYSDHWYKSSVRHILSNVNYTGDLLLQKTYRESYLTKKKRINKGEQDQFLVENDHEAIIDKDTFNLAQQLLDERGVLPKSNYIKGNKSVFSSRIKCGLCGASYRHKTTRYKKIWICHTYDSEGKENCSAKQIPEDNLIKAINQYLGIDSFSEDAFNKKIDYITVFPGNVLRIKRVDGNEDDITWDDPKRSEGWTPEMREKARQRAKAQFKKKGAGE

SEQ ID NO: 26415 - protein, 524 aa, synthetic construct
MAKVTIIPSKINPITHQHLDVKVKRRVAAYARVSTDDEMQLTSYEAQVDYYTKLIKANDEWEFVKVYADEGITGTSLKNRKEFNAMIKDALDDKIDLIITKSVSRFARNTVDALTTIRKLKEKRKEIYFEKENIYTLDSKGEVLVTIMSSLAQDESRNISENVTWGQRKRFSDGKYNLARKNFLGYKKDQEGNIIIDEKEALVVRKIYRYFLDGMTPGGIAQSLMEEGVPTPGGKTKWIYSTITSILQNEKYKGDALLQKRFTVNFLEHKMKKNEGEVNQYYVKKGHPAIIEPVIWDRVQLEIKRREENKRVYSAKDAFSSKLVCADCGSYFGKKVWHSNDPYRKVIWRCNHKYDGEKKCNTPTLEEDTIKNAFLLAYNNLCVDKDIIIETTKELVDSLCDFEELDQRIIKESEDLDIIADKVHKMVMENANTAQDQEDYQKRYDYLSGKYNEGKDKLNALQEERARRATQKEILELKINELEDADVLEKWNESIFKMSVDEILVSKDELTFKFYIGEEIKIKL

SEQ ID NO: 26416 - protein, 608 aa, synthetic construct
MNTAANEYNYRFKLTDYALFDRNRARQVGIYGRVSTEHEAQLSALENQLQWYDDQVRYHPNWTVYDRYIDEGITGTQAKKRPAFLRMLEDARKGKFDLIVTREVCRFARNVVDTLVVTRELKSIGVEVYFIDDNIWTMDGDGELRLSLMATLAQEESRKTSERVKAGQKISRDNGVLYGNGNILGYDRVGDTYVINEEQAETVRMIFDLYLQGFGSMKIAQILTERKRKTATGLIKWSVSNIMRAIKNATYTGTKCYNKSRSNNFLEQKRINNLDMSTYEYVEGDFPAIVSQEIWDKAQAIRESRMKPALVSAEKTTHSKRDSRDIWVNKLRCSCGSSYRKNKWHTKLDGKTSYGYQCYNQLNNGIRRKRAEIGLDTEGYCDSRMITDWKLDFMAKALLEHLWQERKESVLIALDLIRHYYKEERTLDNKSDAASIQARIDKANSRLANLIAMRADGEISKDEYQSMRSPIDKEIKELQKALEDTPTNKCCPRGLDLEGIRSTLNSLIDFSGSTISHDVINQFVYMVTPTSDTTFDWYVNLNGTADVKATFTAEGRKKSCIIKLEEIEKISSLHRKENEDNAHLIKNPIVFAFLHRLLSQTSNPHRMY

SEQ ID NO: 26417 - protein, 548 aa, synthetic construct
MSTGTELRAVFYARVSTEEEKQLNALEKQIQENKDVIRDHGWRLVGEYIDEGKTGTTTKRRNDYKRLLKDMTENKFDIVVCKDRDRLQRNTLDWYLFVDNLVTNNLKLFMYLDNKFFKPSEDALITGVKAIIAEEYSRNLSKKLNNSNKRRIERALNGEEVSAMGNGKSLAFKIVNGKWVKDEEEAKLGKKIFELYLEYDSIRKVRDWVNEHGYTNSVGKPFTSESISRILKNEKAKGVIVMGKYHHDFDKKKIVRRSEEELVRIPAPELAYVSEEVFDKVQERLRAKTGNGRGVNAYSDPLSGKIYCGSCGRKLWKHASNGYVNWMCASQVAKGDVECNGTRITTVAIRNIYKKITDNLEVNKGVVKQDIVKWLNELKATLSDTSVNEKIQKDLDKLERKRTKLLEAYLEDFISKDDYKAKYEAIEGQIEEKKKLLVPVEENEDIKVIESVLQNIDDEIDAYVKTLDMEESKVDFLIEHTKRITVLENRDIIIELDLVAGAIIAGKDFLLYVHDTMPQHHGPKHLHPSGPQTAPRCCFRDRFSCDQP

SEQ ID NO: 26418 - protein, 668 aa, synthetic construct
MAYAKAKKHLKIWTKKKAALYVRVSTRYQVDKDSLPFQRKKLKEYCKFLELEDYVIFEDDGYSAKNTERPHFQEMMSRVRSGEFSHLIVWKVDRVSRNLLDFAAMYQELKDHKVTFVSMNEQFDTSTAIGEAMLKIILIFAELERNMTSERVTGIMLDRAEQGLWNGARMPVGYRWNNETKFPEPDPEEVKIVQLIFDKYEEWKSSIKIARYLNNNNFKSKRGGQWTSKLIHDIIRNPFYIGTYRYNLRESGRGPLKPESEWIVRENNHPAIIDKAQFDRCNKIMDQNGSSRDTSDLRARKYVHTFSGHLVCGKCGANMIASKDRARANGWRPSMYRCAQRSRMLDCDNYRTINESYIGPFIFNYIANLARVQKNFKNIATPEKLERELLKGETFDGVAGILPEGLNLTFQALSFRQVGNGTYIPDIDFLGDSDGASDRDQIELLKSEIEKSKNAVTRLTDVYLFDPDSMTKEEFATKKKELAKKIEGMERQLADLLDDSGNDDLADMSFIKKASAFLVAQRIVSKSFVDYVGMAQELDNEILKDFIDQIVDQIVVLDGRVQSITFINGLKHEFRYTAPAELPVCKKCGGRIGSTCGCRTRTFDFSGKRYQRIKVGDPRDMLHGKKNPVCPECFAQEGRWHHWNCKVETCPICGGRLAECEHGPNGKN

SEQ ID NO: 26419 - protein, 523 aa, synthetic construct
MPNTESFTVNEVLVYLRKSRSDSPDMSVEEVLRKHEEMIQQYASTHFCSPIPEKNIFREVVSGETIDSRPQMKNLLKMIESEQFKAVLVVEPQRLSRGDLEDCGRLINILRYTNTTVLTLTHSFDLQEEYERKFFEMEITRGNDYLEYTKRILKRGREASVAKGNYIGSVDPYGYKKTVIKKDGITCHTLEIIPEEADTVKLIHELYAYTPGGIGFTNIAHKLDAMHIKPKKAAHWTPAIISSILCNPLYLGMVRWNNRKVVKYINEGQLAKARPQNTEAKYYKGLHEPIITHELYNACMARRGTNPSLRRNKELCNPFAGLLYCGTCGHAMSLKIYKNHNSVSQMMLCNHQAYCHTKSVLYSAFLRRFMSSMEDTLNDFELAQKSDDGRAQAISKTIVVNLENKLKKLNEKDARQKDAYEDGIYSKEEFLKRNVRTQQDIASTIIALEDARAKKADIIDYEEKIRRFKDCLHALNDPELSAAEKNRFLKSCVDKILYYNNMESKAGIGRYIENVFSLEIQYK

SEQ ID NO: 26420 - protein, 502 aa, synthetic construct
MEIQIREGNSRQKRKLKVCAYCRVSTDADEQENSLENQIRHYEEVITSNPDYEYAGVYSDFAISGFKEKRPGLQKMLADARNGKIDLILTKSVSRFARNTSIVLEATRKLKELNVGVFFELQNINTMSGEGELMLTILAAFAQAESESGSVGAKMVYQRKYEAGIPVQYLERSFGFKKDERGVYIADEEEAAWVRKIYEMAADGYTPAAIKRYLNENGVKTVGGAEWIDSTVFRLIENEIYKGDYIMHKHFVNEERKLVRNRGEVDAWYIEDDHEAIVSPELWQKAQDALEAKRDYLAEGSVIEEFTEENYPYMNRIYCARCGYPLYKRIYSNGNRLNWGCSGTKRYGKSFCEGINIPDGVLRGAWHFNENMYIGEKPTEKGKKEFTYLKEASWKRRHKKKEPEPIPENTETEYPYREKIFCGSCGGRLVRHVNTKTHKVIWVCNGRKRKGKDFCDGTRVPDTIIKGWGEIKKDIYIQRKDDKNGKKRYSYTSKKPKGADRA

SEQ ID NO: 26421 - protein, 464 aa, synthetic construct
MARSVTVIPARSQKVRTGHKAVQEKKIRVAAYCRVSTDQEDQLHSFEAQVEYYTKYINEHENYEMAGIYADEGISGTNTKKREQFKKMIADCEDGKIDLVITKSISRFARNTQDCLAYSRKLKNLGIGIVFEKENINTLDSTGELLFTILSSLAQDESRNISENCKWGIRTKFKNGEMHLNTFKFLGYDKDENGKLVINKEQSKTVRRIYRDFLIGINPAQIAKELTEEKVPGCLGQTKWYPSTVTGILKQEKHMGDALLQKTYTADFLTKRQVRNNGEIAQVYVKDSHKGIIDKQTWNAVQEEFDRREKFMEAHGTDRYSYGADCMPFCEKVFCGECKSLFTRHSWRSRGIVQWQCKNHRKDGKVACTNAYVDNADLEKGFVKAFNRLVTDRDKHMERWQQMKSDGTPLEKIRAGQMMEAVENEPLTRFVPEIAQLVLCEVTVLGAKKYEFFFLEGSRVKVSV

SEQ ID NO: 26422 - protein, 464 aa, synthetic construct
MARSVTVIPARSQKVRTGHKAVQEKKIRVAAYCRVSTDQEDQLHSFEAQVEYYTKYINEHENYEMAGIYADEGISGTNTKKREQFKKMIADCEGGKIDLVITKSISRFARNTQDCLAYSRKLKNLGIGIIFEKENINTLDSTGELLFTILSSLAQDESRNISENCKWGIRTKFKNGEMHLNTFKFLGYDKDENGKLVINKEQAKTVRRIYRDFLIGINPAQIAKELTEEKVPGCLGQTKWYPSTVTGILKQEKHMGDALLQKTYTADFLTKRQVRNNGEIAQVYVKDSHKGIIDKQTWNAVQEEFDRREKFMESHGTDRYSYGADCMPFCEKVFCGECKSLFTRHSWRSRGIVQWQCKNHRKDGKVACTNAYVDNADLEKGFVKAFNRLVTDRDKHMERWQQMKSDGTPLEKIRAGQMMEAVGNEPLTRFVPEIAQLVLCEVTVLGAKKYEFFFLEGSRVKVSV

SEQ ID NO: 26423 - protein, 502 aa, synthetic construct
MEIQIREGNSIQKRKLKVCAYCRVSTDADEQENSLENQIRHYEEAITSNPDYEYAGVYSDFAISGFKEKRPGLQKMLADARKGKIDLILTKSVSRFARNTSIVLEATRKLKELNVGVFFELQNINTLSGEGELMLTILAAFAQAESESGSVGAKMVYQRKYEAGIPVQYLERSFGFKKDERGVYIADEEEAVWVRKIYEMAADGYTPASIKRHLNENGVKTVGGAEWIDSTVFRLIENEIYKGDYIMHKHFVNEERKLVRNRGEVDAWYIEDDHEAIVSPELWQKAQDALEAKRDYLAESSVIEEFTEENYPYMNKIFCARCGHPLYKRIYSNGNRLNWGCSGTKRYGKSFCEGINIPDGVLRGAWHFDENMYIGEKPTDKGKKEFTYLKEASWKRRHKKKEPEPIPENTETEYPYREKIFCGLCGSRLVRHVNTKSHKVIWVCNGRKRKGKDFCDGTRVPDTIIKGWGEIKKDIYIQRKDDKNGKKRYSYTSKKPKGADRA

SEQ ID NO: 26424 - protein, 523 aa, synthetic construct
MAKSVTTIPATLSRFTAAPINSTKKRRVAAYARVSTDNEEQLTSYEAQIDYYTNYINGRDDWEFVGVYTDEGITGTNTKKREGFKSMVADALAGKIDLIITKSVSRFARNTVDSLTTIRKLKEHNVEVYFEKENIWTFDSKGELLLTIMSSLAQEESRSISENCTWGQRKRFADGKVTVPFKRFLGYDMGADHNLVVNPEQAKLVKRIYGMFLQGQSPFQIARTLTEEGIPSPGGKDHWNPSNIKSILTNEKYKGDALLQKSFTVDFLTKKKKTNEGEIPQYYVKDNHEAIIDPETFEMVQTLMTTRTKGRNRKSSVSIFSSKVKCGDCGSWYGPKVWHSNDAYRKVIWQCNHKFDGQKCATPTLTEDEIKELFLRAANQVIDQKEQFIAIYEQVLSRSLDTTALEGELSELEAEINIAAELIEECIKENAHVAIDQAEYQKRYDALVARFDKAKARHTEVTDLIAERMARKHQIETYLKNLRSREPLTEFRETDWLAMVDYITVHSKDDIRVAFKDGTEIKA

SEQ ID NO: 26425 - protein, 590 aa, synthetic construct
MKTVEKIERKLPVLKARKRVAAYARVSMESERMQHSLSAQVSYYSALIQKNPEWEYAGVFADYGISGTGTKKREEFNRMLTECEAGNIDIILTKSIQRFARNTVDLLNTVRHLKDLGIEVRFEKENINSLSGDGELMLSILASFAQEESRSISENVKWGTIKRFKQGIPNGKFSIFGYEWQDDKLVIVPEEAEIIRWMYAEYMKGASRIEIGRALMDRGIYTRQGKPWVDSNVKVILTNITYTGNMLFQKEYCEDPITKHRRKNYGELPQYFVEDTHEAIIPMDEWQAVQDEFKRRRDLGPFGNKSLKLSAFSTKITCGCCGKHYRHSGKRNTAGEVYYIWTCQTKSQKGASACPSKNIPEKMLQNTTAEVLGLAEFDEDAFSQQVKEVIVIGDNTLTFRFYDGHEVTAKWQSTAKTDWWTDERRMLWGERHKRKDTNPNKHLFYEFTGFIKCGCCGANYRCQSGKRKDGTPTRSWYCTGPKDQCHNPGIRDETMKRLVADVLGLDEFDEAAMDARIENATILDHTVTFHFRDGHTESRDFLDKRHGTPWTEERREKARESMKAAWTDERREAMSERIKKIRSEKKWPNP

SEQ ID NO: 26426 - protein, 496 aa, synthetic construct
MPKADKQPVKAVIYARYSSDRQREESIEGQLRVCEDYARRNNITILHTYADRAMTGRSDQRPEFQMMIRDAATMAFDIVLVYKLNRFARNRYDSARYKHKLKQYGVRVVSAMENITDDPSGILLESVIEGLSEYYSVELAENVTRGMTENALEGKWPGGIVPLGYKLDEHHHLIIDKAKAEIVRKIYHLALEGHNQKYIIDELNSHHYTNSAGGLFSYNTLRTILKNERYTGVLVWGNVRKENALPVIIDKMTFEAVQKHLQFRKKNKIRSCNEDFHLTGKLFCGQCGSKMVGISGTSKGGSIYYYYACTSHLKKKCQAKSIRRDILENLVCEVTTRILSSPEAIKAIAKQAIKMQKEKKESLEIQSFKAQIADISKKLKNCIKAVENGLVSDVMINHIKDYEKRLEGLKEEVTRLKLLEGTTELTEQHIEFFFWSISQKIKTADRYKSILLSSIVRSVVIQDGYIEIQYNYKNELPILQNPVKVESSYLNQMVTR

SEQ ID NO: 26427 - protein, 599 aa, synthetic construct
MRKINKIEPRLPLLPTRKKVAAYARVSVETERLHHSLSTQVSYYSELIQANPEWEYVGVYADDGITGTKASKREEFQRMLDDCEAGKIDIILTKSISRFARNTVDLLETVRHLKELGIEVRFEKENINSLSGDGEVMMTLLASFAQEEITSLSNNVKWGVRKRMEQGIPNGHFRIYGYRWEGDQLVIEPEEAAIVRRIFQNFLDGKSRLETEREFEAEGITTANGCRWVDSNIKVVLTNITYTGNLLLQKEFIEDPITKRRKKNRGELPQYYVEDTHEAIIDMETFQYVQEEIARRKELGAFANKSLNITCFTSKLKCSKCGSSYVRNQRSNRTKYTSTYGDTIVVWVCGTTKKKGGRCSRKDIPERVLREACAEALGLTEFDEDVFLEKVDYIMVNPNCQLEFHFYDGTTKVQTWKSTAKKDCWTDEQKDRQREWMRRNMATSSRFSPFTTRVVCGCCGSSCRRQTQPSKLSETGKIAYWRCSGGAKTNCGIKGIREPELMEITAQVMGTPEFDGEVFRERVDHITMVESGKLEYTFLDGHTQEAEYSTEKPIHPWSEEQRAKFKESVKGSYTPERRKAMSEHMKKVRSEKHWASKRK

SEQ ID NO: 26428 - protein, 505 aa, synthetic construct
MTKNAVIYARFSSDKQREESIDGQIRECQAFAEANEINIINTYIDRAMSARTDQRPSFLQMVKDSAKHLFDYVIVYQLDRFSRSRYDSAIYKHRLKKNGVKVLSAKENIKDDPSGILLESVIEGMAEYYSAELSQKVKRGMTENLLEGKWIGGIVPFGYELTSENKLAISPATGHLVPEIYDKYLSGIKTTDILSKLNSLGIKTQRGCNFTRNSLNRILKNQIYTGTFTWAGTSYPDYAPALITQEQYTAMQNLFESRRRKSNTARRVSPQYALTGKIYCGTCGLPMTGYCGKSHTGTTYYYYQCSSKNNKSEKAARSQIACDAKNISRDKLEKLVLDTTISILKNKDAVKCIADQCMTIQKAELEHKPAEQLRLESQIKEIEKRLKNSVKAVENGLISQTITNNIETYEKQLTELNAQLDGLKLETHIIPITEEAVIYYLNQLTERANKKDGYSLDTFDDFIRRVVVTGKRVDIYYNYTAVPNILKNPAVKMLRGSSEDYLVTR

SEQ ID NO: 26429 - protein, 515 aa, synthetic construct
MSTNAVIYARFSSDKQREESIDGQIRECKTFAQANQLNVIAIYIDRAMSARTDHRPDFLRMIKDSRSGSFDYVLVYQLDRFSRSRYDSAIYKHELKKNGVKVLSAKENITDSPTGIMLEAMLEGYAEYYSAELSQKVRRGMTENLLEHKWNGSPVPLGYALDANHRLVIDPDMAPHVKALFEMFLAGKSYAELARYLDEKHIRTVTGRKYTGPTVHNLMSRQLYTGTYTWGGQVIEDFCPAIISKSDFARAALRMANRKRTAKDGIPMSVRRSPEYALTGIIYCGECGRTMTGYSGRGQNGDRYYYYRCNSNNNRCRQTEKIKCKNHPIRRNRLEDLVLQTTVNILSDKEAVAAIAEQVSRIKLENPYASELSNIKSRLADLKKRHDNSVKAIEAGVMSQAIMDNVCKYEAEMDNLKARQEKIKLATPSLQIDPVAVEYFLKSLLLNKKQHDKYRLDLFEAFIHRVVVYQNKVEIQYNYLPGHKLENPITTPLPGCSNLNKVVGPLGFEPRTNRL

SEQ ID NO: 26430 - protein, 523 aa, synthetic construct
MAEKTITVIPARKRVGSRRQVTEEKPKLRVAAYCRVSTDRDEQESSYEAQVEHYTEFIDRNPEWQLAGIYADDGISGTNTKKREEFNRMIEDCMASKIDMVITKSISRFARNTLDCLKYIRKLKEKNISVYFEKENINTMDAKGEVLLTIMASLAQQESQSLSQNVKLGLQFRYQAGKVQVNHNRFLGYTKDDEGNLVIVPEEAEIVLRIYREYLEGASLFQIGQGLEVDGIKTAAGNNYWLQSTLKKILTNEKYIGDALLQKTYTVDFLNKKRVANNGIVPQYYVENSHPAIIPREKFMKVREEMYRRAHMECGSDQKRRIYSSRYALSSIVYCAHCNDIFRRINWNNRGCKSTVWRCLSRVEKDRPSCTARTVKEELLHEVVVRAVNEVITGSASFIPALQTSFERCLGDSNSAAVEEIDACLLELQQELLKLANAKQNYDALADEIDELRAEKEELLLQEANKDGIRQRMADMVAFLQSEPEEVTEYSESLVRRMVEKITVFDDHFVVEFKSGIEITINE

SEQ ID NO: 26431 - protein, 525 aa, synthetic construct
MKRITKIEGNTILLNAVRKTRVAAYCRVSTGSDKQLLSLETQKGHYERYIKAHPDWEYAGLYYDLYYDQGITGTKKDKRPALMQMVADCEDGRIDRVITKSISRFCRNTTDCLELVRKLLGLGIPIYFEKEDLDTGSMESELMLSILSSLAESESVSIAENSKWSIRRRFENGTFKLAYPPYGYNYIGDGEWAINEEQAKWVRFIYSETLSGKGSDAIAAELIELGAPTKKGGKWTSTSVRGILSNEKYTGDCIFQKTYTDERFNRHTNYGEMDQFYMEGHHDAIVSHEDFDAVAALVEQRAKEKGITRGDSKYQARYPMSGKVFCGECGSPLKRRMNYSTHIQYPALTCSGHLKDKNSCSQKFIREDALQMAFVTMMNKLIFAHKEVLQPLFSSLRSISQKDAVSRLSELDERLAKNAERQNTLTTLMTRGYLDPALFTQESNDLLTEAQALTEEKEHLVFSVNGETKKAGKLADLIRFCNRGEMLTEFDGDCFSQFVERVVIHERITAAFDLKCGLTLKERIR

SEQ ID NO: 26432 - protein, 597 aa, synthetic construct
MANKVVKVIPARPQGIIIDQAGVIKRKRVAAYARVSTEKDEQTNSYEAQVNYYTNYIQANPEWVFVGIYSDAGITGTSTKKREGFKRMIDDAMNGKIDLILTKSVSRFARNTVDSLVNVRKLREKGVEVYFEKENIYTLDTKGELLLTILSSLAESESVSISQNTTWGQRKRFADGKVSFAYSNFLGYDMGQDGKLHINEEQAKVVKRIYEEYLLGYTPSYIAKRLTADNIPTPQRKKVWYQGVIDSILTNEKYIGDSILQKTFSTDVLTKKRKKNEGELPQYYIENNHPAIITDEIFEMVKEEMARRKSAGLMTNVSCFSGRILCGDCGGYFGRKVWHSNQPNRTIVWQCNKKFSNPDACGTTSIKEKAIEEAFVRAFNEMFSRKDEIIENYKLCIDVICDDSKFQERKNELDKALEEKTIVIKDFLLKCSKTEENIEESNTRYDVLIKEFEALNAERQKCLDMISSPAAKRVKINSFLNILNSTEGVINSFNEVLFQKSVNHMVINHDLTIDVIWRDESKTTTYIERGVKEVKKSAPRIKPEKVLSDHTCLCCGKQLYITPGKVQRIFCNKKCGETYRRAKAKEARLENNMISHA

SEQ ID NO: 26433 - protein, 430 aa, synthetic construct
MKKIVKDITPELRANDTINRVAVYARVSCEKDTMVHSLKAQIDYYRKFIMKNPGWKFAGIYADEGKTGTKEAREQFQALLTECRNGNVDMIITKSISRFARNTVTLLSITRELKELGINVYFEDQKMDSMSSDGQLMLTLMAGIAQAESKDCSDAVKWRIRHGYEQGRASSFKILGYRWDDGNVVMVPEEAPLVKRIFDLYLSGKGANAISKILNSEGVTAAGITKWAPTTIRNVLMNEKYYGDLLLQKSFVEDHINKRKVINNGELPQYFIEDDHEAIIDRQAMSDVKNEIAIRRARFYHGQGKESCLTSKIKCPYCHSNYHRKKINGVSKWSCATSNRKGKSMCPKSKDIREDVLLAILAHQLGYKDFDEKLFAEQVDYIECFDDHIITHFYDGSIKNSKWSNPSRKDSWTDDMKEKARQRGLNQYGK

SEQ ID NO: 26434 - protein, 459 aa, synthetic construct
MNNTHFYSHYTSIEYKTCALYVRCSKEEQAKFGDTIEAQKADLKEFAKQHHLKIFDIYVDEGYTARKKYNKRKEFMRMLEDVELHKFQYIIFTKLDRWFRSISDFYKIQEILDNNGVTWLTALERYEMETTNGKLNVNIRLSVAQDEADRDSDRIKDVFRLKVKKGEAITGSLPIGLMIGENGKVDINPDTVQIAYDMFDYFETHNSKRGTLLYLIDKYDRYFCYETVARALRNPLYKGEYRGNSNYCPAIIEPDRFNRIQKLSVRNVKKRKNNRYYIFSGLAECKECGHALVANTIIQRRYNREYTNYRCNYYSNSHLCNHSHGINEKKIETYLLNNIKPELEKYVADYELKQKITSKKTDPSKIKNKLQRLQELYINELIDLDDYRASYNQYKKELDEITSDTIPVKKDLSSIRSFLNLDIQNIYDSLTPQERRALWGSIIDKLIISNDEDIEIIFL

SEQ ID NO: 26435 - protein, 597 aa, synthetic construct
MRTITKIESTMPEIKKRKKVAAYARISMESERMNHSLSAQISYYNDLIQRNPDWEFAGVYADNGISGTSTAKRDEFRRMITDAEQGKIDIILTKSIQRFARNTVDLLETVRHLKNMGIEVRFEKENIYSLSGDGELMLSILASFAQEESRSISENVKWGIRKRMKEGMLTANGHFNIYGYKWEGDELVIVPEEANVVKRIFQNFLDGKSRLETERELEAEGIRTRQGCVMRDSNIKKILSNITYTGNMLFQKEFISDPINKKRMKNRGELPQYWVEDTHEAIIDLETFQYIQDEMERRKQLGPLANKSLNISCFTGKIKCPYCNQSYMHNTRKPRTPNARRLEFWVCGSRKKKGGHCEVGASINQENMKKVLSEVLGIDEFDDEVFLEKIDFINVPKQYTLEIHFKDGDVITKPCRNTGHKDCWTKEYREKVSVQRRKKNTNPKGASVFTSKLKCRHCGCNYRRCTQPSATSKDGKFYYWRCSEKNDCNAKGLREDFLKPQLAEALGMEEWNDESFAEKVEHIDIDGYMLDIVGKDGSVTSMNFKPPERGGIHCSEKQKEHMRKLMKERWTPELKQQMSDYMKKLRKERGEAWRKEK

SEQ ID NO: 26436 - protein, 527 aa, synthetic construct
MAKRKVTTIPATINKFTAKPVDSKKKRKVAGYARVSTDHEDQLTSYEAQVDYYTNYIKGRDDWEFAGLYSDEGISATNTKHRDGFNQMITDALAGKIDLIITKSVSRFARNTVDSLSTIRKLKEHSIECYFEKENIWTFDSKGELLLTIMSSLAQEESRSISENVTWGQRKRFADGKVSFAYKRFLGYDKDSDGNIVINEVQAKTVKLIYKLFLDGLTMHSIANELTKRGLKTPAGKDKWSQSTVRSILTNEKYKGDALLQKSYTVDFLTKKTKINEGEVPQYYVENNHPAIIDPELFDLVQTEIQRRGKGNARYSGVTIFSSKVQCAECGGWYGSKVWHSNDKYRRTIYQCNNKFRHKTRCSTPHLTESEIKDFFVKAMNQLITEKSEILENLQLIRTTLCDREDLIKQKESLGEEIAVAVEMTQNIVAENARMAQNQDEYNKRYNSLVERYEKLKKEYDNACAVISEKDAKYEQMGRFITVLNDQSEFISEFDEALWGSLVEKIVVKSKDDVMVVFKDGTEIKAE

SEQ ID NO: 26437 - protein, 526 aa, synthetic construct
MPKVTMIPATINPLTHLPKVAAQKRRVAGYARVSTDSDEQFTSYEAQVDYYTKFIQSKPEWDFVKVYTDEGISGCNTKKRDGFNSMVSDALAGKIDLIVTKSVSRFARNTVDSLVTIRKLKENGVECYFEKEGIFTFDGKGELLITIMSSLAQEESRSISENITWGQRKSFADGKVHLAYKRFIGYEKGEDGRPTIVESEAKIVQLIYRLFLDGKSQASICRYLEDLGIPSPGGKDKWSKTTVTSILQNEKYKGDALLQKSFTVDFLEKRMKPNEGEVPQYYVEGSHPAIVDPDEWDHVQTEFARRKALGRAYSGKSVLSAKLVCEDCGGFFGSKVWHSTDRYRRTIWQCNSKFKGEERCHTPTVDTETMQRLFIQAYNRIMEKREQIIKDCETMRRALTDFAALDAEIERQLEETQVVAELVKAAVKENASTAQSQEAYLRKYEALTERYEKAAAELERLQNLRTTKSQKDKAMALYIRTLKKQPVVLREWSDTIWTVMVEKAIVHRDGAITFVFYNGTETKVGA

SEQ ID NO: 26438 - protein, 433 aa, synthetic construct
MSGRITTVSKPPKLERKKRVAAYARVSSGKDAMLHSLSAQISHYSELIQRNGDWLYAGVYADEANTGTKDSRADFQRLIADCRAGKIDMVITKSISRFARNTVTLLQTVRDFKAGEVDIFFEEQNIHTMSADGELMLTILASYAQEESRSASENQKWRIKRNFEEGMPWNGAMLGYRLKDGRYEVVPKEAELVRRIYNEYLAGDGYLSIAKRLTEEGVPSRFGGKWNQSVVSKILSNYTYTGNLLLQKTFRENHITKKTVINHGELPKYHAENTHEAIIDMETFHAVQTEKARRAKRFNKKPAPRTTYPFTSLLVCDICGKNYRRKTTKTGIVWVCGTFNTLGKSACASKQIPETTLQQVTAEVLGVKAFTREQLHSRIQSIRVCNGNILVFQFQDGSEVTRRWKDRSRAESWTDEMKEAARKKALERSKHNA

SEQ ID NO: 26439 - protein, 512 aa, synthetic construct
MSEARAYMPKVTVVPATLNRFTAAPIHSTRKRRVAAYARVSTNDEEQANSYEAQVSHYTRHIQENPEWEFVSVYADKGITGTSTKKREQFNDMVQDALAGKIDLIITKSVSRFARNTVDTLTTIRLLKEHGVEVYFEEQNIYSLDSKGELLLTIMSSLAQEESRNISENVTWGMRKRFADGIPEIVPEEAATIKLIYRLFMEGKSPAYIARFLSSCNIPSPAGRPQWRPETVKSILSNEKYKGDAILQKTFCTDFLTKKMKVNEGEVPQYYVEHSHPAIVSREMFEAVQAELAKRKKPGRRNYTPHCFSGRIFCDECGALYGSKVWNSGTKYKAMVWQCNNKHLNHTRCSTPSLRNETIEDGFVMAINRLLKNKDELIRVCEKVMSKRCDTSGLEEEKARLQAELEVTCGLMERLIAMNAATAMDQDEYNRQFAEYEARYNETRRCIADVESEQKQRIAKRGKLTEYLETLRNQGLISSFNETLWYGTVEQVRVTTEGNLRFIFRDGQEITV

SEQ ID NO: 26440 - protein, 528 aa, synthetic construct
MSGRNVTVIPATLNAVRRIDPVVKKRRVAGYARVSTDKDEQFTSYEAQVDYYTRFIMSHPDWEFVKVYTDEGISGLGTRKRDGFNEMIADALSGTLDLIVTKSVSRFARNTVDSLVTIRKLKEKGVEVYFEKENIYSLDGKGELLLTIMSSLAQEESRSISENVTWGQRKRFSDGKITLPYKQFLGYDHGPKKDDPPVVNQEQAAIVRRIYRDFMTGKTVGAIARELTTDGIPSPSGKPKWSASTVNSMLQNEKYRGSALLQKCFTTDFLTKKRKVNEGEVPQYYIENSHEAIIDPLEWDAVQDEIKRRKAIGRAYSSKSIFGAKLKCGDCGGWFGVKTWHSTDRYRTSIWQCNCKFDKGKDRCKTPHLTEEEIEARFIAAYNSMLTDKSAYLLGCETAREFLMDTTDLDTEMEELLRELDVIAGLIRKCIDENSATAQDQTEYTSRYNAYVDRYEKAKARYDSLAANRQDKLAGAKAVERFMAVLDERDDPLTEFDRHLWIMTVDYATVHRDGTITFRFYDGTEITK

SEQ ID NO: 26441 - protein, 426 aa, synthetic construct
MERIIEKRFIGGPKQPKATRVAAYARVSSGKDVMLHSLSAQISHYSETIQSHPGWLYAGVYSDEAKTGTKENRPGFQNLMRDCRAGKIDLVLVKSISRLARNTVTLLETVRELRSLGVDVYFEEQNIHTLSYEGELMLTILASYAQEEALSVSENQKWRVRKNFEDGRPWNCTMLGYRIEDGTFVIEPDEAAIVRRIFSMYLDGMGIQSIVNTLNAEGIRTRYGREFNHSGMQKILRNYAYTGNLLLQKTYREDCLTKKDYVNRGQRPQYHAAGTHEPIISPEDFERVQAELKRRAEVYCPEYQPASYPFTSLITCAICGKHFIRKHTRTGPTWICGTLKQKGKAACPSKQIPEATLLKITEEIGLSRITGITADNGNRLTLYLDDGSIIQKTWLDRSRSESWTDEMKKQAAKHAKKRYTGCQEEM

SEQ ID NO: 26442 - protein, 581 aa, synthetic construct
MARKRTNLIGNTPSVRETKVAIYIRVSTIHQVDKDSIPMQKKDLIAYCQLILGTDNYEIFEDAGYSGKNTDRPAFQNMMGRIRKGEFTHVLVWKIDRVSRNLLDFAEMYEELRSLRVTFVSKNEQFDTSTAIGEAMLKIILVFAELERNMTSERVTATMISRANSGQWNGGRIPFGYSYDPKEKVFSIREDEASICRELKDLYLLNRSLVYVSRALNEKGYKTRAGANWSPHSVWIIASSPFYAGIYRYNRYKGVENRTINPEKEWVMIQNHHPAIFTLEEHHTMQSLLKSNQRNMDNLPGRIHTSEKTHIFQGLMYCDKCGSKMVSTPGRLHVDGYRASNYSCPLRRNTKKCNNPTINDIIVGEFVINYILNMLNAKKTFSTINTPDELNTALLSGSVFSEVSSVEENGLNSFFNLLSRYGSDRSYIFSVKSPRKKKAAVDPELSKLRKEKEKQERALQRLQNLYLYSETSMSEKDFIIRKSEISSHLDNINRQLGLMTQDQASFLSDEEFIKQASHLLIQKELKNKKYIYFKKLVSTVDPDILKAYMETILDSIYTADGKITAITFKNGLTHRFIYKDK

SEQ ID NO: 26443 - protein, 440 aa, synthetic construct
MNVVLRAALYPRVSTEEQKKFGLSIHDQQNDLEEYAKAHNMKVVGVFQDAGFSARKKIEKRPAMLQLLEAVKRDEVDIILVTKLDRWFRNIGEYYKVQEILEAHNVSWKTIYEDYDTSTAAGRLKINIMLSVAQDEADRASERIKKVLDAKKDRNEVCTGHLPKGYKIEKKFAVIDKETEPVIRRYFSTFLETGSITKAMDAVPELKLKYQTASQMLDNPGYMGDWHGIKLPPYLTPQEFQRVQGLRTRVTRKSPYNRTYIFSGLIVCGECGRRMTGHPSPRPSGACSYSYYCQGSAQRKGCNNGNFTVEWKIEDYLLSTIDEQIQIKLQAKPRQEPKANQDVQLKALQKKLSKLSELYIDDMISKADYSKKYAELTSQMDELTQVKSQSRAPEEIATLFSAGWQEIYKQLNKENKQAFWKLKIKEIRLYKDRRIEFDFL

SEQ ID NO: 26444 - protein, 434 aa, synthetic construct
MERVVERVDALIPAQPKALRVCTYARVSTGKDAMLHSLSAQVSYYSKMIQSRNGWMYCGVYSDEAVTGTKRERAGFQHMIEECRQGNIDLVITKSISRFARNTVTLLQTVRELKILGVDVFFEEQHTHTMSADGELMMTILASYAQEESLSASENQKWRVRKAFENGEIINLRFLFGYDITPDGIRVNEKDAAIVREIFARFNGGESMSSICRDLDARGHKGVLGGTWCAERMRNTLSNEKYLGNALLQKRYRNNHIEKKLLPNRGELPMYYAEGTHEPIIDQATFDKAQERLRMLAQQTANRKKPTRSVFSGLIHCGLCGNTYKRVTYRKKHYWNCTTFQTKGKSECAAKRIPEETLEVLTCEVLGEGSIDSDMVRSKITAIRAEKNNVVVYCMDDGSEIVKRWKDRSRAESWTPEMKEKARQRALQARRKKE

SEQ ID NO: 26445 - protein, 528 aa, synthetic construct
MNRTAARSVTVIPPTINPLTHLSRVAVQKRRVAGYARVSTDSDEQFTSYEAQVDYYTQYIKRNPEWEFVKVYTDEGISGTNTKHRIGFNEMIADAMSGKIDLIVTKSVSRFARNTVDSLVTIRKLKEKGVEVYFEKENIYTFDGKGELLLTIMSSLAQEESRSISENVTWGQRKRFADGKVNLPYKQFLGYRKGADGFPEVVPEEAIVVHRIYTRFMEGLTPGAIAKELTADGIPTPSRKQRWQTSTVESILQNEKYKGAALLQKCFTVDFLTKKRKVNEGEVPQYYVEHSHEPIITPEEFDKVQTELARRKQISRQYSGKSIFSSRIVCGDCGSYFGSKVWNSTSKYRRVIWQCNGKFKGEHKCETPHLDEETIKARFVTALNAIIESKDNILEDCRLMQATLTDCTGIDTEIETLLEEIEVVTELTKRCIAENSQTAQNQEEYAARYNGFVERYEKAKARLEQLRATKAAREAQAEAIGAFMFEVQELDALTEFDEKLWLTVIDTVTVHADGRMTFKFQGGTEIEG

SEQ ID NO: 26446 - protein, 536 aa, synthetic construct
MKRAALYARYSSDNQRHESIDAQLRASREYCASRNYAIVRIYTDEAISGTSVVRRDAFQKMILDSGDDIFDVVIFHKIDRNARDEIDYYTNVDRLRKNGVTYEYSAEGIDVSTTNGKLTEGIKVAVAAWYSRNLATEVKKGQKENALKGIFNGGRPPLGYKIVNQRYEIEPREAEAVRLIFDMYIHGNGYVKIASELNRRGFTTRNGKPFVKNSLYEILGNERYTGTYIFNRICTDEFGRRNNHKINPDAIRIENAIPAIIDKETFKIVGELRARNKNCSSRFRAVETYLLSGKVKCALCGSPMNGHRVKCKTGTYSYYCCSKTRLPKDVKCAQKLISKTALEKKVANVIMERILSESERPKLFEEMKNYYQMLIGHSEKERHTLNIAKAAAETKLSNLYALVEAGNVIDKFDIMRIQKVKAEITDITNQLNNIPKTTNLKLPDEGTFNKILKEMHSALLRDDKEVMEMIINIFVSEVEIGPNYVHIYIETKGPPIFSAKHGSLHLHHSYGYTLIKCRIPRTILCKTLHLNDVVIL

SEQ ID NO: 26447 - protein, 526 aa, synthetic construct
MLYELSPSDISRIIIYLRKSRSDDPCMSVSEVLSKHETILQEYAASAFGSKIPEEHIFREVVSGETIADRPVMKEVMKLLETGSIKGVLVVEPQRLSRGDLEDCGRIVNIFRYTNTLVLTPPKTYNLSDEYDRKFFEMELTRGNDYLEYTKKILNRGRVASVKQGNFIGSVPPYGYKKVQIGTGKTAYHSLAIIPEQADAVRLMYKMYIAGNGFTSIAKKLDDLGIKPLKSAYWSPAAISDMLENPVYIGKIRWNWRKTEKKMIDGQIVKTRPKTTDVSEWVYVDGKHESIIDQATFDAAQERRGKTPKVKKYTELKNPFAGLLYCGTCGKAMSLKIYTQKNGSKCEMMLCNKQSWCKTKSVKYDTFVDRVIKTLENTIADFELKLENDNSSADDFQKDIIRNLENELKRLKDKDARQKDAYEDGIYTKEEYASRNAKLQEEIAKASDALEHARTSVPVSIDYQEKIAKFTDCLYALKDPDMSATEKNILLKSCIDKIVYHNNMESKPGIGRYVENVFTIDVFLRL

SEQ ID NO: 26448 - protein, 565 aa, synthetic construct
MTKLKKAALYIRVSTRYQIDKDSLPFQKQKLIDYCEFMGIKDYEVYADEGFSGKNTDRPSFQRMMSELRNGDISHIIVWKVDRISRNLLDFAAMYTELKKYRVTFVSMNEQFDTSSAIGEAMLKIILVFAELERNMTSERVTSIMLNRAEHGQWNGARMPMGYKWDDKIKFPVPDEEESKTVQFIFDKYEEVHSCLTVSRYLNNNNINTKRGGKWTSKTVNDIIKNPFYIGTYRYNVRESARGKMKPKSEWIVKENNHTPIIEKDQFERCAAIIQSNLKRDTSEYRRTNYVHIFSHLLKCGKCGSGFCSQKDKMRSNGYRPSMYRCAKRMHMKDCEQKIINDTTIGNFVFNYVSNVVRVQKDFSKINSLDKFEKALLKGPAFEDIAKIEEAGLQQMYNAILYNSATSNSLSFDFLSTTQADNNTAEIILLTKEKEKYAKAVDRLLDIYLYDSEAVSKEEFAKKQKDLQSKIDVIDEKIENLKTSEANNKNLNPLDTSFIKKATAFLVSQKILSAKYIDFVDLALNSDPQILKDFVSQIIEYITVDENKVTKIKFINGIEHSFIRK

SEQ ID NO: 26449 - protein, 546 aa, synthetic construct
MKAAIYSRKSKFTGKGDSIENQIQLCMDYSKSIGIKEFLVYEDEGFSGGNIDRPQFKKMMQDAKDKKFDCLVCYRLDRISRNVSDFSTLIEKLNKLEISFISIKEQFDTSTPMGRAMMFISSVFAQLERETIAERIKDNMYELARSGRWLGGKTPHGFTSKKISFLDENLKERSMYQLEVNDEQMEIVKLIFNKYLELRSLSQLYKYVYHNGIKGPRGGKFDPSSLSGILRNPAYVKANEDILDYLRSLGMEVVGVPDGQCGILTYAKNTSNSIAAIAKHHGVIEPDVWLEVQSILNENKDKIPRISTGKTALLSGLLKCGKCGSNMRIMYKGKRNDEDLKYYYVCGTKRSLGVEGCNCKNLNGPLVENLVIDKIKNCNIESVINAFNSNKAKVDTVFSDVRSKINLLKNSISEKEKLISNLVMELAKNTGSVASEYIISQIESLNGEIDALKSKVSELESSSVDINSASLNLDIIVSNLKKFNYEVDDASLDDKRLLLSTIVDSIVWDDASGNLSIVYMGAKMDDLVSLSDGSHFCSDCRSYIYE

SEQ ID NO: 26450 - protein, 518 aa, synthetic construct
MVAIYVRQSLDKKDSLSIESQINDCITLCKRNGWDDYQVYKDKGWSAKNLDRPEFQKMNNDVEAGKIKAVVCYKIDRISRSIRDLVNLIEDYHELGVHFVSFADNINTAAPGGLMMATLFGSLAQMEREAIIARVTDNYYYRCELGYWGGGPAPYGFNLKKIVENGQKHTVLEINEQEAAVVKQFFKWYLEPEGTIYEILKKADKAGITTRKGGAWTSRVVSELLSKPMYAPNSMDIYNFYAAQGVRVRVTPEQCDGKLSLNVFGRRDRNSKHPKRSRPVNEMTLAICKNPPIIDSDTFLKTQFKKKAKLQVSPRTGTAKTTMLSGLVKCAVCGRAMSPSGSSRGVRYFTCSGKRNYAAGTCTSKSIKVSALEKIVIDDILRYATNPKVTDMFHAMQSSKLTAEQSHEVNLLQQETAKLDIEIDNLLDACSAGNATAIEYLNKRIEKLDNRKHDILNRINEIKKDTENVISLFSGIEIENVPYILAHGSIDEKKNVCQFLLNEVLFTNADDVKVYYKI

SEQ ID NO: 26451 - protein, 520 aa, synthetic construct
MELQTRNVTIIPARTYLHRNHTEEKPKCRVAAYCRVSTDNDEQATSYETQIEHYTTYIHNHPDWKLAGIYADDGISGTNTKKRDEFNRMIEDCMAGTIDMIITKFISRFARNTLDCLKYIRQLKNKHIPVFFEKENINTMDSKGEVLLTIMASLAQQESQSLSQNVKLGLQYRYQRGEVQINCNHFLGYAKDENKHMVIVPEEAEIVKRIYREYLEGASMLKIARNLTADGLKNGAGHTKWRDSNIRQILQNEKYMGDALLQKTYTVDFLTKKRVKNTGIMPQYYVKDNHEAIIPRDIFLQVQEEMVRRSSIHLKNGRKLTYSSNHCFSQRIRCSKCGEIFRRIHWNNRGKKSIVWRCVNRVDHTCKCDARTISEPALAQVCLTAINQVLCEKKDFLTMLQHNIETVLNHNNDETLAAIDTRLEELQTQLVKLASSKAGYDDVAEEIYHLREQKQQALAKSANQDEIRSRIVDMASFLKAQSTAITQFNEHLVRQLIETITVFEDSCTVEFKSGVTVDVN

SEQ ID NO: 26452 - protein, 519 aa, synthetic construct
MKTVTKIGGQLVFPTPKHKLRVAAYCRVSTDSEEQLVSLATQRKHYESYITANPDWEFAGIYYDEGITGTKKEKRPALLRLIDDCEHKKIDFIVTKSISRFARNTTDCLELVRKLLEHTVYIYFEKENLNTGSMESELMLSILSGLAKNESVSIAENSTWSIQRRFQNGTFKLAYAPYGYDVIEGKLVLQPEQATIVKAMFDQTLAGIGTDAIAKELNAKEIPAKRGTHWTATTIRGILKNENYTGDAIFQKTYTDSHFNRHHNHGEKDKYRVEHHHEAIITKDIFEAAQQVIRQRGKEKGALPQNKKYQNRYPFSGVIRCHQCGATFKRRIQGGRNSYIAWCCATHVADATKCSLKYIKETALEYAFVTMMNKLIFGHAFVLKPLLASLRTLHSDDSITVIQDLDTKLAENAEHQKTLAYLLAKKYLEPAMYQKGNNELLQEAEQWQHQKDSLVDFLNDDNKTVHETRKLLQYTCKAKMLTGFDGAVFQQFVEQILVYSRTEISFKLKCGITLRERLV

SEQ ID NO: 26453 - protein, 521 aa, synthetic construct
MGNVMIIPAKRQVGNTSRQQEDKPKLRVAAYCRVSTDSDEQASSYETQVEHYTEYIKKNPEWEFAGIYADDGISGTNTKKREEFNRMIEACKAGEIDMIITKSISRFARNTLDCLKYIRMLKDKNIPVFFEKESINTMDAKGEVLLTIMASLAQQESQSLSQNVKMGLQFRYQNGQVQVNHNHFLGYTKDREGNLVIDPEQAEVVKRIYREYLEGSSMDKIAKGLEKDGILTGAGKKKWWTSTINKVLRNEKYIGDALLQKTYTTDFLNKTRVKNNGIVPQYYVENNHEAIIPKDIFLRVQEELVRRRVVKTSANGKKRSYSCNHCFAQLVICGECGEMFRRIHWNNRGCKSIVWRCLSRLEATGMECHARTVNETVLENVVVQAINTLLGDKSTYQAQLQQNIAKVIREAQKNNTDGIDEQLMELQKELLEKANNKEAYDEIADQIFKLREQRENCTVDTAARDTQIARITDLQDFIKQQRTDLAEFDESLVKRWLKQITVWEDHFTVELKSGLKIDIEG

SEQ ID NO: 26454 - protein, 519 aa, synthetic construct
MKKVTKIDKIQPAKKAEDKLRVAAYCRVSTATDAQLESLEAQKSHYENYINSRDDWCFAGVYYDEGITGTKASKRPELMRLLADCKAKKIDFVITKSISRFSRNTMDCLEIVRTLLNLNIPVYFEKENINTGSMESELFLSVLSTMAEGESASISSNNKWSIKKRFENGTYRLSSAPYGYKLESGGLQVVSEQADIVKRIFRELLSGKGMYSIAKELNAEQVPTQKGGRWTSTSVHNILTNEKYTGDCIFQKTYADSNFNRHTNNGELNRYLIQNHHEAIISHEDFNATAALIKQRATERRIESGSDKYQQRYAFSEKLICGECGNTFRRRIHKGKYNSYVAWVCNTHLSDTNRCSMLFVRDDALNLAFATMLNKLIFSYRLLLKPYLAAMQSNTADEALLRIQYLEKQLDQNAEQRSTLHKLMAQGYIDQILYTQESNELLLQARDFRSEIEALNNTVAGDTTKVYETERLINYCKRGEMLTDFNESLFELFVDHILIYSRQKIGFVLRCGLTFEEMI

SEQ ID NO: 26455 - protein, 581 aa, synthetic construct
MSRTTNKRPGKAKSGLSRKQKVAIYIRVSTLYQVDRDSLPMQRKDLIAYASLILGIEEYEIFEDAGYSGKNTDRPAFQEMMQRIRKGEFTNVLVWKIDRISRNLLDFAEMYEELQDLRVTFVSKNEQFDTSTAIGEAMLKIILVFAELERNMTSERVTATMISRANSGLWNGGRIPFGYDYDPDKTAFSIREDEEKVCQMIKNDYMEHKSLVHTSRMLNASGYKTRAGAEWSPTAVWIIISSPFYAGIYRYNRYKGTERRVENPEDEWIMIQNHHPAIFSLEEHEKMLAILDENSRNHRSVGQKHQTERVHIFGGIAYCGKCGSKMVSTPGRLHANGYRPTNYSCPKHRKTKECDNPTVSDTQVGEFVINYILNMLGAKKKFSTIENPEDLERCLLYGNTFSEVEHIDSNGLNEYFNLLSRYSSDDSYTFSVKKSRKKKAEVDPEVEALRKEKEKQERAMKRLQDLYLYSDTSMSEKDFIIRKTEISKRLEEINAMLGMVAKNSEPSLSDEEFVRQASHLLISRELQNRQYIYFKNLAQNVSPEILKAYMETVLDSVLLVDGRVSSIVFRNGLTHKFKYKS

SEQ ID NO: 26456 - protein, 441 aa, synthetic construct
MKRAAIYVRVSTKEQKEKGLSVDSQLLALREYCSNNGYVIAGEYNDAGISARKKYINRPALLQLIDDCKEGKIDIILFTKLDRWFRSVADYYQVQTLLDSYKVPWRAIWEDYETETSTGLFKVNIMLSVSQNEADKTSERTKEAVKYRRLRGDFVGGKCPRGYRRENKKLVFDEKTYDAISAMFRTYLSCFSIAKATEAVAEYGLHIATSQICRMLKSPAYAGNASGSECPAYITWDEHLLILTNSTKRNRTPKRSDRVYLFSGLCRCGYCGGRMVARVNRWVKNGQQLYYPFYSCAAHNDKRNLDCPGVNLAETKIEAYLMEHLEAELKMCQSEFELEQENKATYENKIKALEQKLKRIGVRYEDGDIPFEEYKDKRFAIKKEIAGYKDKIDNARSVPSLPDNWKDLYNSLTPDNKRGFWLNILKEIDITKEAINIVFPV

SEQ ID NO: 26457 - protein, 456 aa, synthetic construct
MRNKEIAPALVRVALYIRVSGEEQKIKGLSLEAQQERLEAYARERGWVIVGIYIDAAKTARKNIHKRTEFQRMMDSVKRDEVDILLFARLDRWFRSVADYYKVMEVLQAHNCDWKTTDEEYDTTTANGRLYINVKLSIAQNEADIDGERIDVVFDSKIAHGTVVSGSAPFGFRVNEEKRLEVVPEDATIVQDAFNYFENTVSQRATVRYVRETYGVNWCDATFRRMLKEKLYTGVYDRGGRYNDQFCPAIINRQQFDRVQALLTRNVRSAPSGKVYIFTSILTCAECGHKLVGYKSSDYFYYRCNQHFQRGRCSHNHSAREDVVEQWLFEHLGEELERCQLEWDVEAAKKKASVARTDKAALKRKLTKLKELYVNDLIDIEDYKKDYQIYVSALNQIPEPAQEAPPDFAAVRRLLDNSFRTIYDTLTREEKRTLWRSVIKEIRIDNDQNITGVVFG

SEQ ID NO: 26458 - protein, 552 aa, synthetic construct
MAKKKKPAGGIAVIYARYSSHNQRDVSIEQQIEACRKHAAELGLTIIATYEDRAISGRTDNRPAFQRLMHDAEKGKFSYVLAWKSNRMGRNMMQAMVNESRLMDCGIKVYYAEEDFDDSAAGRFALRSMMNVNQFYSDNLAEDVRRGLMDNANKCMVNGRQPLGYKRGKDGKVVVDEPAAAIVREVYARVASGELFTDIARDLNRRGIKTADKGEWNKNSFHRLCSNEKYRGIYIYGDVRIEGGIPTIIDDTLWYKVQEALRVKKLKRNGRHRPGDEDYLLTGKLRCGKCGGYMIGMSGRSKTGDIHYYYACQNRRVGRTCDKKNIRRDVIEPAVAQAIKEYCLTDDAIEWIADKTVEYWEKADRNLQLDSIEGDLAAVQSSISNVMKAIEMGVVTETTRDRLIELEKQRTDLKSKLALAKEEVVHVDRKKLISSLLLFRNGDIHDRQYQEDLFKTFLISVYVYDDDDNGHLKIVFNAFGDNNTVDLPIDFGETDNQSAFSDGAEKFDYSLHRSTKKPSGLCRMAFFVLFRYTKTAHRPAGRCAFLCGFTGY

SEQ ID NO: 26459 - protein, 454 aa, synthetic construct
MECVAYLRVSTEKQAEEGNGLDSQRRDIENYCRKNELIIKNWYEDDGFTGSNMNRPGLQRLINDCTRKRIKCVVAFKLDRLSRSMVDGIYLIERIFIPNGVEFKCVHDSVSYDSPMEQAYTQMMAVFAQLDKNTMLLRMRGGMLERVKQGFWMGGGNLPYCYDYDREQGILVPISERAEQARQALDLYLSGYSDAKIRDILGYTSERVVRNILTSPVNIGMIPYKGSVYRGKHKPIFEAEKFEAAQEMRKSRRQHKLQNINQPAHLLTGLCYCGVCGCKMRYQKWTHGKHKIYCCSRNAGCSHLPNYNPNCDNSLEWADDIEKQVEEQILKISLNLSSYKPKEKETRLEILQKQYDKEKTKLKRLYSLYADGNDTVLEMIQESESKLSEIKEQIDRETENTEYTQKKEYVYEKIKRLADVWDHIDKPDKNKILKSIISKIVIVNGNVEIQLKRF

SEQ ID NO: 26460 - protein, 538 aa, synthetic construct
MNGVIYARYSSENQREESIDGQLRECTAFAQHNDIQIVGEYIDRAFSAKTDNRPSFQKMIKDSAKGEFDVIIVWKLDRFARNRYDSAHYKNILKKNGVKVVSATEAISSGAEGIILESVLEGMAEYYSAELAEKVSRGMKENALKCKYNGGSVPLGYYIDESKHFQIDSSVAPFVVECFEHYADGMTMKQLRDELNMKGVKNSRGGKLSIDVISRMLTNRKYLGEYTFQDITIKDGIPAIVSTSLFEKVQDRLTKTKKAPSSHKADDDYILTTKLFCGKCKSFMVGESGTNAQGKKYRYYKCVNHKKHQGCDMKSIRKDLIENMTIKYIREFLNDEDLINTLIDLAYDAQHKENEQLPLLRKQLAQTEKGIKNIVDAIEQGISTKSTRERLLDLEQRKNDIEMSISKESIENPMLTKKQFKFWFDQLKKLDISKSEQRQKLVDLFVNSIIIYDDHIKFFFNYKEHTETITFDELNNCSDLPDSPRPKGLPNGSPYFLPKAAKNRIKQRFSFIRCTNFCCLQHISCNPDCPPNVLGIVF

SEQ ID NO: 26461 - protein, 656 aa, synthetic construct
MSLRSKYTEHQICKLEKKEFMKEASFDDIFIDYGHDLNTLILCRESTAHEDQQKALNDQVERMKAIVDKHRQLHLVDDGIIIEDAKSGLAMDVRPKFQATIKRAVAEDIDVILVQEASRFSRNTGDFFYNMNILQNSGVGILIMEGEFWTYFMAPADYPRLANEVAKGQAESLTTARRVNRGIETYRSRGQLVSGNMFGYDLVKAVERKDNTYKINPVDGATVQLIFYMYVNKGIGTELIATHLNANNYPTAKRKGEWSASKVRRVIINEKYANLIMYGKYKVVDTSTKKKIATHIKPVRTTTYDKDGNIIQERNVQYGTWESLVDEETWWKAQEIMDSRSNSYNLKDDTGKSKRCANGLRTSNDAYANKAYCCCGHTLSPQYTHAATDTKYAQFRYNCRWQINSHTDEYRKKHGLPPSDCTCKLPAVTDVAMRLMSIKVFEYLFTDIRDTIDDTVRIIEMANKQAVDSLNNLGVSVEDLEATYAKLNNRLSRFADMYADGDLTREQYRDKKSSVEEELKHTKELIDSKTLAISEQKKKSLDIETIKARLNTYVDLKGYGVSNEMIEFFVERIIRRPNNEYVWELNLTGQPSKPNKYKIKKYNKEYSDSLQDDSNFNIIKTFVISLDECKKFCETLAHRQFRASYWNQITVKIAVK

SEQ ID NO: 26462 - protein, 624 aa, synthetic construct
MSELSKFSPQTRVAIYNRVSTEKKVQMEALDVQVAYTRKLVEDNHLTIVDQYIEPETGTEAEHRLEYQRMIRDIKADRIDLVVVKCSDRLCRDQAEWHNFVKLHLQKKFQLYFYLDDHIYDHERDDIKYSVQAIVDAEQSKITSKKIRDIHSNRQIYATGSKALHICRPLYGWDRNVEFIDENTKRVWWTVNEKEATELRYALSLVEQGIGFYRLANIMYDRGVRSKGTTGYHKMPSVRIAANTWKKMLTSPMLHGDCILHKEVSNFYTKERVKLPQEDWIYKENVIPPIVSREYHEKIVQIIDARRFQMGCCKGLAGTYKWSNRLVCANCKKPYYRMHYKLHSEKVITWKCSEQFQRTRSACDNMVIAEKELEKQLAAALKEKYAYLFHISSGLINDTIHTIEKALCNSDNGKKLKALETQRELLLRNKDVLFHKLMNGVISDEDFGIYKDRLEKELRELEEKIEGQKDGEKSLADQYRRLQQIRDTIENKNYNEQAILEILYGCVEVIEIHNNGDMDVTMSKELMRSKFELYSIVESDYSLFYFSFTYKKETIYDRNRKAYNEKVLELIRGEKYITIPQMAERLGNTYSYTWHSIQQLKEQGRIVYIKEKFEHSECYWEVVE

SEQ ID NO: 26463 - protein, 522 aa, synthetic construct
MANVTFIPAKPKVGNSVSKDNAPKLRVAAYCRVSTDSDEQETSYDAQVSHYTEYIQQNPQWTLAGIFADDGISGTNTKKRDEFNRMIDECMAGNIDMIITKSISRFARNTLDCLQYIRQLKDKNIPVYFEKESINTMDAKGEVLITIMASLAQQESQSLSQNVKLGLQYRYQQGKVTVNHNRFLGYTKGEDGKLVIDPEQAEVVKRIYREYLEGSSMDKIAAGLEADGILTGAGKTKWHTSTINKILRNEKYMGDALLQKTYTTDFLTKKRIKNNGTVPQYYVEDDHPAIIPKDLFMQVQEELVRRRTVHKSPSGRKRTYSCNHCFAQIIVCGECGELYRRVHWNNHGCKSIVWRCISRLEPTAADMNCTNRTVNDTVLEEVTVKALNQILSSRKVFLKQLQENIARAVVTTDTLSPDGIQARLEELQKDLVKAVGDQKNYDALTDEILRLQQMKKDSEVDDHRRTETMNRIKELQDFIAGQDTAITEFDEADVRKLIQKITVYEDRFTVEFKSGISVDITE

SEQ ID NO: 26464 - protein, 480 aa, synthetic construct
MFGGETLKKTITEISPKDTKSKKVATKSKLNVAAYCRVSTESDEQMNSLANQKEYFEKLIKSHEEWNFVDIYYDEGISGTSLKKRDGFNKMIADALAGKIDMIVVKSISRFSRNTVDAIQTIRNLRNHDIRIFFEKESIDSNDIKSEFMLTIMSSLAQEESQSLSENVKWGKRKIAQNGFVQIPYSNVLGFKQKGKYGIEIDREQAKTVVLIYDMYLHGKTTGEIIKKLIEDGTPTPTGLEASHWCNTAILSILRNEKYCGDAILQKTYTKDFLNHKKCINYDAFPKYYVKNNHEEIIPRATWEYTQELLEKHSKRSVNVRYGELIFCSACERKYRRFHRYHKYYEETILSYRCLGKYDKSTNCTNITLFEKQLDELYHETVLQLLSYYKKELVEYLKLTIPKAIKGKRKSNRIIKLLDNMISFTQSDYEYYSLHILIKKILVHPDRTLEFTILNGSIIKTSIPKYRLVDHYGRKKASGN

SEQ ID NO: 26465 - protein, 436 aa, synthetic construct
MQITKISATKKLEKKKLVCAYARVSSDKDAMLHSLSAQVQYYKDYITSNNDWLFVKVYYDEGISGTKQDRPAFQQMLQDAKDGKIDLIITKSISRFARNTVTLLEAVRKLKSYDVDVYFEEQRIHSISSDGELMLTILASYAQEEARSVSENMKWRVRRNFEEGKPWGRAPYGYTIENSKFVIVPKESEAVKLIFKLYLDGIGSYRIKDIMNKSEYPTRNNCLWTETTIRGMLKNYVYTGNAVFQTTYVKNYITKKKAKNNGEKPMYHVEECHDAIISIEDYNKVQKIIKERTEKIHKGITPKDNPFKGKLICAHCGCTFRMKKNYRKYVWRCGTYIRLGSKKCLSKQIPNDALQIITKEILGVGELTSEIIDERIEKVIVGDDRLLTFYLKDGSKIDAHWMQKSRSESWTEEMKENARRKAVERNGKSNSNPIND

SEQ ID NO: 26466 - protein, 529 aa, synthetic construct
MAKVTVIPSTINPITKLPNNGLQKRKVAGYARVSTILDEQCSSYQAQVDYYTNLIKRNPEWEFVEVYADEGISGTNTKRRGGFNQMMQDALDGKIDLILTKSVSRFARNTVDSLTFIRKLKEKGVEVFFEKENIYTFDSKGELLITIMASLAQEESRSISENVTWGKRKAFSDGKVSMPYKHFLGYKKGEDGRPTIDEKESLAVKEIYSLFLKYGYSTTKIAKEFNEKGICTPSGKGKWTLTTVESILSNEKYKGDALLQKKYVVDFLTHKSKPNEGEIPQYYVENSHPAIIDKVEWDLVQIELERRKKLCKTYSSKNIFASKLVCEDCDSFYGRKIWHSNDEHRTIVYQCNGKFKNKDKRCNTPTLREEEIKSMFLEAYNKFVIDKTALVDDCKLMIETISDVSSIDEQISKQIEKMEEFAQKVKELVSSNASTPDSQTDYINDYDRLCTMHSIEETRYKLLLKEKSGRLAKAKSMELFIESIKDKPDVIDSWNSDLWILLVDKAIVHHDKSITFVFKNMKEITIAAK

SEQ ID NO: 26467 - protein, 523 aa, synthetic construct
MRFFSYGRKSVFSDKSDSIDNQFRMNREYCESKFSGQVDSWQQFSDEDFTGANTSRPDLQRMLSFIKGGFCDVLVVYQLDRLSRDVRDFANIYALLEEHGVMFISIKENIDTTTPIGRAMMYVTVVFAQMERETIAARVTDNMLGLAKKGYWTGGNPPVGYVRKHIVVNGKKHCSIEVDPDGARYVTQIFDTFLAYNCSLQGMETRFKNQGIRTQSGKFFSTTQLHKMLTMPYCVEATPEVYDFYAAKGCIMDPGSPREMWDGSVGVIIYGRSTEKNKKHQAQPPEKWTVCLGKHKPFMPAEKWLAVQSRFTQNKCIKDAKWPVPLLKGVLRCKCGNLMQVSRKKKVDGTCSSWYYCRKRMRQGVDACDMGQIKCDLLDEEVLELFRGITADPALIQKFVKAEAPADVPDLKAAQARVSACERKIGRLAASLALAEDSAASKYIIAEMERLDVELGALKREASLAEMESHQAAASAKDAKATAAEIAKLIHGLDGFDDKEKNAIARAVIQECTWDGERLFITL

SEQ ID NO: 26468 - protein, 516 aa, synthetic construct
MPKTEEKQAAKAVIYARYSSDRQREESIEGQLRVCEDYARRNNITILHTYADRAMTGRSDQRPEFQMMIRDAATMAFNVILVYKLNRFARNRYDSAKYKHKLKKYGVKVVSAMENIADDPSGILLESVIEGMAEYYSAELSENVLRGMTQNALEGKWPGGVIPLGYKLDKGGRLIINEEKAPIVRMIYQMFLDGMSVARIERKLNDKKYTTDAGKVFSRSRVYYILHNERYIGTFQWKDIKKEGIIPPIISKEAFHAVQERINAMKSSSYRTNNNYLLAGKAFCASCGAKVSGTSGKSQNGNKYCYYGCSHHHRSARYEYCETKNIRADVLEKLVCDKTHEILSSKKAIKEIARQAVKLRPRDESELEISAIKNHISSCQKKIDNCIKAIENGVMSNALVESLNENERTLDVLKEKLAKASLMQGSGLLTEEKIQFFFETIREKAKETEKYNDILLTSLVRAVYICNEYVEIQYNYAEQLPILTNPVRIESCSYKCTNGGTIWIRTKDLFDVNEAL

SEQ ID NO: 26469 - protein, 506 aa, synthetic construct
MKNAMYLRKSRQDEGGLEETLRKHKEILLDFAVKNNIQISDDDIYEETISGESLYARPEMLKLLQNIDNGMYNAVLCVDVDRLGRGGMSDQGIIFETFKNNDTKIITPRKVYDLNDEFDEDNIEFESFMARRELKIIKRRLKRGTKKSIEEGCYLANAPYGYKNTVVNKKHTLEIVEDEARIVRTIFDLYVNKGMGCQSIAYAINAMGAKPRRTEQFGRTTVMFILKNNVYIGKIVWDKKTHIRKNTRGNSKHIVIYNDKDKWTVCEGLHPPIIDMETWNKAQQIIAEKTHPPTNKGEIKNVLSHLIYCGNCGGLMTRTISRGSKNDTKNKKYYYSCKSKGCIKATQCHYVDDIVINTLRYRFKDMVLDIAEQNNVHYIDYSSQIKGIKSELKKLDTQLNSLHDLLEQGIYDIPTFMDRQKTINMKKSELNNQLDIIDKKTSENKMIDEISMMNRIQSVLDVFDRATPQEKNQLLRTIVDKITYYKKPSDPTDKCRLVITLKPVFF

SEQ ID NO: 26470 - protein, 563 aa, synthetic construct
MAEVEVIKAVDGPILRKRDYEGNPVVITRQRVAAYVRVSTDGDEQLESFQSQKQYYQDKISENRDWVMVGIYADEAITGTKVDKREQFQRMIQDCMDGKIDVIMTKSVSRFSRNTVDILQYVRLLKGKGIAVIFEKENINTLTEQGEMMLTLMGTLAQNEVESTSKNVKLGIKMKMKRGELMGFNGCLGYDYHPEDKTITVNEAEAETVRLIFELYLQGYGTYTIAKRLEALGKVNKKGVVKWTDSGVRGIIKNEKYKGDLLLQKTITTDPISKRRIENFGEEEQYYVHDHHEPIVSREVWEQAKEIRLSRNHPSDTKADGKREKYTKKYAFSSMCECGFCGTKLTRRTLHSGSKYETPVWYCRNAANKGKHNCPNSKSMRESILENAFLEAYKLLAGSFDDVIDSVIDTIEGISTNNEDIGRLKKEQKALDNLEQRRKRLTDLYLDEGISKEAYDEKYEELTMKIQKTKESIRILQDNVSNQKDVSKRMASLKKALSDGDILDEFDRVVFESIVEKVIVGETNDDGTVDPFKLTFVMKGNGNSVVPNAKAWFKSEKSTTKTA

SEQ ID NO: 26471 - protein, 516 aa, synthetic construct
MPKTEEKQAAKAVIYARYSSDRQREESIEGQLRVCEDYARRNNITILHTYADRAMTGRSDQRPEFQMMIRDAATMAFNVILVYKLNRFARNRYDSAKYKHKLKKYGVKVVSAMENIADDPSGILLESVIEGMAEYYSAELSENVLRGMTQNALEGKWPGGVIPLGYKLDKGGRLIINEEKAPIVRMIYQMFLDGMSVARIERKLNDKKYTTDAGKVFSRSRVYYILHNERYIGTFQWKDIKKEGIIPPIISKEAFHAVQERINAMKSSSYRTNNNYLLAGKAFCASCGAKVSGTSGKSQNGNKYCYYGCSHHHRSARYEYCETKNIRADVLEKLVCDKTHEILSSKKAIKEIARQAVKLRPRDESELEIRAIKNHISSCQKKIDNCIKAIENGVMSNALVESLNENERTLDVLKEKLAKASLMQGSGLLTEEKIQFFFETIREKAKETEKYNDILLTSLVRAVYICNEYVEIQYNYAEQLPILTNPVRIGSCSYKCTNGGTIWIRTKDLFDVNEAL

SEQ ID NO: 26472 - protein, 527 aa, synthetic construct
MAKRKVTTIPATINKFTAKPVDSKKKRKVAGYACVSTDHEDQLTSYEAQVDYYTNYIKGRDDWEFAGLYSDEGISATNTKHRDGFNQMITDALAGKIDLIITKSVSRFARNTVDSLSTIRKLKEHSIECYFEKENIWTFDSKGELLLTIMSSLAQEESRSISENVTWGQRKRFADGKVSFAYKRFLGYDKDSDGNIVINEGQAKTVKLIYKLFLDGLTMHSIANELTKRGLKTPAGKDKWSQSTVRSILTNEKYKGDALLQKSYTVDFLTKKTKINEGEVPQYYVENNHPAIIDPELFDLVQTEIQRRGKGNARYSGVTIFSSKVQCAECGGWYGSKVWHSNDKYRRTIYQCNNKFRHKTRCSTPHLTESEIKDFFVKAMNQLITEKSEILENLQLIRTTLCDREDLIKQKESLGEEIAVAVEMTQNIVAENARMAQNQDEYNKRYNSLVERYEKLKKEYDNACAVISEKDAKYEQMGRFITVLNDQSEFISEFDEALWGSLVEKIVVKSKDDVMVVFKDGTEIKAE

SEQ ID NO: 26473 - protein, 574 aa, synthetic construct
MRKKKIDAPKEKPQRAAIYLRVSTAYQVDRDSLPMQRKDLVGYCEYALNISDYTIFEDAGYSGKNTDRPAFQKMMMQIRNGMYSHLLVWKIDRISRNLLDFAQMYEELKTLGVTFISRNEQFDTSTAMGEAMLKMVLIFAELERKTTAERVTATMISRANDGTWNGGRVPFGYDYNKETQTFSVNGDESFIVLEMYDLYEKTDSLVHTARELNDRGYVSRQHNPFSPVSVWTILRNPWYIGTYRYNYYKIPGRKAIKDESEWVVIPDHHTPLVSKERFDRVQKMLDSNARYRNTPGRSATQKNVNIFSGLIWCACCGAAFTASPGKLHASGYRSAKYGCPNVRKTKTCNAKYTSDTVLGEFLLNFILNVINAQKRFDQIKSPADLEAQLLRGDTFKNVAGIDSASVAALYEMLAEYSPADSVLLKKPTVKKNLDPELRKLRADKRKTERALARLDHIYLYSNKQMSDKEYLIKKNDLMNDLKEQDKSIGLLTSESWAQSLSDDDFLEQASSFIMSQRLQEHEYIYFQGLAECTEPSVLRSFFLSIVDSVRMRNGHVETLTFKNGISHKFTYLAI

SEQ ID NO: 26474 - protein, 504 aa, synthetic construct
MEDFIYARQSVDKEDSISIESQIELCLREVGNNPHRVFRDKGYSGKNTERPDFQDMMAAVRAGGARRIIVYRLDRISRSVLDFANVISELQKYGVEFVSITERFDTSTPIGKAMLMIVMVFAQLERETIQQRVMDAYRSRSRKGFYMGGRVPYGFELENTVMEGIKTCMYKPIPEQIQVVQLIFSLYAMPQVSFADVVRYLSQNGIKNPNGKNFSRMRIRDIITNPVYAKADASIFEFFHGQGTEIINDISQFIGTNGAYLYTGNKAAKRKSISLDGHVLVLAPHAGCIDADTWIRCRRKCLNVRQIAKPVKAKNTWLAGKIKCIDCGHALSLKSYPRKRSADARYYICNSKYVSASCDGVGAIQAAGIEDIVFDEMSRKLKEFNKLSYKEKHGDPIELTKLKIRAEEIEKEIATLIDKIVSASTATMEYINERIDALDEEKKTVKEKIAQMSAEMYDKQNIGVISDYMSKWNDISIDDKLTVVDTLIESIHVGHGKVKIAWKI

SEQ ID NO: 26475 - protein, 525 aa, synthetic construct
MGRKVTVIPPTISLQTHLPTTQKVKRKVAGYARVSTDFEEQLTSYEAQVDYYTKYIQEREDWEFVKVYTDEGISATSTVHRDGFNQMVADALDGKIDLIVTKSVSRFARNTVDSLTTVRKLKEKGVEVFFEKEDIYTLDSKGELLITIMSSLAQEESRSISENVTWGQRKRFADGKVSLPYKHFLGYRKGADGLPEIVPEEAEIVRSIYRWFMEGMTPYKIACILIEKGIPTPSGKEQWHLSTVKSILTNEKYKGSALLQKKFTVDFLTKKTKVNEGEVPQYYVEESHPAIISPEEFELVQAEMARRKELGKRYHSGNIFTAKIVCGECGGFYGPKIWHSNSRYRRVIWRCNKKYTNDCYCKTPHIDEDTIKQGFLKAYNQLLTDKGSVLSLCEMLLRAFSDCSDLDAKMSVLGDEEKQITKNIREMVVINSRTVQKQPEYTLEYQSYEREYEALKAKYQKLQAEKLDRINKTTVIQDFMEQIKKRKEPIKVFSSDVWLTAIETVTICEKGELQFRFKNGTEITV

SEQ ID NO: 26476 - protein, 430 aa, synthetic construct
MIQKVVFPQKKQFPLKRTAAYARVSSGKDAMLHSLSSQVSYYNQLIQSNPEWLFCGVYADEALTGTKGNRAEFQKLLNRCRQGEIDLILTKSISRFARNTVTLLETVRELKSLGVDVYFEEQRIHSMSSDGELLLSILASYAQEESYSASENRKWQIRKDFSIGKIGSITILGYRRNAEGVLEIEPNEAELVCMIFSDYISGMGQQRIANKINEMGIPTRQGNLWTNPRIREILTNEKYIGNLMLQKYYRNNHIEKKKTRNQGELQKYYVEEAHEPIIDLETFVKAQAILAQRHEQYTHDGATNRYPLSGLITCGLCGKNYQRKQLPQGIIWMCATFLRRGKKYCPGSKQIPESILYALICDVLKLDEFDTAVFRDNIHHIVIPKPFEVQFFFHDGTSDIRHWKYPSRAESWTEEMKQAARERNQKWVEK

SEQ ID NO: 26477 - protein, 529 aa, synthetic construct
MSKYCIYLRKSRADLEAEAHGEGETLSRHKTALLELARRMGITISATYEEIVSGETIAARPQMQRLLSEVGAGEWDGVLVMEIERLARGDTMDQGLVAQTFKYSGTKIITPLKTFDPQNEFDEEYFEFGLFMARREFTTTNRRLVRGREASAKEGKYVGSVPPYGYRKVKIPNDKGFTLEIIEEQAKVVRMIFEWYAEGAEVNGQKKRIGPYSIAVRLNELGIKSVAGKDYWTIYGVQHMLINPVYIGKIRWGYRKVKKTVTPEGTKKKSREFAQDGDYIVVDGLHEPILSEELFYKVQDLIAANPPTPIKYRHKNINPFAGLIFCAKCGHCMNYRRGYGRQPDYIGCYTAGCDNKASRFDLIEQRVLSILNSWVKDYSVDKAQIKHEVDLNAELSNAISLAEKEIEALQGQLDNVYSFFERGTYTEKIFKQRSSAIEQQIMEIGEKIDRLKAEHQQVLERQNVQAEFVPSIKHLLEIYDTLEPVEKNKWLKQIIDRIVYEKNADGKYHNVDPGDFTLGILPRLPKKGS

SEQ ID NO: 26478 - protein, 498 aa, synthetic construct
MEIQIREGNSRQKRKLKVCAYCRVSTDADEQENSLENQIRHYKEVITSNPDYEYAGVYSDFAISGFKEKRPGLQKMLADARKGKIDLILTKSVSRFARNTSIVLEATRKLKELNVGVFFELQNINTLSGEGELMLTILAAFAQAESESGSVGAKMVYQRKYEAGIPVQYLERSFGFKKDERGVYIADEEEAVWVRKIYEMAADGYTPAAIKRYLNENGVKTVGGTKWIDSTVFRLIENEIYKGDYIMHKHFVNEERKLVRNRGEVDAWYIEDDHEAIVSPELWQKAQDAIEAKRDYLAEGSVIEEFTEDNYPYMNRIFCAKCGHPLYKRIYSNGNRLNWGCSGTKRYGKSFCEGINIPDGVLRKAWHFDGNMYIDEKPSVKGTKEFTYLKESSWKRRHKKKVPEAIPENTEEAYPYRKKIFCGRCGSRLVRHVNPKSHKVIWICNGAKRKGVAFCRGTRIPDSVIRGWGEIKKDIYIQRKDDKNGKKRYSYTSKKPTA

SEQ ID NO: 26479 - protein, 421 aa, synthetic construct
MKLRKIEPLKPKQKKLRVCAYARVSTDSLKQGESFENQVSTYERVIKSNPEYEFVSVYADQGMTGRSENRPEFQRMIADCKAGKIDFIITKSISRFARNTTTVLKYTRELKEIGVGVLFEENNINTLSSEGELMMTVLASFAQEESRSISENNKWTLKKKFERGEGMVNTARFMGYDKDETGDLVINKEEAKVVRLIFKMYLSGIGCHRIAKALNEEGVPTIAESSWHASTIKGMLTNEKYKGDFHIQKTYIPEGTHQSVKNNGQVQSYYVTEDHPAIISAEEWQQVQELMEYHRKQRNIGKGEKYQKRYPMSGMLVCPYCGKSLRRRYVYNRKVEWLCATYIHKGKEACKGIRIRDTELTGLSFSEPMVVEEVMINGEKHYGYTSKRAYDAGERAADRIEKESSSVLPRVNGPRRTVIKL

SEQ ID NO: 26480 - protein, 464 aa, synthetic construct
MARSVTVIPARSQTVRTGHKAVQEKKIRVAAYCRVSTDQEDQLHSFEAQVEYYTKYINEHENYEMAGIYADEGISGTNTKKREQFKKMIADCEGGKIDLVITKSISRFARNTQDCLAYSRKLKNLGIGIIFEKENINTLDSTGELLFTILSSLAQDESRNISENCKWGIRTKFKNGVMHLNTFKFLGYDKDENGKLVINKELAKTVRRIYRDFLIGINPAQIAKELTEEKVPGCLGQTKWYPSTVTGILKQEKHMGDALLQKTYTADFLTKRQVRNNGEIAQVYVKDSHKGIIDKQTWNAVQEEFDRREKFMESHGTDRYSYGADCMPFCEKVFCGECKSLFTRHSWRSRGIVQWQCKNHRKDGKVACTNAYVDNADLEKGFVKAFNRLVTDRDKHMERWQQMKSDGTPLEKIRAGQMMEAVGNEPLTRFVPEIAQLVLCEVTVLGAKKYEFFFLEGSRVKVSV

SEQ ID NO: 26481 - protein, 502 aa, synthetic construct
MEIQIREGNSRQKQKLKVCAYCRVSTDADEQENSLENQIRHYKEVITSNPDYEYAGVYSDFAISGFKEKRPGLQKMLADARKGKIDLILTKSVSRFARNTSIVLEATRKLKELNVGVFFELQNINTLSGEGELMLTILAAFAQAESESGSVGAKMVYQRKYEAGIPVQYLERSFGFKKDERGVYIADEEEAAWVRKIYEMAADGYTPAVIKRYLNENGVKTVGGAEWIDSTVFRLIENEIYKGDYIMHKHFVNEERKLVRNRGEVDAWYIEDDHEAIVSPELWQRAQDALEAKRDYLAEGSVIEEFTEENYPYMNRIYCARCGHPLYRRIYSNGNRLNWGCSGTKRYGKSFCEGINIPDGVLRGAWHFDENMYIGEKQTDKGKKEFTYLKEASWKRRHKKKKPEPIPENTETEYPYREKIFCGLCGSRLVRHVNTKNHKVIWVCNGRKRKGKDFCDGTRVPDTIIKGWGEIKKDIYIQRKDDKNGKKRYSYTSKKPNGADRA

SEQ ID NO: 26482 - protein, 513 aa, synthetic construct
MKTAVIYARYSSDSQTEQSIEGQLRVCQDYAKNNDILIVDTYIDRAMTGTNDMRPDFQRMIKDSNKHQWDYVLVYKLDRFSRNKYETTIHKHTLSNNGVKVISAMENIPDSPEGIILESLLEGMNQYYSAELSQKVLRGLNESYRKGNYTGGMQIFGYKVVDKKNVIDPFEAEIVQEIFRRFAKGETGKSIADNLIARGIRTKSGHYVDDKRIYKIIQNTKYIGKVQHGDTVYTNIYPAIIDEVTWQTVQSIRNANKHSPGSKKERFDYLLSGKLICGDCKQFMVGVTSTNRWGTVYKYYTCLSKRRKKQKCGTMTIHRKELEDLVFNETWKMLYDNNNLDALVEYICKLHQNETQESTVIKSLEKKRADALKASANLISAIEQGIITEQTKIRLKELETQISQYDFDIEQAKQRTYSYLTPELIKEFFQKAVCGDIESNGARKLIVRNFIREVILYKDKVVITFNFTDQHITKKRLPDSIEEVERTAKQAEKSASKNKSGVYKNASTPPNKT

SEQ ID NO: 26483 - protein, 521 aa, synthetic construct
MKTVTKIESNQRTTGSEKKLRVAAYCRVSTGSDDQLESLAEQKKHYETYIQVHENWNFAGLYYDEGISGTKKEKRSELMRLLSDCEAGQIDFIITKSISRFVRNTTDCLEMVRKLLAVNVAIYFEKENINTTSMESELVLAVLSSLAENESVSISGNEKWSIRQRFQSGTYKMNPPPYGYRWNGEQLEVNNDQAEIVKRIFAEFLSGKGVMHIARNLDSDNIAPARGKQWCQSSILRILKNENYTGNAVFQKTFTDESFRRCVNYGQLDKYLVADHHEGIISKADFESASALIDRHSVEKNVTKGSHKYQLRYCFSGKIVCGECGATLKHRTHRLGGETYEAWCCSTHIYNKEGCSMKFIRDDDIKLAFVTMMNKLVFGHKLILKPYLLTLRSSSTDSSIQRIQQLRLLIEQNTGQQETLTRLMANGFIDRALFGRELNAIMAQTDEYRAEIDTLSSSVTGDGAKLKETERLIKLVERGRIFTEFDADLFSKLVDRICAFSRNEIGFVLKCGLTLRERIGE

SEQ ID NO: 26484 - protein, 563 aa, synthetic construct
MARKKNIAAGLDAVIYARYSSHNQREVSIEQQIAECTKHAAALGLRIVGTYEDRAISGKTDNRPRFQQMMRDAEKGKFQAVVAWKSNRIGRNMLQAMVNEAKLDDCGVKVFYAEEDFDDTAAGRFALRNMMNVNQFYSENMAEDITRGLYDNANKCMANGRQPLGYKRGADGKVMLDEPAAAVVREIFTRVAAGDLFVDIARDLNEKGIKTSKGAVWNKGSFQSICQNERYKGIYIYGDVRIVDGIPRIVSDELWYRVQEAMRMKKNPVGTRHRVGAEDYLLTGKLRCGHCGSYMTGVSGTSRNGELHYYYTCQKRRTEHACNKKNVRRDVIEPAIAQAIKMYCLTDDVIEWMADQTVQYWEKHDNDLQIEALEQQLAENKKATSNMLKAIEMGIITEATRSRMVELETENSKLTAQLSAAKRDVVKINREDLIDELHVLRSKDVHDREVQAELFKDFLVAAYIYDDNRLKLVFSFMGKDNSVEIPLETGEDPPDGKDSPDAKMFVLTPDCSTKRPLHNVYAVVFFFLPHVNNTPICAGGGVVGFSLLGSSLPNLGKDQTNGL

SEQ ID NO: 26485 - protein, 436 aa, synthetic construct
MQITKILATKKLEKKKLVCAYARVSSDKDAMLHSLSAQVQYYKDYITSNNDWLFVKVYYDEGISGTKQDRPAFQQMLQDAKDGKIDLIITKSISRFARNTVTLLEAVRKLKKYDVDVYFEEQKIHSISSDGELMLTILASYAQEEARSVSENLKWRVKRNFEEGKPWGRAPYGYTIENSKFVIVPKEAEAVKLIFKLYLDGIGSYRIKDIMNKSEYPTRNNCLWTETTIRGMLKNYIYTGNAVFQTTYVKNYITKKKAKNNGEKPMYHVEECHDAIISIEDYNKVQKIIKERTEKIHKGITPKDNPFKGKLICAHCGCTFRMKKNYKKYVWRCGTYIRLGSKKCLSKQIPNDALKNIAKEILGVDELTSEIIDERIEKVIVGDDKLLTFYLKDGNKIDAHWMQKSRSESWTEEMKENARRKAVERNGKSNSNPIND

SEQ ID NO: 26486 - protein, 529 aa, synthetic construct
MAKVTVIPSTINPITKLPNNGLQKRKVAGYARVSTILDEQCSSYQAQVDYYTNLIKRNPKWEFVEVYADEGISGTNTKRRGGFNQMMQDALDGKIDLILTKSVSRFARNTVDSLTFIRKLKEKGVEVFFEKENIYTFDSKGELLITIMASLAQEESRSISENVTWGKRKAFSDGKVSMPYKHFLGYKKGEDGRPTIDEKESLVVKEIYSLFLKYGYSTTKIAKEFNERGICTPSGKGKWTLTTVESILSNEKYKGDALLQKKYVVDFLTHKSKPNDGEIPQYYVENSHPAIIDKIEWDLVQAELERRKKLYKTYSSKNIFASKLVCEDCDSFFGRKIWHSNDEHRAIVYQCNGKFKNKEKRCNTPTLREEEIKSMFLEAYNHFVLDKTALVDDCKLMIETIANVSLIDEQISKQIEKMEELAQKVKELVSSNASTLDSQTDYINNYDRLCTMHSIEETRYKFLLKEKNGRLAKAKSMELFIESIKDKPDVIDSWNSDLWILLVDKAIVHHDKSITFVFKNMKEITIAAK

SEQ ID NO: 26487 - protein, 456 aa, synthetic construct
MYKKELAPDLVRVALYIRVSGEEQKIKGLSLEAQQERLEAYARERGWVIVGIYIDAAKTARKNIHKRTEFQRMMDSVKRDEVDILLFARLDRWFRSVADYYKVMEVLQAHNCDWKTTDEEYDTTTANGRLYINVKLSIAQNEADIDGERIDVVFDSKIAHGTVVSGSAPFGFRVNEEKRLEVVPEDAAIVQDAFNYFENTVSQRATVRYVRETYGVNWCDATFRRMLKEKLYTGVYDRGGRYNDQFCPVIINRQQFDRVQALLTRNVRSAPSGKVYIFTSILTCAECGHKLVGYKSSDYFYYRCNQHFQRGRCSHNHSAREDVVEAWLFDHLGEELERCQLEWDVEAAKKKASVARTDKAALKRKLTKLKELYVNDLIDIEDYKKDYQIYVSALNQIPEPAQEAPPDFAAVRRLLDNSFRTIYDTLTREEKRTLWRSVIKEIRIDNDQNITGVVFG

SEQ ID NO: 26488 - protein, 521 aa, synthetic construct
MSLENVCIYLRKSRADREAEARGEGETLARHERILLDLAKSRNYNIGAIYKEIVSGETISARPVMQQVLHEVEAGMWDGVLVVEVERLARGDTIDQGVVSRAFQYSDTKIITPTKTYDPNNEFDEEYFEFGLFMSRREYKTIKRRLNAGRIASAREGKYGGNKPPYGYRRLKLQNEKGWTLEIEPDQAAVVKLVFEWYVNGVDGDRIGMSKIVRKLNDMGFKTMHGGSWVISTVQSIIRNPVYAGMIRWNSRKSIRSIRDGQVAVSRPMAEDYILAEGRHPAIVSRELFDQAQKIVDQNPARPVSSLHVIKNPLAGIVRCGKCGHTMTRKAPSGRQEALLQCPYSSCSTVSSKLSLVENSLIDGIQKLVDGYRLNSDVSDQNFASSIEIKKDLLSEKQAELKKLEKKKEKQYDLLEQGIYSTEIFIERSQTVSVEINQCLESIRSLEQEVIKEQKRLDQQNSFIPRCEDLLEHYWSWDVSTRNQFLQELIEKVVYNKEIKDRKKCDEITFTLDIYPRIQGK

SEQ ID NO: 26489 - protein, 551 aa, synthetic construct
MSRTVAIYARVSTEHEAQLSALENQVQYYDDILKKHPDWILYDRYIDEGITGTSIKKRKNFMRMIEDAKNKCFDLIITREVSRFARNTVDTLQETRRLKKLGVEVYFTEDNIWTFNDEDGELKLTIMATLAQNESKKTSQRVKAGQKISFQNGVFYGTGNILGYDKIGKEMIINEEQANIVKFIYSSFLSGNGTTKIKYELEKRGYLTATGLKIWSASNITRILHNPFYCGTIIYRKSFIPDFLEQKPKKNKGEVEKVVVEGTHQPIISKEDFNKVQQIFGERASKIEKDKSVGYGIPKNIWSKKLMCSCGSTFNRRTYHKKNDESITYCYHCYRQKNLGSSKTREKKGLPIDGTCDVSLIQEWKLNVMARALFEVIYTDKEQIINVINELIDNTINENNNYEEIQSKINSYLKKIEKEKNKIDKLLEMYLSDMIEKENYIKKKKELEELIKDQNIAIDELRQKQDISTETVADRIKNLKKNVLDNIRFDNENTISELVDSYIEKITIYNDRSEWILNYIDGIINLDIKGQERSSKKELYMTPLRKAFRSA

SEQ ID NO: 26490 - protein, 427 aa, synthetic construct
MRIALYARVSTEEQAIHGLSIEAQSEALEEWAKQEHANVVGTYIDAGISARKPASKRPSMQRLLADIERGKIDMVVFTKLDRWFRNIAEYYKVQEILERHGVNWRTIHEDYDTSTASGRFKVNIMLAVAQDEADRTSERIKAVFDSKRKRGEVVSGSVPPGVKIENKKHVVDPDVAPMVQDIFQFFISNHSLYAAQRYAANTHGLRRDITTFRRLLLNKVYRGLVVDEKTFDLAQDLLSVRSQRNSGVVRGRIYLFKGLVRCGTCGSMMSGMVCKEHYYYRCNDHVYIGGCPYEKNIREDYIERWLSEHIVSECDRYNTQAIRARAERPRIDEVGIRRKMTKLKDLYLSDLIDRDEYERDYSELRLSLEKAKEEVPPAEPVDTDYVRSALNMYERLERSEKKEFWMRTIREIIIHPDSSISFTLRNT

SEQ ID NO: 26491 - protein, 573 aa, synthetic construct
MAYNAQNKTGARVAIYVRVSTLHQIDRDSLPMQKQDLLAYAKLMLNTDDCVIFEDAGYSGKNTDRPKFQEMMSQMRAGAFTHLLVWKIDRISRNLLDFATMYNELKALGVTFVSKNEQFDTSTAMGEAMLKIILVFAELERNMTSERVTATMISRANNGLWNGGRIPYGYDYDYETHEFSVNEEESKVVILMHDMYEQERSLVRVVRELNERGYRSRAGNLWSPVSLLIILRNVFYCGDYRYNMLKEGDRQKVKDESEWVTVENHHVAIIPKDQKERIMATLDSNSKLCKQRNIYKSSKHTHVFGGLIYCGSCGKPLGSTPGNLTRDGWYYSKYTCPTRRKSVTLCTGKSTSDPIIGEFVFNYILNMLNAQNDFDKISSPEELEKLLLIGDTFAYIDHIESNGLNDLFNVLSSGAVKGAVFGKGASLPTKKATVEPEVARLRNEKQKTERALDRLRSLYLYADEAMSEAEYMIQKNKLEETLEDINDQIGMMNTDSWQQSVSDEEFIQRASEFIIAQKLSGRKYVNYKRLAMSVDSEVLKNFVVSIIDSITIQDGLVSNIVFKNGLCHTFIFR

SEQ ID NO: 26492 - protein, 518 aa, synthetic construct
MARKTDKPLSNIAVIYARFSSHNQREESIEQQVAECKVFAAQQGLEVTEIYSDAAQSGRTENRSQFLRLQRDAKKGKFTNIVAYKSNRIARNMVNALTFENDMEKLGVKLYYAKEEFGNNAAGRFALRMMMNVNQFYSENMAEDIRRGMEDNAMKCKVNGPAPYGYKSGKSGTYEIDEPAAAVVREIFTRVACGDSFVDIYTDLNNRGLKTRKGNKWGRSSFQSILKCEKYTGVYIYDNIRVEGGMPEIISKEMFLKVQRILGTKGNPQGRHRINGDYLLTGKLFCGECGHHMMGLSGTGKNGLLHYYYGCSGKKEKPRCSKKNVRRDELEYEVARLVQTYILQDDVITWLADTLIKYQEEHSSDGDMTILNTQLSETEKSIKNLMAAIEQGIITPSTKERLMELESEKSKIENNITLLKADTITVSKEQIGGWLDSFRDGNIKDKRFQKRLFDSFLSAVYVYDDNRVRIVFNLCGLNKGDIDTKLMLGDTEAIEKVSDCSYKRCYGSPDLIKVEHLF

SEQ ID NO: 26493 - protein, 516 aa, synthetic construct
MQKNNNIGNRCVIYARYSCSNQTEQSIEGQMHDCEQFAARNNLQIVNSYIDRATTATTDKRPQFLEMIADSKQCVFDVVLVWKLDRFSRNRYDSAMYKKKLKDNGVRVMSAMENITDSPEGVLMESVLEGFAEYFSKDLSQKVKRGMRETAAKHKITNRIPFGYCKSEEDTYIPDPHTANAVRKVFDMYITGFRKSDIADWLNSNGYKTSYGNQFTLTAITPLIKNTRYIGKYYYADNEYTDETQRIVTDDIFYKAQQKAIANQHGGSCKAIERYLLSNKLYCGYCHNKMIGECGKNQNGLAYHYYTCVGRKRKHICNRKNIKKKDIEQYVINAISRLLNDEYAINKIIETAINYQQNDVEHINEIKDIESTIKEIERKISNILSAIEAGIFTDSTKNRLQELENQKTRLTQELNYKNQSSTKIPRTTLKQILKNLDLSKDATNPEKQNIIDLLIHRIYLWQDKILIVFNQSNLCDNEISVDDTDVNTIIKTLSEPNASSSDSVEYGTPDQSRTGD

SEQ ID NO: 26494 - protein, 585 aa, synthetic construct
MTCTVSDKIINCAVYTRKSTEEGLEQDFNSLDNQYEFCTNYLKSLNDPALHLLPTRYDDGGYSGGSLNRPALQRLLADIQCGLVNRVIIYKIDRLTREIRDFFKLLDVFEKYNVEFVSVKENQYYNTTTAIGRLMVNMFLVFAQFERENAGDRIRDKIATSKAKGMWMGGCPPFGYDIGDRCLVVNEAEAQNVRFIYQTFCDTHSLGDTADALNSGGIRTKRYTTRQGRIFGGRKFSVKTVQRILQNPLYKGMVAHRGKQYPGQHAAIIEAAQFDTVQAIFAAHKDKREARRYRKSASAGGRETAALTGLIFCGCCGSAMTPSYCCKGGIRYHYYRCYRRASKLEDKCPINQIRSSELDRVVMEQVLSILKSRDFFAKYISSRHEFDVSTAYALFNNLDEVWNSLFENEKRRIIRELLAKVTIYKDKIILDVKKDGLAGVFAELSQTACPAGVEYKENETFQISVAYRAARLANGAKIIVPATAKEESRFNGSLRLARQIAKGFVWRHQLETGLTLQELSAAESINERDIRFAVRISMIDPAIVESVLSGKSPEFLTYAFMKKHPIPLLWSDQRKLYGFEERKQQ

SEQ ID NO: 26495 - protein, 406 aa, synthetic construct
MATANYIKGQNETKITALYCRLSQDDGREGESNSISNQKEILLAYAQRNNFPNPQFFTDDGFSGTTFDRPSFVQMENLVEQGVVDTIIVKDLSRFGRNYLDVGNYLEIKYPTLGVRFIAIQENVDTLKETGTEMMPFNNIFNEWYAAQTSKKIRAVWKNKAANGKRVSSSVPFGYVRNQQDKEDWLVDEPAAEVVRKIYALCLDGRGPSQIARQLEQEKVLIPTAYYASLGRKTRKQYTDPYAWDQKTVAGILVNQQYTGCTVNFMTTTVSYKVHKTVYKPKDEWQIIPNTQPAIIDEDTWKRVQELREHRIRPTATGRTSLFSGKVFCADCGSKLHFCAAKSLNANQEHYRCANYKSGRGSCQIHFIRNVVLEKIVLEAINSLADFVRCYEPVFLYLMAQKDIAI

SEQ ID NO: 26496 - protein, 434 aa, synthetic construct
MKKTIVNIAPAVAETPRTKRVAAYARVSCGKDTMLHSLAAQIDYYRDYIMMNPEWRFAGVYADESKTGTKDNREQFQLLLTECRSGNIDMVITKSISRFARNTVTLLETVRELKSLGIDVFFEEQNIYTLSAEGEVMLTLLASFAQAESLSCSDNCKWRIRKGFEEGRASTCTMLGYRLVNGEITLIEEEAEIAKRIFDLYLAGCGLQKIANTLNEEGMYSIFGNEWHPTTVRKVLTNEKYCGDLLLQKVYRENHLTKRKCHNTGELPQFFVEDDHPAVVTRQIFMAVQDELKRRAKEKTQPVGSKSSFTGKIRCSCCGKNYRRKITPYNIVWCCSTYNSKGKKYCPDSKVIPEETLKRAVTDILKTDGFSDEAFQMQVCTIEAHPGNLLRFIFANGSTADYVWKDRSRSESWTDEMKAAAAKKAKERYASHDK

SEQ ID NO: 26497 - protein, 548 aa, synthetic construct
MTNKKVKKIEATKPTLSAQYSTFTRKRKVAAYARVSTAKEEQENSFDAQVSYYTQKIQANPEWVFVEVYSDEGITGTNTKKREGFNRMIEDALAGKIDLILTKSVSRFARNTVDSLVTIRQLKEKGVEVFFEKENIYTLDAKGELLLTIMSSLAQEEARSISENTSWGRRKSFADGKVSLGYSNFLGYDKGPDGELVINKEQAKIVRRIYAEFLAGKTPGGIAKGLTADGIETPGHKKVWQASTVLNILKNEKYYGAAILQKEITVSYLTKEKRPNTGELPMYYIEKDHEPIVSPETFQMVQEEMRRRKEAGSNMQCVSIFSSRVICGDCGGYYGRKIWHSNTKHASWHWHCNAKFQKRKYCETPTLKEESLEETFVEVFNGLIANRKEIEENYRLCIDTITDDSEYRRQLEDLNNGCGEVQTLIRSLLMTYSRQDTADDIHEKLKEYEDRLDTMARLKQELDLKIAACAAKRVQITGFLNELMKHDAPLAKFDPLVWQAVINYATVNRDCTITFTFRDGTEKTVPIKNGVRPYTKRNKPQEVDGNDG

SEQ ID NO: 26498 - protein, 490 aa, synthetic construct
MTDKNLLVITPHRKEPGKQRIAAYCRVSSRSDEQLNSLTNQINFYRSLFESDDTALFVGIYAEEGLSGTQAESRPQFMKMIEDCRSGLIDCIRTKSVSRFGRNTVDTLIYTRELRSLGIDVFFEKENIHSTESSGELMLTLMAAFAESESETMSENIKWGKRRRYEQGITGSITLNGMYGFRQNKGIVTIVENEAELVRRIYKDFIDGYSYGEIADRLIAEGVPTRMPGASWAKTTVQHIIRNEKYCGDCLFQKAFIANPITHQQVRNNGELPKYLVEDCLPAIVDKETWKLAQAIAARHTPHKQASNERYPFTGKLFCGVCGKPYYYYHYTTTNKKPLAAYRCMSHKTQSAVEVAGQTYTPPHKATFNRNASAKLIAYRERYCKSPKERPMLCTDVRIPIDLPQKAFCRAWNLIVAKKLRYQATLRSTVDNAEDILVRYRAEEMCLLIDEIGKINEFSYPLMLKTLDRVVVNTNGKLSFIFQSGIKITV

SEQ ID NO: 26499 - protein, 529 aa, synthetic construct
MSRTAARSVTVIPPTINPLTHLSKVAVQKRRVAGYARVSTDSDEQFTSYEAQVDYYTQYIKRNPEWEFVKVYTDEGISGTNTKHRIGFNEMIADAMSGKIDLIVTKSVSRFARNTVDSLVTIRKLKEKGVEVYFEKENIYTFDGKGELLLTIMSSLAQEESRSISENVTWGQRKRFADGKVNLPYKQFLGYRKGADGFPEVVPEEAIVVRRIYTRFMEGLTPGAIAKELTADGIPTPSRKQRWQTSTVESILQNEKYKGAALLQKCFTVDFLTKKRKVNEGEVPQYYVEHSHEPIITPEEFDKVQTELARRKQISRQYSGKSIFSSRIVCGDCGSYFGSKVWNSTSKYRRVIWQCNGKFKGEHKCETPHLDEETIKARFVTALNAIIESKDNILEDCRLMQATLTDCTGIDAEIESLLEEIEVVTELTKRCIAENSQTAQNQEEYTARYNGFVERYEKAKAQFEQLRTTKAEREAQAEAIGAFMFAVQELDTITEFDEKLWLTIIDTVTVHADGRMTFKFQGGKTFTSY

SEQ ID NO: 26500 - protein, 434 aa, synthetic construct
MKRVVERVDALIPAQPRALRVCAYARVSTGKDAMLHSLSAQVSYYSKMIQSHNGWMYCGVYSDEAVTGTKRERAGFQHMIEECRQGNIDLVITKSISRFARNTVTLLQTVRELKSLGVDVFFEEQHIHTQSSDGELMMTILASYAQEESLSASENQKWRVRKAFENGEIINLRFLFGYDITPDGIRVNETDAAIVREIFARFNGGESMSSICRDLDARGHKGVLGGTWCAERMRNTLSNEKYLGNALLQKRYRNNHIEKKLLPNRGELPMYYAEGTHEPIIDQATFDKAQERLRMLAQQAANRKKPTRSVFSGLIHCGLCGNTYKRVTYRKKHYWNCTTFQTKGKSECAAKRIPEETLETLTCEVLGEGSIDSDMFRSKITAIRAEKSNMVVFCMDDGSEIVKRWTDRSRAESWTPEMKEKARQRALQARRKKK

SEQ ID NO: 26501 - protein, 536 aa, synthetic construct
MQTGKITALYVRFSYDDGIDAESGSIEHQKSLLRSYAESNGFTNLSYYADDGYTGTNFNRPDFQRMLGDIHKGLVSTVIVKDMSRLGRNYLMVGQYVEIEFPKHNVRFIAISDNVDSAKGMNDLLPIHNLMNEWYSRDISKKVRAMIRQKGNSGQSIASKLPYGYYNTPEDKQKWLIDESAANVVRRIFELYLNQSFGMYQIARILKAEGIPRPTYHRRMAKGIKVEADDLCVWSASVVRDILQHREYIGDTVNFRTEITSYKNKKVIHNSDDKLKIFPNTHPAIIDKETFQKVQDKISKEIRHTRNVHSYLFADYLYCMDCHSRMHGRQCYLKGGRTLSAYECSTYRKSKGCCFHGVPEMYLQAEVLVKIQNVLAFAKSNSAEFRQNISKALEEQSDGSKAVIEEELDEAQARTAEIDKYIQGLFEAKVRGEIDGSLFASLKKTYDEEKEQLNKLIIDLITKLSRENEADEKIQLLYAAIRKYDAVWELTPEVLTDFIEKIEVGQVSAENKKISFELRDNHISVFFWGVGIIDFM

SEQ ID NO: 26502 - protein, 526 aa, synthetic construct
MPKVTMIPATVNSLTHLPKASVQKRRVAGYARVSTDSDEQFTSYEAQVDYYTRYIQSKPEWDFVRVYTDEGISGTNTKRREGFKEMIADALAGKIDLIVTKSVSRFARNTVDSLVTIRKLKENGVECYFEKEGIYTFDGKGELLITIMSSLAQEESRSISENITWGQRKSFADGKIHLAYKHFLGYKKGEDGRPAIVEEEAVVVRLIYRLFLDGKTQAGICRYLEDLEIPSPSGKAKWSKTTVTSILTNEKYKGDALLQKSFTVDFLQKKTKLNEGEVPQYYVEGSHPAIIEPDEWNHVQAEFARRKALGNAYSGKSVLSAKLVCEDCGGFFGSKVWHSTDRYRRTVWQCNNKFKGGERCLTPTVDTETVQQLFIKAYNQMMGNRKQIIEDCELMRKKLTDFKSLDADIERHLEETQIVAELVKAAVKDNAVTAQSQEAYLKKYESLTKRYETAAAELARLQNLRTLRSQKDKAVALYIRTLKKQPTVLSEWNDTLWTVMVEKAIVHRNSEITFVFYNGTKVKVRQ

SEQ ID NO: 26503 - protein, 502 aa, synthetic construct
MEIQIREGNSRQKQKLKVCAYCRVSTDADEQENSLENQIRHYKEVITSNPDYEYAGVYSDFAISGFKEKRPGLQKMLADARKGKIDLILTKSVSRFARNTSIVLEATRKLKELNVGVFFELQNINTLSGEGELILTILAAFAQAESESGSVGAKMVYQRKYEAGIPVQYLERSFGFKKDERGVYIADEEEAVWVRKIYDMAAQGYTLAAIKRYLNENNVKTVGGAKWLDSTVLRILENEIYKGDYIMHKYFVNEERKLVRNRGEVDAWYIEDDHEAIVSPKLWQRAQDALEAKRDYLAEGSVIEEFTEENYPYMNRIYCARCGHPLYKRIYSNGNRLNWGCSGTKRYGKSFCEGINIPDGVLRGAWHFDENMYIGEKQTDKGKKEFTYLKEASWKRRHKKKEPEPIPENTETEYPYREKIFCGLCGSRLVRHVNTKNHKVIWVCNGRKRKGKDFCDGTRVPDTIIKGWGEIKKDIYIQRKDDKNGKKRYSYTSKKPKGADRA

SEQ ID NO: 26504 - protein, 464 aa, synthetic construct
MARSVTVIPARSQKVRTGHKAVQEKKIRVAAYCRVSTDQEDQLHSFEAQVEYYTKYINEHENYEMAGIYADEGISGTNTKKREQFKKMIADCEDGKIDLVITKSISRFARNTQDCLAYSRKLKNLGIGIIFEKENINTLDSTGELLFTILSSLAQDESRNISENCKWGIRTKFKNGEMHLNTFKFLGYDKDENGKLVINKEQAKTVRRIYRDFLIGINPAQIAKELTEEKVPGCLGQTKWYPSTVTGILKQEKHMGDALLQKTYTADFLTKRQVRNNGEIAQVYVKDSHKGIIDKQTWNAVQEEFDRREKFMESHGTDRYSYGADCMPFCEKVFCGECKSLFTRHSWSSRGIVQWQCKNHRKDGKVACTNAYVDNADLEKGFVKAFNRLVTDRDKHMERWQQMKSDGTPLEKIRAGQMMEAVGNEPLTRFVPEIAQLVLCEVTVLGAKKYEFFFLEGSRVKVSV

SEQ ID NO: 26505 - protein, 503 aa, synthetic construct
MYNDSKGIYLMYLRKSRADEYNQDVENILKRHEKELQSLAKREFGELIPEKYIFREVVSGGTIKDRPLMKEILKMMESGIIAGVLVVDPQRLSRGDLLDQGHIINAFKYTNTLIITPYKTYDLNDTTGTDMKLLKMELNHGADYLDYYKMVQARGKLASVRAGNFIQPIPPFGYRKVRYGKVTTLEPIEDEARIVRIIFQKYAEGKTICGVTNELNAEGYIPPSKQIWTKGSVKRILSNPVYDGKIRWGFTPNKTVMEDGKLKKYRPERHDYLLFDGKHDAIVNHVLFMSVQERLSKNKSFTNDRSLKNPLYGIMYCKRCGRKISRLNVAESRGGHRYACPNKLCDVQSSRYDLVIEAVIDTIQCAIDDFDITFHDCNSSGSDEKIRELRQELTRLNNKEDTLFELLETKVYSTSVFTQRHAELEKKRQEIIGKINTLSLIPPPESCNNKEMRFKDALLALKDESMPPKEKNHLLKKCIERIDYDIEGVRYHSKVKLDVYFKF

SEQ ID NO: 26506 - protein, 518 aa, synthetic construct
MVAIYVRQSLDKKDSLSIDSQIEDCITLCKRNGWNDYKVYRDKGWSAKNLDRPSFQQMNEDVLNGKIEAVVCYKIDRISRSIRDLVNLIEDYNEIGVHFVSYSDNINTAAPGGMMLATLFGSLAQMEREAIIARVTDNYYYRCEQGFWGGGPAPYGYRLKKVMVNGQKHTVLEQEPAESAVVRQFFEWYLEPGGTVYKILQKADEQNIMTRKGKSWTSRVVSDILSKPVYAPNTMDIYNYYASQGVKLRIAPEQCDGTQSVNLFGKRDRGSKHPKRSRPASEMTFAIARHQPIIDSDQFLRVQFKKKATLATTPRTGTSHITILSGLVRCGDCGRAISPSGSNRGVRYFICSGRRNYASNACSSPSIKMHKLEEIVLAHTLQHYSLPEIIQVLDKFNNHTLSPQESVRVNTLKQELAKTENEISSLIDACLVSNPTAISYLNDRIEKLDQEKKKIVEKITALKNSKSDLQELLQNIDIENLPEIFAGDDFDLKKYVCHQLIRKITFYNQEHIKIEYTV

SEQ ID NO: 26507 - protein, 528 aa, synthetic construct
MELQTRNVTIIPARTYLHRNHTEEKPKCRVAAYCRVSTDNDEQATSYETQIEHYTTYIHNHPDWKLAGIYADDGISGTNTKKRDEFNRMIEDCMAGTIDMIITKSISRFSRNTLDCLKYIRQLKNKHIPVFFEKENINTMDSKGEVLLTIMASLAQQESQSLSQNVKLGLQYRYQRGEVQINCNEVQINCNHFLGYAKDENKHMVIVPEEAEIVKRIYREYLECASMLKIARNLTADGLKNGAGHSKWRDSNIRQILQNEKYMGDALLQKTYTVDFLTKKRVKNTGIMPQYYVKDNHEAIIPRDIFLQVQEEMVRRSSIHLKNGRKLTYSSNHCFSQRIRCGKCGEIFRRIHWNNRGKKSIVWRCVNRVDNTGKCDARTISESALEQVCLTAINQVLCEKKDFLTMLQHNIETVLSHNNDKTLAAIDIRLEELQTQLVKLASSKAGYDDVAEEIYHLREQKQQALAKNANQDEIRSRIENMATFLKTTSTAITQFDDYLVRQLIKTITVFEDSCTVEFKSGVTVDVEK

SEQ ID NO: 26508 - protein, 592 aa, synthetic construct
MPNLRKIEAAVPTIREKKKVAAYARVSMQSERMLHSLSAQVSYYSGLIQKNPDWEYAGVYADDFISGTNTVKRDEFKRMLADCEAGKIDIILTKSISRFARNTVDLLETVRHLKDLGIEVRFEKENIRSMDGDGELMLTILASFAQEESRSISDNVKWGTRKRFEKGIPNGRFQIYGYRWEGDHLVIQEDEAKIVRLIYDNYLNGLSAETTEKQLAKMGVKSYKGQHFGNSSIRQILGNITYTGNLLFQKEYVIDPISKRSKINRGELPQYFVENTHEAIIPMEVYQAVQEEKVRRREIGALANWSINTSCFTSRIKCPLCGKNYRRSGKRQRKNPDEVYYIWICRTKSEKGAKSCPAKAIPEKALKNACAEVLGTAEFDDAVFSAQIEQLYVVGDDTLEFHFYDGSVLEKKWKSTAKKDWWTEERRAAWGELHKHKATNPNRRRFYEFTGLIKCGQCGESFRCQSMTRKDGTRIRSWHCGRTCGNTNIRDEILKSMVCDVLGLDAFSEESMDAALEKITVNGTAVRFHLRDGSVAEREYTQPKRKGTKHTEEFKEHMRQLMKAKWKEGKMHGTKKSDNHSSHDQPVHGGAD

SEQ ID NO: 26509 - protein, 543 aa, synthetic construct
MEVQKIPKRTVTLIEPKKSILVDKEKYHQKRVAAYCRVSTDSEEQLTSYQNQMRVYTEMIAANKEWEFAGLYADEGISGTRADKRPEFQRMIRDCQNGKIDYIITKSVSRFARNTVECLEYIRSLKAQGIGIFFEEQNIDTLKSDSELYLVIYAGFAQSESESISKHITWTYRKNFEDGKVSFQYKRLLGYRKGEDGKPEIVPEEAAIVERIFEMLLAGQPVGLIAQTLQSENIEIPGKDLSFSKNMIMNILRNEKYCGDSILQKTVTVDCISKTRKANHGEAPMYLVENSHPAIISRDIFHRTQEELARRKALRPKSDKTSITQSGKYSKYALSEVLHCAECGSRYKRVTWNIRGKKKIVWRCVSRLDYGKKYCKDSVTVEEAALHGAVVRALNRFHAEDESTYLTLMKATIGEAIGINGGSEEIDLLTRHIDALNKRMLELVNETVAAGKDVESSEDEFKSISDQIEQLNRRIAAIQESVRGDATRQARLEEIQSIIAKRNANETQYDDSIVRQMIECIKVYGDGRLTIIFGGGYEIEETL

SEQ ID NO: 26510 - protein, 513 aa, synthetic construct
MPVAKLIAPTTKQEIPKLRVAAYCRVSSNSADQRNSFATQEHVYTKYIAEKQEWELVDIFADEGLSGMKADNRPEFQRMIRMCELHQIDLILTKSVSRFARNVKEALSYTRKLKLLGVGVQFEEDGVNTLAMADEMLLNTFAAIAQEESKSISQNQRLSIVKRMESGEYIASNAPYGYRLIDKKLVIYEPEAEVVRWIFAAYLNGMSTVEIAHELSAKSVLTKGKKEQWKANRIAYILSNEKYDGDTLFQKYYGEETVPFKKHRNYGEMDQFFARNTHNAILPQGMFQAVQTLLQSRGRKFGKRMTQAEYPLTSRIRCSECGSFYHRKVRSGVIKWVCSKHAADTTACNSNYYSEERIYDGIITMINKLRFCEEDILGQTIQKLEFAAAAHKRNNRAVSQLSQSIAELNAKLLALERLRTKGYLAADIYHTQAREIRQQLDKLKTERYSSFESKILTMLEDVRKLKSLIDELEQPLEVFDEKLFHEIVTDICINHHDEMTVTLLGGLRFTEQI

SEQ ID NO: 26511 - protein, 524 aa, synthetic construct
MGKRVTTIPATLNLYDSVSLKNPQKRKVAGYARVSKDIEEQATSYAAQVDYYTAYIKKNPEWEFAGIYTDEGITATTTKKRNGFKQMIADALAGKIDLIITKSVSRFARNTVDSLTTVRELKENGIEIYFEKENIWTFDSKGELLITIMSSLAQEESRSISENVKWGKRRAFANGKGSLSFNTFLGYDRGPNGEFVINEEQAATVRYIYEKFLEGFSAYRIAKDLTEMGIKTPGGKEKWANSTVLKILKNEKYKGDLLFQKTYIKDFLSHKSVRNNGEIPQYYIEDHHEGIITAEQFDQVQLELYRRKKIKKYSGISIFSSILKCGNCGGWYGSKVWNSNTKYKKTIYQCNKKYKNRCKTPNLSEYEIKQLFVQVVNQLISEKEEIIKNTEEMKKTICDMNSLTMELKDKTAEINTVVEQINNIVIQNSKVSLNQDEYNKEYFRLKRKYDTIASEIDRLSKQIKEKDLQGKLFDNFISTFKKQNETISEFDEFLWSGLVYEIVVYTKQDVRFFLKNGLEIDTGL

SEQ ID NO: 26512 - protein, 560 aa, synthetic construct
MYHQSNTAAALQFPYNAMSVEAVTALYCRLSRDDELQGDSNSIINQKKILQRYALDHGYKNYRFYIDDGISGTTFNRPGFQQMIADIEAGLVKRVIIKDMSRLGRDYLQVGMYTEIMFPEHDIHFIAVNDGVDSTQGDNEFTPFRNIINEWYAKDTSKKIRAVMKVKGNAGEHLTTLPPYGYMKSPDNKKLWVRDEDAAAVVYEIGLYVMDGFGPSQIARKLTERRILTPAAYYASRGRKASNIKRGLPYAWDASTVADIMDRWREYLGHTVNFKTRKKSYKSKKVIHNPESEWLIFENTHDPIWTEAIADAARAARLTRRRPTKMGEMGMFSGMMFCADCGSVMYQCRATNFRREQEYYLCAGYRKSRDFCGQTHSIRTVILEELILENLREIVSFASRSKDEFVRLVMDSDLRQRDQDLAKRKRQLADSEKRITELDAIFKRLYEDNISGKLSDERFQKLSVDYEKEEQDLKVLTSSLRKEVELEESKSADVDRFLSVVERYTDIPELTPCILHEFVEKIIVHAASDPKGKNRTQEIDIYYKGIGALEMSKVTASMEK

SEQ ID NO: 26513 - protein, 516 aa, synthetic construct
MARKKKVSPGNRLVAYYRYSGGSQQTEQSIEGQRRDCEAYARQHGLTIVHEYIDRHISGRGVESRLAFQQMIADSSKHLFDLVICWKTDRFARNRYDSAVYKKKLRDNGVRILYAAESSVEGPEGIILEGLMESLAEYYSAELAQKMRRGMRESALKGRAINPSRPLGLTTDEHKRFIIDEKNAPTIRFIFEHYAAGESSASIVEQLNAAGLRTSKGNAFNKCSIPRIIQNEAYHGVYICKAYDVRIDGAIPAIIDDDLWKRAQKMLTLNKQHRAPHSSHADYLLSGKLFCGCCHSLMRGISGHNCRNDVYYYYACGNKADGGTCKKKNIQKDVAENLVVNAICENILRPDTLEDLADAIAAAQQADVNQPDPERAMLEQGLADVRRKINNIIESIENGTASSRLSARLADLEQQESTLNYQLESLKEIHPPVLDRERILFLLEQFLISPNERTEDYNRRIIDTFVNRIEITDTEMLIYFNLSEASASEKQKNSQPNSCSTGNHLVRVARIELTAS

SEQ ID NO: 26514 - protein, 600 aa, synthetic construct
MIDNCVRAVFYARVSTQEEEQLKALPKQVEECKDIIASKGWRLIDGYVDEGKSGTKKDGRKAYIKLLEDMQEDKFDIIVVKSQDRLQRNTFDWYKFADLLNKNNKRLYLYMDNKFYEPSEDALITGIKAILAEQYSRDLSKKLNNYHEHRIEKARAGEEVPAMGNGQTYGYQLINGKWVVDESQRELVRKMYELYTDLHSVRKVRDALNEQGYRNQRGNLFTDENIGRIVKNVMHKGWVILNRHHKEFDSKETIKKLEDEWVIVKNDHEAIVSEELWDAVNDEIQSHRNKGNSGTRGKRGGTDPLSGKMVCNCCGRVLWKHASQGSYKSKEGRKYTYKRYTQWYCSGKMGRGELACTDPATISGVKLQKYLVEMADMFLDYSTVEYSKNLLKRRTISWLEDLKDKLTTPNDNGKIEQDLKALEGKRGKLIDLYTDELISKEEFKSRSVDLDAEIEKKRALLVPVEENPDIKAIEDTIANIDAEIEVLFEDEAMVEEKKVQFIQEHIKKIYVSKNSDVFIVLDNVAGAFLFIDKEDTRIEVVPVAEYNPEELSEEGITENDFVPFDRESMPQHHGPKHLHPSGPQTAPRCCFRDRFSCDQP

SEQ ID NO: 26515 - protein, 491 aa, synthetic construct
MYLRKSRQDNPEETVEEVLFRHEIQLQEYALKNFHYRIAEEDIYREVVSGETIEDRPEMKKVLKLIESSTVKGVLVIEPQRLSRGDMLDCGTIVHVFRYTNTLVVTPPKTYDLTEKYDRKFFEMELSRGSDYLEYTKEILNRGRVLSRKQGNYIGSVAPYGYTKIKNGKEHSLVINEEEAQYVRMAYDLFIQGHGSHYIGEQLEAMGAKPRKAKHFTPANIRKMLRNPVYIGQIVLNRSQSVKVYEDGCLKTKRVYNPDYETVPGKHEPIISEEIFELANSEACRKARVPSSKEIRFIFAGLAKCSVCGGSLGLKIHTGREHPYRVGCLKKKYCTNTSILYEDFIDLVVNALKEQIQDFEVQIETNVYKEAFETQSLLESLTKRLEKTDEKMGQLCQYLEEGMYTPDMFVKRRDTLIQEKDELQKAVKEARKKLSGMKDIKEKTSSLHEALNLLRDDSISPRLKNTFLKKIIKVIYFSRINDEIVLKVVLR

SEQ ID NO: 26516 - protein, 587 aa, synthetic construct
MRIVNKIEAKTPQMPRRKRVAAYARVSMESKRLQHSLSAQVSFYSSLIQSNPAWEYVGVYADNGITGTKAEAREEFNRMIADCEAGKIDIVLTKSISRFARNTVDLLNTVRRLKELGVSVQFEKERIDSLTEDGELMLTLLASFAQEEIRSLSDNVKWGTRKRFEKGIPNGRFQIYGYRWDGDHLVIHEEEAKIVRLIYDNYMNGLSAETTEKQLAEMGVKSYKGQHFGNTSIRQILGNITYTGNLLFQKEYVADPISKKSRINRGELPQYFVENTHEAIIPMEVYQAVQAEKARRRELGALANWSINTSCFTSKIKCGRCGKSYQRSNRKGRKDPNANYTIWVCGTRRKTGNAHCQNKDIPEQMLKDACAEVMGLDTFDEIIFSEQIGHIEIPAPNEMIFYFKDGRIVPHHWESTMRKDCWTDERRAAKGRYVQEHQLGPNTSCFTSRIRCDSCGENYRRQRSRHKDGSFDSVWRCASGGKCQSPSIKEEALKNLCADAMGLEEFSETVFREQIVCIHITAPYQLSIRFFDGHTFEAAWENKRKMPRHTEERKQHMREVMIQRWREKRGKSNDNTGNDKPIHGNAD

SEQ ID NO: 26517 - protein, 527 aa, synthetic construct
MAKVTTIPATISRFTATPINEKKKRRTAAYARVSTDSEEQLTSYSAQVDYYTNYIKSRDDWDFVSVYTDEGITGTNTKHREGFKRMVADALAGKIDLIVTKSVSRFARNTVDSLTTVRQLKEKGVEIYFEKENIWTLDSKGELLITIMSSLAQEESRSISENCTWGQRKRFADGKVTVPFKRFLGYDRGPDGNLVLNKDEAVIIRRIYSMFLQGMTPHGIAARLTADGIKSPGGKDKWNAGAVRSILTNEKYKGDALLQKSYTVDFLTKKKKVNEGEIPQYYVEGNHEAIISPEVFEMVQQEMERRSKRGRRSGVHLFSGKIRCGQCGSWYGSKTWHSNDKYKKTIWQCNHKFDGDHKCTTPHLTDEDIHRYFISAVNQLLAQKDAIIASLTGGLALAFDLAPLQTQEAALIEEVQMLADAVEKCIYENAHVALDQTEYQKRYDGLVHRYDEAKAQLDAITEQIADKKARRATSEEFLKVLERQDGLVTEFQTNLWCGLVDFVTVYARNDVKITFKNGSEIFVKDFE

SEQ ID NO: 26518 - protein, 486 aa, synthetic construct
MNGVIYARYSSENQREESIDGQLRECTAFAQHNDIQIVGEYIDRAFSAKTDNRPSFQKMIKDSAKGEFDVIIVWKLDRFARNRYDSAHYKNILKKNGVKVVSATEAISSGAEGIILESVLEGMAEYYSAELAEKVSRGMKENALKCKYNGGSVPLGYYIDESKHFQIDSSVAPFVVECFEHYADGMTMKQLRDELNMKGVKNSRGGKLSIDVISRMLTNRKYLGEYTFQDITIKDGIPAIVSTSLFEKVQDRLTKTKKAPSSHKADDDYILTTKLFCGKCKSFMVGESGTNAQGKKYRYYKCVNHKKHQGCDMKSIRKDLIENMTIKYIREFLNDEDLINTFIDLAYDAQHKENEQLPLLRKQLAQTEKGIKNIVDAIEQGISTKSTRERLLDLEQRKNDIEMSISKESIENPMLTKKQFKFWFDQLKKLDISKSEQRQKLVDLFVNSIIIYDDHIKFFFNYKEHTETITFDELNNCSDLPDSPRP

SEQ ID NO: 26519 - protein, 513 aa, synthetic construct
MQENKQNLRFTALYCRLSSDDELKGDSNSIIHQKQILQDYALKHSLTPTEIYVDDGFTGTNFDRPDFKRLLSDVENDLVKTVIVKDLSRLGRNYLKVGYYTEVLFPEKGVRFISIADNLDTSVNDELNDFIPFKNIMNEWYAKDLSRKQRAVVKSKGNSGIRLATRPLYGYKKAENGDWLIDEPTAAVVQKIFDLYLKGYGPVSIANYLFANKVKIPSTIGLPKLNPEQNPYRWSKDTVAKILTCQDYCGDMINFKRSDVDSLVIFPDRQEPIISREIFAEAQKLRLDRKPVRHDYSEPVLFSDLLLCADCKSRMYAQRRYHGTTSYSCSKARKTQGCTSHYINENKLIDCVKSDINKLIKNKGIVIKLAKEKMHIDTKTAQCANSQNLKNAKKRILQIDTILKNLYEDKVLGNINLATFKKLESDYLREQAELNKVIFEQSKIKVNLENRSKSICGFLKKLESYNNPVSELSRDLLIDLIDKIEICEATKNGNERSQQVHIYYKEIGKINLE

SEQ ID NO: 26520 - protein, 516 aa, synthetic construct
MPKTEEKQAAKAVIYARYSSDRQREESIEGQLRVCEDYARRNNITILHTYADRAMTGRSDQRPEFQMMIRDAATMAFNVILVYKLNRFARNRYDSAKYKHKLKKYGVKVVSAMENIADDPSGILLESVIEGMAEYYSAELSENVLRGMTQNALEGKWPGGVIPLGYKLDKGGRLIINEEKAPIVRMIYQMFLDGMSVARIERKLNDKKYTTDAGKVFSRSRVYYILHNERYIGTFQWKDIKKEEIIPPIISKEAFHAVQERINAMKSSSYRTNNNYLLAGKAFCASCGAKVSGTSGKSQNGNKYCYYGCSHHHRSARYEYCETKNIRADVLEKLVCDKTHEILSSKKAIKEIARQAVKLRPRDESELEIRAIKNHISSCQKKIDNCIKAIENGVMSNALVESLNENERTLDVLKEKLAKASLMQGSGLLTEEKIQFFFETIREKAKETEKYNDILLTSLVRAVYICNEYVEIQYNYAEQLPILTNPVRIESCSYKCTNGGTIWIRTKDLFDVNEAL

SEQ ID NO: 26521 - protein, 444 aa, synthetic construct
MAAYCRVSTDQEEQLLSYENQVNYYTNYISENPLYEYAGTYADEGISGTNTKKRDEFNRMIADCRAGKIDMIITKSISRFARNTLDCLNYVRELKDLGIGIIFEKENINTLDAKGEVLLTILSSLAQDESRSISENCTWGIRRRFETGKHKMSTKRFLGYDTDETGKLVINRTQEPIVIRLYQEFLDGKTTDYIKRIFEREGVKNWDGGTKWQSTTLMSMLENEKYKGDALLQKSYTVDFLTKKRTQNKGEIQMFYVEDDHDAIISKRIWECVQLEIKRRKKYLEEHGTNSYSHRPESNPFASKIICGDCNKVFARKGWRSSTGVDRKVWQCSERYKVKGVMGCVNRHVEEETLIKAYLMAWNALVENREDFMEQWTEQLQSENLLEGYRAEKFIEYTDGAEPLTEMDTDFMLKTLDHIKVFEDGTLLVVFLDGTEIECKNEEE

SEQ ID NO: 26522 - protein, 422 aa, synthetic construct
MINKRPASVLQKKRVCAYARVSTDSRRQEDSLENQMETYERMITGNPEYEFIGVFADQGISGYCENRPQFQRMMEKARAGEIDLIITKSISRFARNTVTVLKFARELKELGVGIFFEEQNINTLSGDGEMMLAVLASFAQEESRSMSENNKWSIRKKFERGEVMITTSRFLGYDKNEYGDLIVNRKEAEIVSLTFDLYLLNVGSSRIGELLDYLGVKTVTGTTWESGTINGMLCNEKYKGDFHLQKYYTPENKRNHTRKNNGEVQSYYISENHEPIVSPEVWEKVQEVREQRKRDRNIGQDSTMKFQNRYPLSGMLICPYCGKTLRRRQVYKKKIQWLCSTYIEKGVKACKGIRIDDAELQGLNITEQTVIEEVVKNGKKHYCYTSKADFDCGIRNSTVSAEIEDGSVLPSVNRPRRTVIKL

SEQ ID NO: 26523 - protein, 463 aa, synthetic construct
MTTKVERCAIYIRVSTTEQMMHGKSLEAQKEYLTNYAREHNMAVVGVYADEGKTARKELKKRKAIHSLLQDVEAGKIDVIIFWRIDRWFRNLSDFYKVQDILDNHNVRWISTSEPGINMETRDGRLQLNVVLSIGQNEVDTTSERIKFVNEASIRSGKLIFGDVNMGYGYKSGIVDGQKRMIKDPDREHVVDAFYKYFFKHQNKCATLRYIQETYDPDFSFGIMRTLLSSEFYKGTYRGFPYCPAYLTEDEWNKLQKIQKRNVKATPSGRIYLFAGMIRCPVCGQKLCGTGCSSIINRKTGAKRTYCYYRCNRAMIDHICSYRHRLSQNLVENYLLDNLENEYKNYKVKCEKIEKEKEKQKKKQSPEKLRKELDRLNFLFQKGRIEWDYYNEEYSRVESELNNLQKVLPEPAPNYSYLEELLNTDFRTMYDQLSQENRRAFWRSIIQEIHINEDSTITSVDFL

SEQ ID NO: 26524 - protein, 506 aa, synthetic construct
MTKIITAGIYVRVSTSEQAEQGYSIQTQIKACKDKAYELGAIDILEYADEGFSGAKLDRPAMTRLRDDIRNHKLDIIICYDPDRLARNLAHQLLITDEIEKYCREGLIFVSVSFENSPEGRLFYSMRGAFSAYEREKILERIIRGKKGKLQAGRLGNNHLYGYDFDKDTQMYVINENEAKIIRQIFEWYISGISSEQITDKLNANNIPKIWQGKRYKWSGSTVRTIIKNEKYTGIFHGWQYLQVINKCGGYSIKKKDKSQWIDIEIPAIISNEIFEKAQKQIIKNRTYNTRKEKEVHLLTGLAYCGSCGNKIYNHHNVRRKYYVCSILYDKRITDKKICKPKFLHIPEVDELVWNALTKICSSPKLIKEYMTDINNHENTFLNYKEKLCMLDKKLTKLKNSQNDILEWFSDGLIDKETAQKKLENNKQKIEQLNSNKKELLINISNLKEKHTPEDIYNIFKKSAKISIDDKRNILRSILDKIYLTKLDKSKECKSKLSLKIVFVFK

SEQ ID NO: 26525 - protein, 518 aa, synthetic construct
MIEQIKAALYVRLSQEDRNKLHPEDNSESINNQIMLLKSRCEKEGWIIYDIYNDDDFSGSDRQRPEFNRMIEDARLHKFDVLLCKTQSRFCRDLELVEHYLNYMFPVWNIRFLSIIDNADTSNRQNRKARQINGLIDQWYLEDISENVKAVLSAKRKKGEWVGSQAPYGYAKSPEDKHKLIIDEPAAKIVRYIYRLYINGLGYASIVRRLNDEQIPPPAKYKNLKEVSSHKKTATRGLWCYYTIQKILSSQVYIGNTVQGKSEKLSYKGEERRYKPQSEWDIVENTHDAIVSYDTWHKAQIIRSTRSTPYKQDMKNTVFSRMCKCVYCGATLNKHTYHNSPMLECPTKHIKTGICPGCVITVKRLEEIVIDEIKDHCQRLMDVSAVKSKIDSNVEINNRRQEILKSIESAIKKQKLLKNRLTSLYMDKADGIISINDYYQFKNAIDADSVEIDTTIKLLESKLLSIDDEIKALESNHTIVTQYSNIEKLTHNELMFLVDYIEVGGTRDNRIVRIHWKF

SEQ ID NO: 26526 - protein, 572 aa, synthetic construct
MASRIAEKLAAKKAAIYIRVSTHWQVDKDSLKVQRRELIAYVTLVLGITDYVVFEDPGYSAKNTDRPEYQAMMDRIRTGEFTHLVVWKIDRISRNLIDFAAMHDELQSLGVTFVSKNEQFDTSSAIGEAMMRIILIFAELERKTTAERVTAVMLSRASDGQWNGGRVPFGYSWSKEAKAFSIVPEEAKAIRRMAELYEQYQSLLYVAKYLNDAGIVTKTGGQWTPTTVRTILTNPWYIGQYVYNVHSDGKGIEKRDSDEWITVENHHEPILNEDVFCRMKFLLTRNKRGGVPSHKTYVRKNIHVFAGLLRCGQCGSNMTANLDRRRANGFRPSQYACGSRRRKGTSCTNKYISDTTLGPFVLNYVANIIRASKNSSEATTPEVLERKLLRGEAFEDVASVSTDALGQLLDAFRSAGDAVEYRPQIAFSGDDNSIREIDTLRARRRKLDNALARLNALYLYDDEAMPEKDFVMQRGQITKQLEEVNARIEELQNQESSEELGDGFIGKASYYIMANKLIEDRYIDYEKYIRAIDPSIPHSFLQQIIDHIVVNDGRVTSITFKNGATHTFTYKT

SEQ ID NO: 26527 - protein, 559 aa, synthetic construct
MNIYTLIEKMTLEHKTIFDMQLRVAFYARVSTTKEVQLNSRDNQIQTFTELIQKNSNWTLIKGYVDTVRGETAANRNNFMRMIDDAKLGKFDLIVCKEISRFSRDLIDSISYTRELFKNNVGVYFTSDNLCTIDRDSELRLGIMASIAQQEVARLSERIKFGHKKAIENGVVMGNSRIFGYIKNDGKLVVDPYESKMVEKIFQMYSTGDYSLRNISEELYKMGYKNHSGNMIAHTTIKAIIKNPKYKGYYCGNKVKVLDYRTKEQKFLPEESWIVYKDETGEKVPAIISEEIWDRCNAMLKTRCTGTKGNIGGKRFTSPLSSKIFCTHCGKNYHHDSYGHKNGKDNVQWHWICSEKKKRSSNCPSFAIKDDDMLKIIKKFLVSFIGDMDKYIEKYLTVYKSQFSNNKIQVTLKSIETEIKKYQNKKDKLLDLYTDEIISKEDFKIKNEKIQAHLDELNREKESLCGGKHSIEKSISQLKDIKEYFNNSNVTVDNMSDTFAYELSKTIIKRIEIEPIDKITANIVFYTNFSDNFKMSIAKECRGKANCSGMTNGHIFLTI

SEQ ID NO: 26528 - protein, 558 aa, synthetic construct
MDKKILCIIRASTEKQETESQKKELVAYCITKGYAVEEMEFIEVAGASAVKLNKKYIQMLEDIKATILSIPTITAVALWHLNRLGRVESKLHEMKEWFLQHKIQVYCKNPDFPLLDDTGKESAAGSLAFSMFASVVKFETDEMFAKMKRGRERNKVNGIFYGGKIKFGYTLDATKHFIINEEEAQTVRLIFNLYSSGKYSFYDLIEELKARGITKGGMKITYEMIQNALADEAYYSSKILPSIIDKELFDKCAAIKANTVAVKRTKESVNVNFAVGLLKCKCGNNFIANGDFYRCYSKINQQRKKKVVKCDAPIIRRDIMDDTLWLVTRLLQQRFLMDKDSVDISEQKDKINVLTAKLSTAQKGLSSIKDRKEKLEDAYYVDGEMNEAQFKKRLASLHSKEVQTESLIRNYKTEIEDIQKVIKQIELPSNDRYLQSLLLSDLDVEELEDRKKIKEMMFNHIDKVTVNRVMKGNHKCVEITITSKTKLTFVFLYDSWLNSHRKGECNLFYEDKPVYEIDGAIIRQNKAVTKMLYQKIGLPELTSRELGEAAARYAKKQE

SEQ ID NO: 26529 - protein, 502 aa, synthetic construct
MEIQIREGNSRQKQKLKVCAYCRVSTDADEQENSLENQIRHYKEVITSNPDYEYAGVYSDFAISGFKEKRPGLQKMLADARRGKIDLILTKSVSRFARNTSIVLEATRKLKELNVGVFFELQNINTLSGEGELMLTILAAFAQAESESGSVGAKMVYQRKYEAGIPVQYLERSFGFKKDERGVYIADEEEAVWVRKIYDMAAQGYTLAAIKRYLNENNVKTVGGAKWLDSTVLRILENEIYKGDYIMHKYFVNEERKLVRNRGEVDAWYIEDDHEAIVSPKLWQKAQDALEAKRDYLAEGSVIEEFTEENYPYMNRIYCARCGHPLYKRIYSNGNRLNWGCSGTKRYGRSFCEGINIPDGVLREAWHFDENMYIGEKQTDKGKKEFTYLKEASWKRRHKKKEPEPIPENTETEYPYREKIFCELCGSRLVRHVNTKNHKVIWVCNGRKRKGKDFCDGTRVPDTIIKGWGEIKKDIYIQRKDDKNGKKRYSYTSKKPKGADRA

SEQ ID NO: 26530 - protein, 525 aa, synthetic construct
MARAVTVIPPTIQPITHLARNAVVRRRVAAYARVSTSSEEQLTSYEAQVDYYTRFIQSKPEWEFVRVYTDEGISAVNTKKREGFNQMVRDALDGKIDLIVTKSVSRFARNTVDSLVTVRKLKEKGVEVYFEKENIYTLDSKGELLITIMSSLAQEESRSISENVTWGQRKRFADGKVSLPYSHFLGYRKGDNGLPEIVPEEAENVRWIYSLFLSGKTTGSIAGLLTREGIPTPAGKKKWAASTVESILKNEKYKGDALLQKAFTVDFLTKKQKKNEGEVPQYYVENSHPAIIDPAEWKLVQRELERRRAIGRSYSGNSIFSSRLVCGDCGGYFGSKVWHSTDKYRRTIWRCNSKFTGEEKCQTPHLTEEEIKARFLDAFNALIADKERLLDECRTMQAALTDTGSLDSAIAALLSEMEVVAELTKRCIEENSTTAQSQDTYLEKYNALVARYETAKAKLEKLQAEKAQREVKAEGIGGFMFELAEYGQPIAEFDDRLWLTVIDTVTVHRNGRLTFKFQTGHEIFV

SEQ ID NO: 26531 - protein, 497 aa, synthetic construct
MRGVIYARYSPGPHQTEQSIEGQVADCQQYAEEHGIDIIEIYADRHVSGKSVVGRDEFQRMLRDAEKGRFDCVLVWKIDRFGRDRQDIAMGKMTLKRAGVKLMYARESVPEGPEGIILESVLEGLAEYYSADLRQKVIRGMKETAKKGQYCGQSLPIGYKVDAERHIVVDEREAAVVREAFKLHIAGGQIRDIVQLFADRGIMGRRGKPVSNAVVYRMLRNEKYLGEFYIQDVKLNVEPIIDQATFLEAARHFKTSRNNAAGRAKVNYLLSCKMFCGYCGSMISAEAGTGKLGKVYRYYKCGDKKRGKKCELKPFPKDHLEDAIILATVNDMLTDEMIEKLTVRILEVQEQENADDPVMGLRRRLDSNKKRQRNLLDAIEEGGARGLVSRLAALEEEEEQLVLEIQRAEIKRPRLTHEVVEAWLRSFRVGDVTDDDFRARLVDTFIARVELRNDEALIFYNIREKGPHSRVRVRPEWWRWRESNPRPKTGYRGFLRV

SEQ ID NO: 26532 - protein, 574 aa, synthetic construct
MSTGTELRAVFYARVSTEEEKQLNALEKQIQENKDVIRDHGWRLVGEYIDEGKTGTTTKRRNDYKRLLKDMTENKFDIVVCKDQDRLQRNTLDWYLFVDNLVTNNLKLFMYLDNKFFKPSEDALITGVKAIIAEEYSRNLSKKLNNSNKRRIERALNGEEVSAMGNGKSLAFKIVNGKWVKDEEEAKLGKKIFELYLEYDSIRKVRDWVNEHGYTNSVGKPFTSESISRILKNEKAKGVIVMGKYHHDFDKKKIVRRSEEELVRIPAPELAYVSEEVFDKVQERLRAKTGNGRGVNAYSDPLSGKIYCGSCGRKLWKHASNGYVNWMCASQVAKGDVECNGTRITTVAIRNIYKKITDNLEVNKGVVKQDIVKWLNELKATLSDTSVNEKIQKDLDKLERKRTKLLEAYLEDFISKDDYKAKYEAIEGQIEEKKKLLVPVEENEDIKVIESVLQNIDDEIDAYVKTLDMEESKVDFLIEHTKRITVLENRDIIIELDLVAGAIIAGKDFLLYVHDTMSFPHGGIRNEKISIRCRTHRPLPDRLRGHQHRGNLERHRESGVSAGEGGAGEAWDLL

SEQ ID NO: 26533 - protein, 500 aa, synthetic construct
MNEKINAVIYARFSSHNQQEQSIEGQLRYCSDYANKNGMTVINSYIDRAISGTSDNRPSFQQMIKDSNNRKFDIVLVWKLDRFARNKYDSVVYKNKLKKNGVKVISVTEYLGEGTESVLLESLLEAMAETYSRQLSENVQRGMRESAMKGLSTGGNIPLGYKIIDKKYVIDEAEAEIIRYIFNNYADGKPKKQIIDEINAKGWRTKKGCKFKYNSFNTILKNRKYIGEYIYQDLAVKDVIPAIVDVDIFNQVQSQMTQNKRTAGTQSAKREYLLSTKLFCGQCGGAMTGETSTGRHGGKYGYYMCRNKKFHKNNCEKKRERQEELEEFVVQKTVAMYSDKQFMQLIAKKVVKLYNDEFGSNHIATLEENKHKLETRFDELSNALVKTTNARMLDKFNKEIEQIDIELQELEIEIARENSIAHAQMTVDDVIDFINEVMKGNIKDKEFQKQIIDTFVNAIYVFDDKLVIYYNGSSEAEKVNYSDMLKDMRKDATSNTFAPP

SEQ ID NO: 26534 - protein, 519 aa, synthetic construct
MKRITKIGTTATVETKKTRVAAYCRVSTSSDEQLISLDAQKLHYEDYIQSNDDWEYAGLYYDEGITGTKAEVRDGLQALLRDCEDGKIDLIITKSISRFSRNTTDCLEMVRRLVELGVFIFFEKENINTGSMESELMLSILSSLAESESVSISENSKWSIRRRYQNGTFIISYPPYGYANIDGEMRIVPEEAEVVKRIFAECLAGTGTYTIAKRLNADHIPTQKNGKWHGGTVNGILTNEKYTGDVLFQKTYTDDSFNRHTNYGEVDQFFCENHHEAIISHEDFERVQGVLAQRAAEKGNGTNTSRYQNRYTLSGKIRCGECGTTFKRRSHYKPSGNYIAWTCGKHIENRHACSMLYVEETAIHDVFVTMINKLVFGHQKILKPLLGSLKNTDDKDKLNKIRRIDQEIENTAMQKQTLVCLAAQGILEPAIYNEECSALAIEEERLLAEKKSLISDIGGDRTKLQELEKLMQFTAKGHMIEHFEDEMFSDFVDKIVIESRECAVFHLKCGLQLKERLVR

SEQ ID NO: 26535 - protein, 525 aa, synthetic construct
METTRTVTMIPARRRVGNTVREEERPKLRVAAYCRVSTDSDEQATSYETQVEHYTSYIKKNPEWEFAGIFSYDGISGTYTKKREGFNKMIDECMDGKIDMIITKSISRFARNTLDCLKFIRQLKEKNIPVFFEKENINTMDAKGEVLLTIMASLAQQESQSLSQNVKLGLQYRYQNGQMSINHNRFLGFTKDEDGHLIVEPTEAEVVKRIYREYLEGASLQQIGKGLEADGILTGAGKKKWRPETLHKILKNEKYIGDALLQKTYTVDFLNKKRVKNKGIVPQYYVENSHEAIIPREIFMRVQEEMVRRSNLHSGENRKKRVYSSKYALSSIVCCSKCGDIYRRIAWNNRGKHSTVWRCCTRVDFGPDKCDAPTISEAELQDAAVKAINKALGGREDMIKGLQENIEKILSESTDNAVREIDSRLLELQKELLKKANARQNYDDLADEIEALREQKHGVMVESAEREGIKKRVAEMQQFLAEQKSEITEYDERLVRQLLEKITVHEDRFEVLFKSQTTVEIKRIF

SEQ ID NO: 26536 - protein, 634 aa, synthetic construct
MSTGTELRAVFYARVSTEEEKQLNALEKQIQENKDVIRDHGWRLVGEYIDEGKTGTTTKRRNDYKRLLKDMTENKFDIVVCKDQDRLQRNTLDWYLFVDNLVTNNLKLFMYLDNKFFKPSEDALITGVKAIIAEEYSRNLSKKLNNSNKRRIERALNGEEVSAMGNGKSLAFKIVNGKWVKDEEEAKLGKKIFELYLEYDSIRKVRDWVNEHGYTNSVGKPFTSESISRILKNEKAKGVIVMGKYHHDFDKKKIVRRSEEELVRIPAPELAYVSEEVFDKVQERLRAKTGNGRGVNAYSDPLSGKIYCGSCGRKLWKHASNGYVNWMCASQVAKGDVECNGTRITTVAIRNIYKKITDNLEVNKGVVKQDIVKWLNELKATLSDTSVNEKIQKDLDKLERKRTKLLEAYLEDFISKDDYKAKYEAIEGQIEEKKKLLVPVEENEDIKVIESVLQNIDDEIDAYVKTLDMEESKVDFLIEHTKRITVLENRDIIIELDLVAGAIIAGKDFLLYVHDTLPFHHGAVRFPAPCQRTAPHRSVPHRLPCHQHGGDRQPATPRYCPQAARGRHSGAAAPRHADHLAGLSGGRLYYRHGRMEYEKSPSHAEGRPGRQGVQVVGVCGQSSGHCGSVVHRQF

SEQ ID NO: 26537 - protein, 453 aa, synthetic construct
MECVAYMRVSTEKQAVEGNGLDSQKRDIENYCRKNELVITDWYIDDGYTGTNMDRPELQRLVNDCSRKRVGCVVAFKLDRLSRNMIDGIYLIEKVFQKYNVVFKCVHDSVNYDSPMEQAYTQMMAVFAQLDKNTMMLRMRGGMLERIKQGYWMGGGNLPYCYSYSKEQGILIPIPERAEQARKGLELFISGYSDAKIKEICGFKSELVTRSILTGVVNIGMIPYKGKIYQGKHEPVFDKDRFNLGLELRKSRCSAKTYCITEPNLLTGLCYCGICGCKMRYQKWGSEKHKIYCCSRNKSLSYLPNYNASCNNSLEWADEIEKQVEEEILKISLDLSSYKPKEKATKLEIMQSQLEKEQIKLKRLYNLYADGNDTVLEMIKELEAQIKEMKLNITAESKNAINTQKKEFVYENIKKLADIWDKVDKKQKNLILKTIIDKIVIVNGNIEIQLKNF

SEQ ID NO: 26538 - protein, 494 aa, synthetic construct
MRVVGYARVSTREQADHGYSIGEQNSRLRAYCQAKDWTLLRVIEDPGFSGAKMQRPGLQQVLEMVRRRECDAVLVWKLDRLSRSQKDTLYLLEDVFLANGCGFVSMLENFDTSTAFGRAMVGILSVFAQLEREQFKERSAIGRVGRAKAGLFHGGGYAPIGYDYYTKEDGGQGLVVNEYEAMQVREVYRLYLAGWAVHKIQVYMHERYTTKNGCWASDTTVRSVLSSPIYLGRITWAGKTYEGQHEALISQNDFDQVAARRESLKWQPAEPRAACDLIKNSPFRSTHILGGITWCARCGARYFASGNYSGRGENRKYWPYYTCYSVAKSSKKMIKDPNCKNKRWAVGKLDAIILAEISRLEFDPAALAKAAGPVDISGVEEKRRVLEARVAEVRPQMERLLDLCQTGGLPVASVSGRLAALQKELDALNGELSGLAVPETVDRLAVAQEMLAGASAVIENGTPEQKRALVHSLIGRIDIDGEDITIHWLFAPGN

SEQ ID NO: 26539 - protein, 518 aa, synthetic construct
MVAIYVRQSLDKKDSLSIESQINDCITLCKRNGWDDYQVYKDKGWSAKNLDRPEFQKMNNDVEAGKIKAVVCYKIDRISRSIRDLVNLIEDYHELGVHFVSFADNINTAAPGGLMMATLFGSLAQMEREAIIARVTDNYYYRCELGYWGGGPAPYGFNLKKIVENGQKHTVLEINEREAAVVKQFFKWYLEPDGTIYEILKKADKAGITTRKGGAWTSRVISELLSKPMYAPNSMDIYNFYAAQGVRVRVTPEQCDGKLSLNVFGRRDRGSKHPKRSRPVNEMTLAICKNPPIIDSDTFLKTQFKKKAKLQVSPRTGTAKTTMLSGLVKCAICGRAMSPSGSSRGVRYFTCSGKRNYAAGTCTSKSIKVSALEKIVIDDILRYATNPKVIDMFHAMQGSKLTAEQSHEVNLLQQEAAKLDIEIDNLLDACSAGNTTAIEYLNKRIEKIDTRKHEILTRINEIKRDTENVISLFSGIEIENVPYILAHGSIDEKKNVCQFLLSSVLFTNADDVKVYYKM

SEQ ID NO: 26540 - protein, 516 aa, synthetic construct
MARKKKVSPGNRLVAYYRYSGGSQQTEQSIEGQRRDCEAYARQHGLTIVHEYIDRHISGRGVESRLAFQQMIADSSKHLFDLVICWKTDRFARNRYDSAVYKKKLRDNGVRILYAAESSVEGPEGIILEGLMESLAEYYSAELAQKMRRGMRESALKGRAINPSRPLGLTTDEHKRFIIDEKNAPTIRFIFEHYAAGESSAFIVEQLNAAGLRTSKGNAFNKCSIPRIIQNEAYHGVYICKAYDVRIDGAIPAIIDDDLWKRAQKMLTLNKQHRAPHSSHADYLLSGKLFCGCCHSLMRGISGHNCRNNVYYYYACGNKADGGTCKKKNIPKDVAENLVVNAICENILRPDTLEDLADAIAAAQQADVNQPDPERAMLEQNLADVHRKINNIIESIENGTASSRLSARLADLEQQESTLNYQLESLKEVHPPVLDRERILFLLEQFLISPNERTEDYNRRIIDTFVNRIEITDTEMLIYFNLSEASASEKQKNSQPNSCSTGNHLVRVARIELTAS

SEQ ID NO: 26541 - protein, 454 aa, synthetic construct
MECVAYLRVSTEKQAEEGNGLDSQKRDIENYCRKNQLIISDWYEDDGFTGSNMNRPALQRLINDCSKKKLKCVVAFKLDRLSRSMVDGIYLIERVFIPNGVDFRCVHDSVSYDSPMEQAYTQMMAVFAQLDKNTMLLRMRGGMLERVKQGYWMGGGNTPYCYRYSKEDGILVPIPERKEMALRAMNLYISGYSDVRIQKLIGFKSEFVTRQVLTSPVNIGMIPYKGKLYKGRHEPIFDIKVFELAQELRKTRKQSKSFCVNHENQLLTGLCYCGVCGCKMRYQKWTHGKHKIYCYSRDNGMSYLPNYNPNCSNSLEWAEDIEKQVEDEILKISLNLSSHKPKERESCLDILSKQLQKEKTKLKRLYTLYAEGNDTVLEMIKETESGIDELKLKIQNEMKSPDNSQKKEFVYDNIKKLADVWEHIDKQNKNRILKTIISKIIIVNGNIEIQLKKF

SEQ ID NO: 26542 - protein, 401 aa, synthetic construct
MLHSLSAQVSYYSKMIQSHNGWMYRGVYSDEAVTGTKRERAGFQHMIEECRQGNIDLVITKSISRFARNTVTLLQTVRELKSLGVDVFFEEQHIHTMSTDGELMMTILASYAQEESLSASENQKWRVRKAFENGEIINLRFLFGYDITPGGIQVNEKDAAIVREIFARFNGGESMSSICRDLDARGHKGVLGGTWCAERMRNTLSNEKYLGNALLQKQYRNNHIEKKLLPNRGELPMYYAEGTHEPIIDQATFDKAQERLRMLAQQAANRKKPTRSVFSGLIHCGLCGNTYKRVTYRKKYYWNCTTFQTKGKSECAAKRIPEETLEVLTCEVLGAVSFDPDMVRSKITAIRAEKSNMVVFCMDDGSEIVKRWTDRSRAESWTPEMKEKARQRALQARRKKE

SEQ ID NO: 26543 - protein, 529 aa, synthetic construct
MNRTAARSVTVIPPTINPLTHLSRVTVQKRRVAGYARVSTDSDEQFTSYEAQVDYYTQYIKHNPEWEFVKVYTDEGISGTNTKHRIGFNEMIADAMSGKIDLIVTKSVSRFARNTVDSLVTIRKLKEKGVEVYFEKENIYTFDGKGELLLTIMSSLAQEESRSISENVTWGQRKRFADGKVNLPYKQFLGYRKGADGFPEVVPEEAIVVHRIYTRFMEGLTPGAIAKELTADGIPTPSRKQRWQTSTVESILQNEKYKGAALLQKCFTVDFLTKKRKVNEGEVPQYYVEHSHEPIITPEEFDKVQTELARRKQISRQYSGKSIFSSRIICGDCGSYFGSKVWNSTSKYRRVIWQCNGKFKGEHKCETPHLDEETIKARFVAALNAIIESKDNILEDCRLMQATLTDCTGIDTEIESLLEEIDVVTELTKRCIAENSQTAQNQEEYTARYNGFVERYEKAKAQLEQLRTTKAEREAQAEAIGAFMFEVQELDTITEFDEKLWLTIIDTITVHADGRMTFKFQGGKTLTSY

SEQ ID NO: 26544 - protein, 527 aa, synthetic construct
MPKVTVIKSTINPLTQLPIGTMKKRRVAAYARVSTDSDEQFTSYDSQCKKYEEYIKANPEWEYVGVYADEGITGTNRKRRVNFNKMIDDAKAGKIDLIVTKSISRFARNTVDTISLTRELKRLGIEVFFEKENIWSLEDKSEFVLTVLASAAQEESRSISQNVTMGKRWKMQEGKVSWAYKNFLGFKKENDKIVLVEDEAKIVRSIYRMFLIEGKTCAGIANVLNANKIPTPSGGEHCKWKVNNIISILTNEKYKGDTKLQKTFVADFLEHKVVKNAGQVDSYYVKDSHPYIIEKDEWEMVQEELLRRKDIGPSYSGNGPFASRLVCADCGAFYGPKLWHSGTRYEKTIFRCNEMYSKKHEKCETPKLSEDTIKEKFVKAYNKFIVDREALIEDANSIKDLLTNVSKEDEEITSIEADIAIIQTTAEKMVRENQFKAQNQDEYQKKYNELINRFNDMKSKLENVRLERGRKLAQALKMESFIENLKKSPESLDSWSEEIWNLMLEKGVVNRDKTITFIFKNGKEIRM

SEQ ID NO: 26545 - protein, 439 aa, synthetic construct
MNDNVEKIEAATKLASLKKVAAYARVSSGKDAMLQSLSSQISYYSRLIQTHDDWIFAGIYSDEAISGTKDTREGFRKLIQDAKAGKIDLIITKAISRFARNTLTLLETTRELKKFNVNVYFEEERIYSMSNEGEMILSMLASVAQEQARSTSENMLWRIKKDMEQGILWGSNDCIGYKLINRHYVIDPETAGIVKRIFHEYINGKGALKISKELNDEGIKPFKAKVWGKSVIMQVIKNVNYTGDLLLQKTYCENYMTKLTKNNKGQKDKYYIENDHEAIITHAVFNEAQRIRKERAKKIIVKDNKKINKFSGLLYCGYCGKKYMKKENKYRVYWSCSTFQNLGKKACDAKQIRNDILEATICEAIGINEFDEQKIRGYIQKIEIFSEERKLKLFLIDGTLKEVIYTERKRSSGWTEEMREVARKRTSEYHQRRKEECQK

SEQ ID NO: 26546 - protein, 490 aa, synthetic construct
MKAALYTRVSTDEQAEHGFSLEAQKKRLIEYCNKNNIEIYKLYSDEGISGHSIIKRKALQEMLQDAKEHKFNYVIAYKTDRISRNLLDLLTIKNQLDEADVELLLSDEAIDTKDDAGMTMFSIMGAFAELERKKITERMMAGKRQKLMNEHIKLKNGRVPYGYLYDDENKKYIIDESRRSIVELIYKLASQGWSYNKITRHIAEETAANSSDNKKKWYISDIRAILTNPIYKGYSGISYYYNFNDRAKKPKNSAILYKATNVEPYFTEEYWDTLYSQLEKKTQYFKRKHPIDSYIFSDVLFCATCGLKIGTRQHHANYLYYVCNSKHKMYDNDHICDYAININKFNNWFIEFIRGIDENNIKLSVSKPKDLDRELQAVRSQISLKEKNREVLLDKLMNGVIDDSEYRLASNMVIASLNSLKSQEKELSDKMDSLKEKEQTKRYNRLKIKALKVLVNDWDNLTDQAKKTLINSSINKIMITKDGIQEIEFN

SEQ ID NO: 26547 - protein, 523 aa, synthetic construct
MEQTKNITVIPARRRVANTAKKSEIPKLRVAAYCRVSTDSDEQATSYEAQVEHYTDYIRKNPEWELAGIFADDGISGTNTKKREEFNRMIDEAMAGKIDMIVTKSISRFARNTLDCLKYIRQLKEKNIPVYFEKENINTMDAKGEVLLTIMASLAQQESQSLSQNVKLGFQYRYQQGQMTVNHNRFLGYTKDEKGQLVVEPKEAEVVKRIFREYLEGASLQQIARGLEADGILTGAGKTKWRAETLQKILKNEKYIGDALLQKTYTVDFLEKKRVPNNGLVPQYYVENSHEAIIPRDLYMQVQEEMVRRANLHSGKNQKKRVYSSKYALSSMVYCSKCGEIYRRVVWNNKGKKSVVWRCCTRMENGPGACNADAIHESELQNLTVRAINMALAKKDTMNETLQKNVEAVLTGADGVPLSEIDSRLEELQKELLKVANSKGNYDTIADEIYRLREVRQNALVENAEREGMKKRISEMQQFLSEQTQEVTEYDEQLVRRLIEKITVYDEWVTVEFKSGTSVKVRR

SEQ ID NO: 26548 - protein, 530 aa, synthetic construct
MIESILYKTAIYCRLSLDDGSLGESGSIQTQKMMLEKYCRDNNFTIKEVYIDDGYSGLNFDRPAFKRLTADIESGNINLVITKDLSRLGRDYLQTGYYTEQYFPLHNVRYIAVNDGVDTLIDNNDIAPFKNILNDMYAKDLSRKVKSAKRQRALNGLFISAQTPYGYIKDPTNKNHLIVVEDVRHVIELIFNMCVNGKGAPTIAKVLEEKGILNPAAYKTLKGSTRFAKLQGTNHYKWKAVTVRKILTDMVYCGHMENGKYKVENYKTKRRVKVPDSEHIVVKNNHEAIISEETFETVQTVLSARHYPAHHEHENLFKSILFCECGKRMAIAHKVRNNKKDTFYKCANHENNPHECPRSNIIQYNQIKSIIEKEIFGIIERLRHSEKAFESYVNRIKKEESKDKSSEIKKTESRINTLIKIASKLYEDYASDLINERTYKELLLRNKQEQDLLEQKLQSLRNVHENVTYKLMRLDQLKHEFNRFLDNVELSSDMVNSLIERIELSYYTKAEDGTKHRRMIIKYKFIDDSL

SEQ ID NO: 26549 - protein, 581 aa, synthetic construct
MSRTTNKRPGKAKSGLSRKQKVAIYIRVSTLYQVDRDSLPMQRKDLIAYASLILGIEEYEIFEDAGYSGKNTDRPAFQEMMQRIRKGEFTHVLVWKIDRISRNLLDFAEMYEELQDLRVTFVSKNEQFDTSTAIGEAMLKIILVFAELERNMTSERVTATMISRANSGLWNGGRIPFGYDYDPDKTAFSIREDEEKVCQMIKNDYMEHKSLVHTSRMLNASGYKTRSGVEWSPTAVWIIVSSPFYAGIYRYNRYKGTERRVENPEDEWIMIQNHHPAIFSLEEHEKMLAILDENSRNRRSVGQRHQTERVHIFGGIAYCGKCGSKMVSTPGRLHVNGYRPTNYSCPKHRKTKECDNPTVSDTQVGEFVINYILNMLGAKKKFSTIENPEDLERCLLYGNTFSEVEHIDSNGLNEYFNLLSRYSSDDSYTFSVKKSRKKKAEVDPEVAALRKEKEKQERAMKRLQDLYLYSDTSMSEKDFIIRKTEISKRLEEINAMLGMVAKNSEPSLSDEEFVRQASHLLISRELQNRQYIYFKNLAQNVSPEILKAYMETVLDSVLLVDGRVSSIVFRNGLTHKFKYKS

SEQ ID NO: 26550 - protein, 499 aa, synthetic construct
MNVVLYMRYSSDRQTEQSIEGQKRVCMDFCERQGYNVVGEYIDRATSAYKETAKRTNFCRMIRDSSNGLWQGVVVYKLDRFARNRYDSATYKVRLKKNGVKVISATENISDSPEGVILESVLEGMAEFYSKELSQKVSRGLNESAHKCNSTGGAIPLGYKTVNKKLTVDEPNAQIVKEAFDLYAGGATISEICEKFNSQGYRTKKGTEFNKNSFKAMFRNEKYIGTYTYKDIRIEGGIPAIIDKETFETVQKRLSANAQAPARGKARVNYLLSQKLFCGHCGANMIGDSGRSKTGETYYYYSCSTRKRFHSCKKRTIRKDLIERIVAENAMRLITPEMINTIADMAIKCNREDIESDAIIPALTADLKEINTSIKNLLKMVERGVESETLDLRLKELEKRKKDTESRLDAAKSEYLTLDKTVIVGWLSQFLSGDIEDEDFRRHLIDTLINSVTVWDEPDGGYKITTVYNLKGNTQTYRVNADGSSDMKRNSPPKKRQFS

SEQ ID NO: 26551 - protein, 438 aa, synthetic construct
MARTIQQISFPAPMRPSLKRVAAYARVSSGKDAMLHSLSAQVSYYSALIQKHTGWLYCGVYADEAFTGTKDSRDGFQTLLAECRAGNIDMVITKSISRFARNTVTLLETVRELKALGVDVYFEEQNIHTMSADGELMMTILASYAQEESRSASENQKWRIRRGFERGELVNLRFLFGYKIEKGRVTVDPEKAAVVREVFRRALEGESLTSLAIDLNRRGFTGVLGGKWNSMRIREMLSNEKYLGNALLQKQYRNNHLEKKEIPNRGELPQYYAEGTHEAIIDQATFDAAQELLAGITENSPVKRPRRRSAFTSMITCTVCGRNYKRCTGGKRHFWNCPTAVQTDLPSCGTSQIPEKLLYDLAAQVLGLAQFDEGVFLERVKGIDALPDKTLVFHFYDGSTAERHWEHISRAKSWTPEMKEIARQRALAQRRGEKWQEL

SEQ ID NO: 26552 - protein, 558 aa, synthetic construct
MLQQSNNTITSIYPIGNQTEELTALYCRLSQDDKQEGDSNSIINQKKILKRYAIEHGYQPYVFFVDDGFSGTNFNRPDFQRMIAEVEAGRIKRVIVKDMSRLGRDYLQVGMYTEIMFPNMDVHFIAVNDGVDSHVGENEFTPFRNIINEWYAKDTSKKIRAVKRSKGMAGEHIGSHAPYGYMKNPDNKKEWLIDEEAAEVVREIFRLCVNGYGPTRIANILTERKILCPTYYALEHGEKPRTVLPPDKYLWSATVVSHILERMDYLGHTVNFKTHVKSYKNRKKIDNSPEQWRIFENTHEAIIDKETFEIVQKIRSGKRRPTKMGDMPMFSGLLYCADCGSKMTFHRQMAQSAEKHNFVCSNYRHNSKSCTMHYIRNVVVEQIVLENLKEVIRYVSDYEDEFVQMVMDTDMRQRNKELSQKKKRLTEIHSRIQELDKIFQRIYEDNISGKLSDERFMKLSKGYEEEQHTLQKEQTSLEKELQKEEKQSVDVKQFLSVVRKYTNLTELTPEIVHEFIDKIIVHAPDKSSGKRLQEIEIIYNHIGVFDHSKVTLWKGKAV

SEQ ID NO: 26553 - protein, 546 aa, synthetic construct
MKAAIYSRKSKFTGKGDSIENQIQLCMDYSKSIGIKEFLVYEDEGFSGGNIDRPQFKKMMQDAKDKKFDCLVCYRLDRISRNVSDFSTLIEKLNKLEISFISIKEQFDTSTPMGRAMMFISSVFAQLERETIAERIKDNMYELARSGRWLGGKTPHGFTSKKISFLDENLKERSMYQLEVNDEQMEIVKLIFNKYLELRSLSQLYKYVYHNGIKGPRGGKFDPSSLSGILRNPAYVKANEDILDYLRSLGMEVVGVPDGQCGILTYAKNTSNSIAAIAKHHGVIEPDMWLEVQSILNENKDKIPRISTGKTALLSGLLKCGKCGANMRIMYKGKRNDKDLKYYYVCGTKRSLGVEGCNCKNLNGPLVENLVIDKIKNCNIESVINAFNSNKAKVDTVFSDVRSKINLLKNSISEKEKLISNLVMELAKNTGSVASEYIISQIEGLNGEIDALKGKVIKLESSSVDINSASLNLDIIVSNLKKFNCEVDDASLDDKRLLLSTIVDSIVWVDASGNLSIVYMGAKMDDLVSLSDGSHFCSDGRSYIYE

SEQ ID NO: 26554 - protein, 465 aa, synthetic construct
MKGNAGDTIVKKIDLSPELVRVALYIRVSGEEQKIKGLSLEAQQERLEAYARERGWVIVGIYIDAAKTARKNIHKRTEFQRMMDSVKRDEVDILLFARLDRWFRSVADYYKVMEILQAHNCDWKTTDEEYDTTTANGRLYINVKLSIAQNEADIDGERIDVVFDSKIAHGTVVSGSAPFGFRVNEEKRLEVVPEDAAIVQDAFNYFENTVSQRATVRYVRETYGVNWCDATFRRMLKEKLYTGVYDRGGRYNDQFCPAIIDRQQFDRVQALLTRNVRSAPSGKVYIFTSILTCAECGHKLVGYKSSDYYYYRCNQHFQRGRCSHNHSAREDVVEQWLFEHLVEELERCQLEWDVEAAKKKVSVARTDKAALKRKLTKLKELYVNDLIDIEDYKKDYQIYVSALNQIPEPAQEAPPDFATVRRLLDNSFRTIYDTLTREEKRTLWRSVIKEIRIDNDQNITGVVFG

SEQ ID NO: 26555 - protein, 503 aa, synthetic construct
MYLVAYARYSSDNQREESITAQLRAIHNWANANGHVIVKEYVDEALSARTDKRPNFLKMIEDSKIEDWNGVVVHKLDRFSRNRYNSAVYKKTLKDNNKKLFSVLEKLDDSPESIIMEAMLEGLSEYYSANLAREVKKGLTENALDCKHNGGIPPLGYSVKDSHYVVDKRESEIIKLIFNMYKTNHSYVEICSELNLRGYKTKRNKNFSKNSIHDILVNEKYIGNYTFGYGNRAKKRGQPNPDMIKIEGGMPAIIDKDTFFIVQEKMKGRKHMGGSYKAKQVYLLSGLIKCGICNEKYVGARKNKYWSVYECSGHKKGMCENKAIKKEEIEKIVVDELKVKINGLFNNVELLEKVNTKYKELHNDTENNLKIEEEKLSNVQTQINNINNAILDGFYSPEMKDKMKLLQSEKEFIERSIYLIRNISEKDEITSADINNILNTDLLKLESDNLNNIKEIIQKYIKEIIITPENINIKVVLDNTNITGDRDVCGSPPPFYKNINLLF

SEQ ID NO: 26556 - protein, 503 aa, synthetic construct
MAGGGKMKYAIYARVSPKGSGFENETSLEMQINFCREYIKSQNGEIVDIQQDEFFSGKDMRRPGFQKLMEDLKSGVADWECLCVYKLSRLTRSSRDGAQIFEDLRIWNKGFISVTEPNFDFSTPMGRAMLSIFQAFNQFEREQTAENTRNKMISIAEQGGWPVGVVPTGYKRKGRHENILVIEPHGAEIIRGVYEMYATGSEVHRIARKYRKSPQWVYHALKNRIYIGQIPYAGKLYPGKHERIISHELYSAVSKKLETIAINDDSKRVVSRPKAYKYPYLLSGLLRCHCGRFMTPSSAKSGQYFYYRCTDNVFCKNRISAPEIEKKILDMMPLYEIDENFIQGYRDCIEKLISSETVRMDQEKKQVIAALSKNRLDQQKIIDLMISGKIADENLADFNERLSRIRDEIKEFESRIDFLSSQIKQFSDKNANILLKFIDEIYKIRDFFEISPKNSDLRRQFLTTCLENIILEKDGKITLKFRELSSSDNDKNGCPIRIRTSTN

SEQ ID NO: 26557 - protein, 519 aa, synthetic construct
MVIAIYPRKSVYRDNSDSVQVQVQMCKEYAGVIYKDKDLQFRVYDKDEGFSGKNMNRPSFRELMLDVKNNEIDVVMVYKLDRISRNVQEFSSMYEIFQQHNVSFVSVKESFDTTTPMGRTVMYILAAFAQLERENTSERVADNMQALGMSGKWTGGTLPTGFTSVRRRMGEKEHSFLMVDKNTIGIVKRLYGLILDGYSITKTERYCRDNGIRSRSGKFLNTSQIYGILTNPVYCQNAPDAYYYLQAKGCTLPEPDLFDGKKGLIGYGRTKTGASSQKIQDKSNWIISIGIHEPVIPATQWIAVQNRMGVNRFIHTSVKHERGILRGVIRCRCGARMDVRTYTKNGISFSYYYCSDMARQGKQKCNSGYIRIEEVELSFLQQLRDIRLTPACIKMRELPSVVTDIKAVKSDLQTTEESIRNLTLALAQAMDTAASGYIIKEIAELDKKKNSLELSIRKAEVRMQAERDAAATRKDVYNSICYLLDNFDDISYTGKNELIKKIVKTCILDTETKSLRIVF

SEQ ID NO: 26558 - protein, 519 aa, synthetic construct
MKRITKIGTTATVETKKTRVAAYCRVSTSSDEQLISLDAQKLHYEDYIQSNDDWEYAGLYYDEGITGTKAEVRDGLQALLRDCEDGKIDLIITKSISRFSRNTTDCLEMVRRLVELGVFIFFEKENINTGSMESELMLSILSSLAESESVSISENSKWSIRRRYQNGTFIISYPPYGYANIDGEMRIVPEEAEVVKRIFAECLAGTGTYTIAKRLNADHIPTQKNGKWHGGTVNGILTNEKYTGDVLFQKTYTDDSFNRHTNYGEVDQFFCENHHEAIISHEDFERVQGVLAQRAAEKGNGTNTSRYQNRYTLSGKIRCGECGTTFKRRSHYKPSGNYIAWTCGKHIENRHACSMLYVEETAIHDVFVTMINKLVFGHQKILKPLLGSLKNTDDKDKLNKIRRIDQEIENTAMQKQTLVCLAAQGILEPAIYNEECSALAIEEERLLAEKKSLISDIGGDRTKLRELEKLMQFTAKGHMIEHFEDEMFSDFVDKIVIESRECAVFHLKCGLQLKERLVR

SEQ ID NO: 26559 - protein, 684 aa, synthetic construct
MSILQTIKTIIRVVLYLRLSDEDKNKLSKEELSQSIKNQEIMLRDYAEEQGWEVVGVYNDDDWSGSDATRPDFNRMIEECKNGNVDIVLCKTQARFARDMELVEKYVHNLFHEWNVRFITVVDRIDNARKETKKTSQILGLTDQWYLEDTSLNIRETLKSKRKDGQLTSSFTTYGYMKDPENKNHLIIDPISSLVIKRIYDEYLSGTGLDKIARRLNEDKILSPYEYKLLNGSKLKIPVIKDYVNYGYIEKTGTYMLDVSFTNKEEYILKDLVSFNYITTDMKNFNNKCDIVLKKYTNNRTKIYYSENDNIDINNFNIDDCILLNENDVIPKTAKVIISYTKELDRTHTINYQFEITLKENREHEDYYINICGKATDEIKKSDFIHNIRKKFKWSSSTIRTLLTDEVYIGNMVQFKSTTVSYKNHTVVWNDDETRIRKDNTHEPIIAKDIWYTVQERLENTARSCKGGTVHPLCNKVYCSNCNQIFTKTGARRSDGTGYLCCKDKKTNWSNCDNKASIREDGLHQFILEKMNEMLKKFYEENDLKEMQNEVIEQDLYKDKLNSLEKELQSINKELQGKSTYFQKLYEDRTNGILPEKEFLILMNKYKDDNEKLEERQKIVKKEISSTLAKKETVKTKKNIFKKYRHIEELSIEIVEDFIDKILIGNYDETTNSRDIKIIWNFTI

SEQ ID NO: 26560 - protein, 444 aa, synthetic construct
MEGKKRAAIYVRVSTAEQRDHGLSVDSQIDALQKYCRENNLEVAGIYNDAGISARKKYKARPALLQLIEDCKAKKVDIILFTKLDRWFRSVADYYEVQSQLDSAKVPWRAIWEDYETETSAGVFKVNIMLSIAQAESDRTSERIRAVNEYRKSQGYIIVGKMPLGYIRTSASTIDFDPRTKEAMQAFFDTYLNTYSPVQAMDAAAEKGLKMSRKTAHFLLDKEPYYGTYYGVSVPGYITPAQHELIQQARKHYPRQPKADRVYIFTGLIFCASCGARMGSKCTCYTSYGKPKEKLYYQCRMRTVRRGECKNAAFIMEHNLESYMIDHLKELIAGYNASVQKLAAKAKSTEGKIEKIKGRLERLKDIYLDGDMKRAEYLEKVKELKAQLAELESLATPALPVSQMPDNWREIYEQLSKQGKRDFWHRVVRRIEIKRHSVDKVYFV

SEQ ID NO: 26561 - protein, 530 aa, synthetic construct
MSTGTELRAVFYARVSTEEEKQLNALEKQIQENKDVIRDHGWRLVGEYIDEGKTGTTTKRRNDYKRLLKDMTENKFDIVVCKDQDRLQRNTLDWYLFVDNLVTNNLKLFMYLDNKFFKPSEDALITGVKAIIAEEYSRNLSKKLNNSNKRRIERALNGEEVSAMGNGKSLAFKIVNGKWVKDEEEAKLGKKIFELYLEYDSIRKVRDWVNEHGYTNSVGKPFTSESISRILKNEKAKGVIVMGKYHHDFDKKKIVRRSEEELVRIPAPELAYVSEEVFDKVQERLRAKTGNGRGVNAYSDPLSGKIYCGSCGRKLWKHASNGYVNWMCASQVAKGDVECNGTRITTVAIRNIYKKITDNLEVNKGVVKQDIVKWLNELKATLSDTSVNEKIQKDLDKLERKRTKLLEAYLEDFISKDDYKAKYEAIEGQIEEKKKLLVPVEENEDIKVIESVLQNIDDEIDAYVKTLDMEESKVDFLIEHTKRITVLENRDIIIELDLVAGAIIAGKDFLLYVHDTMPEHYGRKRYDIFS

SEQ ID NO: 26562 - protein, 497 aa, synthetic construct
MQFLNVAAYARYSTENQDENSIETQFDNIAQYCQAHQYNIVAHYFDKAKSGTNIERADFQEMISAARAGKFSAIVIYDITRGSRDVADWFTFRKQMMQAGVQIISTHDNIGDLLNPNDFLTELIGVGIGQHHVLTSRLKSIDGTTMKAHEAIFLGGCPPLGYDVKDGKYIINESEANIVRKIFSRYASGESYSDIIDSLGGAIGKKGRPIGKNSLSSILRNDRYIGIYTWNRRKIKIMGKWAGGVPNERIVQIKDAIPRIIDQPTWDRVQIRLKSKTNSSSKAARSYLLTGKIVCTECGARYCGRTSVNQRGYQNPYYVCGNKTRTRQCHSKNIKCEDLDNFCRNAVREYILNYDLSETAQRIVTAYNATVSQYTNEKKELAEISRKIKNGTDAILNGFSSEELFQQMGKLQVRQKELEKIIANDAADELDPELVTKLLKNMLEDVSTNIDEVVKQFVTKIYAHPNGDCTVHLGVAHFTSSGREIRTLDTTGMNRML

SEQ ID NO: 26563 - protein, 526 aa, synthetic construct
MPKVTMIPATVNSLTHLPKASVQKRRVAGYARVSTDSDEQFTSYEAQVDYYTRYIQSKPEWDFVRVYTDEGISGTNTKRREGFKEMIADALAGKIDLIVTKSVSRFARNTVDSLVTIRKLKEKGVECYFEKEGIYTFDGKGELLITIMSSLAQEESRSISENITWGQRKSFADGKIHLAYKHFLGYKKGEDGRPAIIEEEAAVVRLIYRLFLDGKTQAGICRYLEDLSIPSPSGKEKWSKTTVTSILTNEKYKGDALLQKSFTVDFLQKKTKPNAGEVPQYYVEGSHPAIVEPYEWDHVQAEFARRKALGNAYSGKSIFLAKLVCEDCGGFFGSKVWHSTDRYRRTVWQCNNKFKGGERCLTPTVDTETVQQLFIKAYNQMMGNRKQIIEDCELMRKKLTDFKSLDTDIEHQFEETQIVAELVKAAVKDNAVTAQSQEAYLKKYEALTKRYETAAAELARLQNLRTLRSQKDKAMALYIRTLKKQPTVLSEWNDTLWTVMVEKAIVHRNSEITFAFYNGTKVKVRQ

SEQ ID NO: 26564 - protein, 497 aa, synthetic construct
MRYAIYLRKSRADDTSEPLEVTLQRHRQMLEKYMQQHDIAVQDEDVFEEVVSGDSLYARPQMLRLLEAVEAGTYTGVLCVDIQRLGRGSMQDQGIILDAFKFSGTKIITPAKVYDLSDDIDETYTEFESFMGRQEYKLIKKRLRRGLNATIENGGYIANAPYGYDKTKIGKTPSLKINEAEAKFIHMIFDLYQGGMGALTIATTIDRLGAKPRRGEHFARSTILKILKNDVYRGKIVWNRKTCVRPGQRGNEHHLTIYNAPEKWTVVDGLHPAIIDNEQFEAVQRILAGHYHPPANTGKRINPLAGLVLCGNCGRPLQRIAIQSAGGPLLGCQVPGCIVSSKLEYVEQAVLREIQKEFDKLCANAEQKQQESQIDYAAMAKSIDAEISTAHQQLGRLYDLVEQGVYTIEVFNERRGALLSRISALEDERKNLVPPQQLDLEKMRANIEAVFDAYPTADFNTKNQLLKSIIDKIVYNKQKGVQPKGFTLEVFLHCLYL

SEQ ID NO: 26565 - protein, 458 aa, synthetic construct
MKKDTPVGESLPLRAALYPRVSTEEQAKYGLSIHDQQGDLEEYARAHGMRIVGVFADAGYSARKKVEYRPAMLALLEAVKRDEVDIVLVTKLDRWFRNIGEYYKVQEILEAHNVSWRTIYEDYDTSTAAGRLKINIMLAVAQDEADRTSERIKKVFDGKRARLEPLTGDKPFGYTIEGKRYVKDPETEAAVDAFFRKYMACGSVSATQDYIRSEYDIFIPYQGADKLLRSTAYYGRYFGTDGMCPAYITKAQYDAIQLMRKRVMRRPAQNRVYLFSGLIFCPVCGGRMGGRKNQNVVSSHYNCSNHFCRRIPCTNNRSISEAKLERYLLSALDAKFAEYKRQTSRLSGARRKDYSSEITALKGKLSRLKELYLNELIFLDEYKRDRAGFMAKLDELEVKQAALAVPAPSGEKIDGLLQGDWKGMYADLPKDKQQEFWRIVIKEIRLYPDRHIEFDLNL

SEQ ID NO: 26566 - protein, 516 aa, synthetic construct
MLKTEEKQAVKAVIYARYSSDRQREESIEGQLRVCEDYARRNNITILHTYADRAMTGRSDQRPEFQMMIRDAATMAFNVILVYKLNRFARNRYDSAKYKHKLKKYGIKVVSAMENIADDPSGILLESVIEGMAEYYSAELSENVLRGMTQNALEGKWPGGVIPLGYKLDKGGRLIINEEKAPIVRMIYQMFLDGMSVARIERKLNDKKYTTDAGKVFSRSRVYYILHNERYIGTFQWKDIKKEGIIPPIISKEAFHAVQERINAMKSSSYRTNNNYLLAGKAFCASCGAKVSGTSGKSQNGTKYCYYGCSHHHRSARYEYCETKNIRADVLEKLVCDKTHEILSSKKAIKEIARQAVKLRPRDGSELEIRAIKNHISSCQKKIDNCIKAIENGVMSNALVESLNENERTLDVLKEKLAKASLMQGSGLLTEEKIQFFFETIREKAKETEKYNDILLTSLVRAVYICNEYVEIQYNYAEQLPILTNPVRIESCSYKCTNGGTIWIRTKDLFDVNEAL

SEQ ID NO: 26567 - protein, 484 aa, synthetic construct
MQKEKVIPIDSLDLVDLYIRVSTTEQALEGYSVAEQEHRLRQYCAAMGHRIHKVHIDAGFSGASLDRPGIKETIKDVQKHLVRRVIVWKLDRLSRSQKDTLIMLEDVFLENGCDFISMMESFDTSTSFGRAIVGILAAFAQLERENIKERTMMGRQARLAKGHYNGSRPPLGYSFIPGSNDLQVDPYQAAIVREIFKLFLSGISINAIARKMEEKYPTVRTWNNTMIRRTLKNPVYIGKVNDNGILRDGIHEPLISEIDFQMANAILVHNSKIKKQSCRSRSLLTGLLYCGDCGARMHPRRIAKGYPLRRYVCYSVSRTSKSMIKSDHCTNRLHPYTQEELEQIIIDEIKKLAADEDYISEVIRNSSAEAPVDDTELFQERIEELNRQTDKLLNLYQIGAIELDQIQERLAGLKQERESLTAALKESQTKTDINMDHLKIMSYASAFQVALESGDPEYTNSIIRLLIDKIVVLNEDIEIHWTFC

SEQ ID NO: 26568 - protein, 516 aa, synthetic construct
MPKTEEKQAAKAVIYARYSSDRQREESIEGQLRVCEDYARRNNITILHTYADRAMTGRSDQRPEFQMMIRDAATMAFNVILVYKLNRFARNRYDSAKYKHKLKKYGVKVVSAMENIADDPSGILLESVIEGMAEYYSAELSENVLRGMTQNALEGKWPGGVIPLGYKLDKGGRLIINEEKAPIVRMIYQMFLDGMSVARIERKLNDKKYTTDAGKVFSRSRVYYILHNERYIGTFQWKDIKKEGIIPPIISKEAFHAVQERINAMKSSSYRTNNNYLLAGKAFCASCGAKVSGTSGKSQNGNKYCYYGCSHHHRSARYEYCETKNIRADVLEKLVCDKTHEILSSKKAIKEIARQAVKLRPRDESELEIRAIKNHISSCQKKIDNCIKAIENGVMSNALVESLNENERTLDVLKEKLAKASLMQGSGLLTEEKIQFFFETIREKAKETEKYNDILLTSLVRAVYICNEYVEIQYNYAEQLPILTNPVRIESCSYKCTNGGTIWIRTKDLFDVNEAL

SEQ ID NO: 26569 - protein, 583 aa, synthetic construct
MSHVEIIKANTMLSERGNRAHIERLRVAPYCRVSTDSEDQLNSYKSQVQHYTDFINNRKDWVLVDIYADEAITGTQTKKRNDFQRLINDCMNGEIDMVITKSISRFARNTLDTLNYVRMLKEKNVAVFFEEENINTLTMDGELLLTILSSVAQQEVENISANVKKGLKMKMQRGELVGFQGCLGYDYDKATKAISINEEEAKIVKYIFKRYNEGIGCYVIAQELEHLGYKTKRGSSNWAESTVMGILKNEKYKGDIRQGKTFTVDPISKRRLDNFGEEDQFYIHNHHEGIISNELFESVQKIINRRRKSRNTFDGKRETFTRKYSFSCMLECGFCGSHLTRRSWHSGTEYYKVIWQCVTNTKKGKKYCPDAKGIPESIIEEAFLESYKLLCYNNTDVVDEMLNRIEISLCSNNPEKEISNIERLISKNAAKKQKLLDMRLDDTLDKDSFDIKFNELNEQLDELNDRLTSCKNTENREKNIKKRLDDFRKVLEKNEVLVEFDRQVFESIIDKVIVGGYDDDGNKDPSMLTFVYKTGFTNSVDANNHKLPRKKRKKNKEKNENKLSSYSPNEDEKMCSLNSDNTY

SEQ ID NO: 26570 - protein, 513 aa, synthetic construct
MAQAKLISPVSRQAYERTKVAAYCRVSSNSADQLNSYAAQIRAYTKLIKSNDSWELVEIFADEGLSGMKAENRVEFQRMIEMCEHKQIDLIITKSVSRFARNVKEALEYVRKLKLLGIGVQFEKEGIYTLALGDEMLLNTFSAIAQEESKAISQNQRLSIVKRMERGEYVDSNAPYGFRLQDKKLEAFDREADVVRYIFQQYLSGWSTSEIARDLTEKGIQTKLGKEQWRSTKISYILSNERYVGDCRYQKTYRDTTVPFKQSKNRGQEDMFYASETHDPIIDRESFEKVQALLQDRKERFSKSEQLNIYPLTSRIRCSECGSVFRRKVRNGAIKWVCARHSADTHACPSGYYSEERIYDGFITMVNKLRFGEERILDQVIAKLETAAALYKRNNISAGKMSQSIAELNAKLVMLEQLRSKGYLAIEVYQSQTRDIQKQISSLKSERRSAFESTIQTMLDEVLKMRSLLNEIEEPLEEFNDKLFHELVKGIEINKQDEMTVTFLGGLKFTELI

SEQ ID NO: 26571 - protein, 499 aa, synthetic construct
MKTAVIYARYSSDSQTEQSIEGQLRVCNEYAKNNDILILRTYIDRAMTGTNDNRPDFRQMIEDSKKHDFSIVLVYKFDRFSRNKYETTKHKKTLKDNGVKVVSATEYIPDSPEAIILESMIEGYAEYYSAELSQKVKRGMNETRQKGNFTGGTIIFGYKVENHKVVIDEEKAEVVRFIYNQYAQGVYVKDIIKTLTERGIFNRGKKFARNTVYNILKNEKYSGIYRHGNEVFTNMYPQIVPTEIYENVRRKTETNKYGTRSVEVVYLLRNKIKCGYCGSPISAECGTAKNGQKIRYYKCLGRKHQSGCKKSQVRKEILEKYVLDNVCEQMQRPEILDKMATYLLQVQENRIKQNSVLTNLIKEKRQTENTINNIMQAIELGGQSATVMKRMRELEEKLTDIEKRLTIEKSQTAFRLSKEQIIDHYKSALEKEPLQLINYFIKEIQLYDDKMIIIYNTPKTINLDESQGFSFYDKHIKMPYVIQNREYYGLKDFRLIMRI

SEQ ID NO: 26572 - protein, 514 aa, synthetic construct
MKQCVIYARYSSERQTEQSIEGQLRVCYEFAKNNDLIVVHEYIDRAMTGTNDLRKEFQQMLSDSEKTKEWDICLVYALDRFGRNSIEQAINKFKLQKTGKIVISATQRTSRNIDGSQNLDGIILENMYVGMAEYYSAELSQKVKRGMNESRQKGNFTGGYIPFGYCVTGDRKTGRKVQINEDQAVIVRKIFEDYAAGRLVTDIIDELHEKGIENRGQPFARNTVYFLLKNEKYAGIFRHGDEVFTNIYPPIISQTTYDIVRARIENNKYGKHKPNVEYLLKFKVTCGYCGSPINSDSGTSKSGVIMRYYKCSGRRKGKNCQSTPIRKEVLEKVVIDATYKALATPDLIEDIAERIMGAHQKRMDDQSILHILEERLAEKKSSIDNLIAAMEQGIISQTTKERLNALEAEKAELINKIAVEKLKSNLIIQKHDIVKYLQSAVKKRPLQMIQLLIKQVVLYNDKIEIHFNYTDGKRPDDELHQAFSFYTFNQRITIDQHKIGKEPIVTDYEIILFI

SEQ ID NO: 26573 - protein, 499 aa, synthetic construct
MIAIYARQSLDKKDSISIETQIELCKKEIEDEPYKEYVDRGYSGKNTNRPQFKAMMQDVENGVISKIIVYKLDRLSRSTLDFGELMDALSKHSVEFSSTREKFDTSTPIGKAMLNIIMVFAQLERETIQVRVQDNFRMRSARGAYDAKAPYGYAKTKVMVHGKAVSTLKPDKAYSLMVKKIFEQYAYTSTSLGYLARTLNQQGIKSANGAAWDSCKLSKLLCNPIYVKADAEVYKYYRAKGMEITNDIDDFRGQYGCVTYGQWDRAKNKFAQLSGLTLSIGLHEGIIDAKTFLACQYKLADNTQINNTGRGKHSWLTGLLKCGCCGKAMKVMTYKETATFRCSGAMNTGLCSDSPSVGVREIEEAVEREIFAHVARHQELVVQKRKEEDNKAHNYKIAIAKLDDQISNLITALADGTELTMKYINGRISELQKQRDILAAELQQHKNATKQQDDIKQFHDIINLWPGMTIPQKHEIAMMLIKRVEIQEDTTRIYWKYDL

SEQ ID NO: 26574 - protein, 501 aa, synthetic construct
MLLKAVLYARVSSDRQEKEGFSIPAQKKLLKEYAKNNNISIVAEFVEPETAKKAGRTKFNEMLKYLRKHPQVRIILVEKTDRIYRNLKDYVTLDEFKDLEVHLVKEHEIISDKSSSHEKFVHGLKVLMAKNYIDNLSEEIRKGLQEKCAQGYYPSSLPIGYVNKPNATGKKEIFLSDDAPFIKLIFEKYLMENHSYKSLAQEMSDAGFFPKNRPCINKTIEHILHNEFYTGIFYFKGVKYYDAKHPAIITPELFVQVQEKMKSKYKTAKRKHKFAYSGFIKCAHCGKSLIAELQHGKHNSGDYVYYRCHHCKGITIREDKFEDAFYNDVLKKIYLPEESHQKIIQVAKELVQCETEFAETSMNEMHHKIQLLKRRLSQLYTDRCDGMVDDETYLNKRNEWQMELDKCLVKYEKINNASDGFVESVENLSNLCKNAPQRYLNQSQEEKRKLMNLVMSNPVFDGSNLIMPVVSAFEYIVMLNNVETVGVEPTSKMDKNKPLRV

SEQ ID NO: 26575 - protein, 604 aa, synthetic construct
MNTVIYARYSAGPRQTDQSIEGQLRVCTDFCKQRGLTVIDTYCDRHISGRTDERPEFQRLIADAKRKKFEAVVVYKTDRFARNKYDSAVYKRELKRNGIQIFYAAEAIPDGPEGIILESLMEGLAEYYSAELAQKIKRGMHESALKCQSTGSGRPLGYRVDEQKHFQIDPESAQTVQTIFEQYIKGESNATICELLNSRGLRTAQGKPFNKNSINRIIKNRKYIGEYRYHDIVVEGGMPAIISKDTFNLAQAEMERRRTRKAPKSPKAEYLLAGRLFCGHCKGPMQGVSGTGKSGNKWYYYYCGNTRGKNKTCDKKQVSRDRLERAVVDFTVRYILQEEVLEELARKVHAAQERQNDTASEIAFYEKKLADNKKSIANVLRAIESGAVTQTLPARLQELENEQAVILGELSFLKGKRLAFTEDQILFALMKHLEPYPGESEQDYRRRIISDFVSEVYLYDDRLLIYFNISSEDGKLKSADLSNIEGSEFDEGLVSSTKNKAICLWQMALFLGVARAARGNEFTRWRAGSPPRRCPRRYPCAAWCGPRRSSWTFAGVRRPCPPLRRAPCRRRYRTRTRYFPFHSHSFSHSDSMPRVRQKSRKSHC

SEQ ID NO: 26576 - protein, 684 aa, synthetic construct
MSILQTIKTIIRVVLYLRLSDEDKNKLSKEELSQSIKNQEIMLRDYAEEQGWEVVGVYNDDDWSGSDATRPDFNRMIEECKNGNVDIVLCKTQARFARDMELVEKYVHNLFHEWNVRFITVVDRIDNARKETKKTSQILGLTDQWYLEDTSLNIRETLKSKRKDGQLTSSFATYGYMKDPENKNHLIIDPISAEVIKRIYDEYLSGTGLDKIARRLNEDKILSPYEYKLLNGSKLKIPVIKDYVNYGYIEKTGTYMLDVSFTNKEEYILKDLVSFNYITTDMKSFNNKCDIVLKKYTNNRTKIYYSENDNIDINNFNIDDCILLNENNVIPKTAKVIISYTKELDRTHTINYQFEITLKENREHEDYYINICGKATDEIKKSDFIHNIRKKFKWSSSTIRTLLTDEVYIGNMVQFKSTTVSYKNHTVVWNDDETRIRKDNTHEPIIAKDIWYTVQERLENTARSCKGGTVHPLCNKVYCSNCNQIFTKTGNRRSDGTGYLCCKDKKTNWSNCDNKASIREDGLHQFILEKMNEMLKKFYEEDDLKEMQNEVIEQDLYKDKLNSLEKELQSINKELQGKSTYFQKLYEDRTNGILPEKEFLILMNKYKDDNEKLEERQKIVKKEISSTLAKKETVKTKKNIFKKYRHIEELSIEIVEDFIDKILIGSYDETTNSRDIKIIWNFTI

SEQ ID NO: 26577 - protein, 683 aa, synthetic construct
MAKRTSVENSIITGVIYARYSSHSQKEESIEQQIEECTAFAVTGGISVVGIYADKAISGRTDRRNEFQRLMRDAEKRKFDVVIAYKSNRISRNMLNALQYESRLDSFGIKTLYAKEEFGNTAAGRFALRTMMNVNQFYSENMAEDIRRGLKDNAAECKVNGSLPYGYKKGEDGKYAIDEPRAAIVREIFSKVVDDVPYADIIRSLNDRGILTKTRKPFNKNSFNRMLRNERYIGIYEHSGVRVVGGVPAIISEEVFYAVQRKLQEGLNSEGAKRKSNSDYLLTGKLYCGECGSPMVGYAGTSRNGTLHYYYTCKSRGNDGCTKHNVRRDFIEQFVVDLTRACLSRADVTDWLVSGYIELKKQAQETSDVPVMEEELSSRKKALDNIMKAIEAGIFNETTSARMQELETEIHDLERSIALGKAMFEEPVDGERMRFYLEKLRNGTPDNQAYRKELLRTMVKAIRLWDDRIEIEYNFTGTDGDGNNYRVVTEFLKGDSGSASGVHTEPPQPHHVMMNPVAVETTGFSSVFNLYYRKGDSQMGSGIEPGMMKYCVIGNIVMEHTDENGITRYGTAAFPGGRKVYISRRLWNDGVVVMGLNRYMSRYDIETVPLAWIENIRVSKTFGSKVLELMTNTDEFPDMWWRYKEEDKIGATEYAQILNRVKAGDKEAFDQYNRDVMERFYHS

SEQ ID NO: 26578 - protein, 505 aa, synthetic construct
MRVVLYMRYSSDRQTEQSIEGQNRVCTAFCEQQGYEIVDRYIDRATSAFKDTDKRTEFQRMIRDSEKQLWEGIVVYKLDRFARNRYDSATYKARLKKNGVRVISATENISDNPEGVILEAVLEGMAEFYSKELSQKITRGMFESANKCHSIGGHIPLGYKIENKKLVIDEAGAAIVREAFDLYANGATVAEICETFNTKGYRTAKNAEFNKNSFRSMFKNERYIGIYKYKDLRIEGGVPAIVDKDTFAIVQKKLSKNAEAPSRGKAKIDYLLSQKLFCGHCGSLMTGESGTGKGGTTYFYYTCGKRKREHTCDKKPLKKDFIERAVVEDALTLLTPETIEELADIAVNESIREMEENSIIPALKNQLHEIERSINNLVKMVEKGVESDTIADRLKELEKEKRAIEKRLVVAQDDYVILEKEHIVWWLSDFCNGDIDDEEFRRHIIDLLVNSVTVWDEPDGWYKITSVYNLTSNKIKTFRCSDLSGQAPPQKPAIRVSCRFSFCAV

SEQ ID NO: 26579 - protein, 523 aa, synthetic construct
MRFFSYGRKSVFSDKSDSIDNQFRMSREYCDTKFSGQVDSWQQFSDEDFTGANTQRPDLQRMLSFIKNGFCDVLVVYQLDRLSRDVRDFANIYSLLEEHGVMFVSIKENIDTTTPIGRAMMYVTVVFAQMERETIAARVTDNMLGLAKKGYWTGGNPPRGYVRKHIVVDGKKHCSIEPDPDGVRYVTRIFDTFLAMNCSLQGMETRFKNQGIRTESGKFFSTTQLHKILTMPYCVEATPEVYDFYAAKGCIMDPGSPREMWDGSVGVIIYGRSTEKNKKHQAQPPEKWTVCLGMHKPFMPAEKWLAVQARFGQNKCIKDAKWPVPLLKGVLRCKCGNLMQVSRKKKVDGTCSSWYYCRKRMRQGVDACDMGQIKCDLLDEEVLELFRGITADPALIQKFIKAEAPADVPDLKAAQARVSACERKIGRLAASLALAEDSAASKYIIAEMERLDVELGALKREASLAEMESHRAAASAKDAKATATEIAKLIHGLDGFDDKEKNAIARAVIQECTWDGERLFITL

SEQ ID NO: 26580 - protein, 502 aa, synthetic construct
MEIQIREGSREQKRKLKVCAYCRVSTDADEQENSLENQVRHYETVIKANPDYEYAGVYSDFAISGFKEKRPGLQKMLADAEKGKIDLILTKSVSRFARNTSIVLEATRKLKELNVGVFFELQNINTLSGEGELMLTILAAFAQAESESGSAGAKMVYQRKYEAGIPVQYLERSFGYTKDERGVFVADEAEAVWVRKIYKMAAEGYTPASIKRYLNENGIKTVGGVQWVDSTVFRLLENEIYKGDYIMHKHFVNEERKLVRNRGEVDAWYIEDDHEAIVSPELWQKAQDALAAKRDYLAEGSVIEEFTEENYPYMNKIYCAKCGYPLYKRIYSKGNRLNWGCSGTKRYGKTFCDGINIPDGVLRSAWHFKENTYIAEKASDKGVKKFTYLKEQSWKRRHKKKQPPAIPENTEAEYPYREKIFCALCGSRLVRYVNPQSHKVTWVCSRRKRKGKDACDGIRIPDTIIKGWGEIKKDIYIQRKDDKNGKKRYSYTSKKPEGADRA

SEQ ID NO: 26581 - protein, 464 aa, synthetic construct
MARSVTVIPARSQKVRTGHKAIQEKKIRVAAYCRVSTDQEDQLHSFEAQVEYYTKYINEHENYEMAGIYADEGISGTNTKKREQFKKMIADCEGGKIDLVITKSISRFARNTQDCLAYSRKLKNLGIGIIFEKENINTLDSTGELLFTILSSLAQDESRNISENCKWGIRTKFKNGEMHLNTFKFLGYDKDENGKLVINKEQAKTVRRIYRDFLIGINPAQIAKELTEEKVPGCLGQTKWYPSTVIGILKQEKHMGDALLQKTYTADFLTKRQVKNNGEIAQVYVKDSHKGIIDKETWNAVQEEFERREKFMQKHGTDRYSYGSECYPFCEKIFCGECGSLFTRHSWKSRGIIQWQCKNHRKDGKVACTNAYVDNADLEKGFVKAFNRLVGEREKHIERWNSMKLDGTPLEKIRAGQMMEATESGQLQQYVPEAAQLVLEEITIFGAKKYEFAFLEGSRVKVSV

SEQ ID NO: 26582 - protein, 556 aa, synthetic construct
MLLYWKNQTDMLKCNRTKIMKQKNKESSDVMKIAAYCRVSTEKEAQIDSLEKQIEFFNEFTKKNGYELYKLYADEGISGKQIKHRKQFQQMMIDAKAKKFDKVVVKDVSRFARNTVDLLQSVRELKSYGVQVDFLNNGEVMEGGSEFILTILGAMAQQESANMSKRVKFGKDITAKKGRVPNLVFGYDKIPDERYTLKINEEEAKIVKEIFESYVYKGIGTTKIAWNLNDRGIRTKKTKSKWVQTSIVRMLKNPIYTGRVTNKKSEVTDFITGTRKELPEEEWIVVERPEMRIISDELFNRAQELLEQRSNEFKLNNKREKTEYVFSTLIYCKHCGYSFRRIKRKYTADGPEYIRWVCSGRNSMGVNHCPNTTVIDEEELLNAIKIYLKSIIKNKKDFMKAVEKEFEKITKLRENNERSEESLLKKIEKVTVKKQKYMEMFQNEIINIQELKKYTNPLNEDIARLERELKLITSEIKEKDVLEKELSKTINTVDDILNNQTITNAMLKTIIDVIEVDSDSNVEVRLKLLNEIGSTPAVITNFNDINPTVTKSNVST

SEQ ID NO: 26583 - protein, 524 aa, synthetic construct
MGDKMKRVYCLYRVSTKGQVDKDDIPMQKTSCREFAERNGWTILKEFQEKGVSGFKVSASDRDAIQDLKAAAEKKEFDVLLVFMFDRIGRIDDETPFVVEWFIKHGIEVWSVNEGEQRMDNHVDKLMNYIRFWQANGESQKTSARVKTRLNQMTLDGKFTGGIAPFGYKLIKSGEINKKGKELMNIVIDEDEAPIVKKIFEMTVKEGYGSYRMADFLNSHGIRTHNNSKFQCNTVNRILKNRLYCGYLVSGGVESPYIERLHIIDENIFDQAQFILKQRSSKNEEKQQIARTTKGSTLLSGNIYCAHCGQKMVSTSYIDRYDRADGSQYRVRRQRYICTNKAMKRGACDGQSAYVAHRIDGAVLATLRDYLAKIKSTPKDIALEKRYKSEISEYKRKQTKIEKEIDKLKRQVIELSAEIGRSLLGESRFAPDILSASIDNTNDLLHKKETELNDIKFKLVNQQNAMGKLDFYYSQFRTWADEFDNSTMEQKKMIACQLIREVKVSRGYELEIIFDLNYEQFLSL

SEQ ID NO: 26584 - protein, 463 aa, synthetic construct
MARSVTVIPARNRQASGHRAAPQKKIRVAAYCRVSTDQEDQLHSFEAQVDYYTKYINDHENYEMAGIYADEGISGTNTKKREQFKRMIADCEKGKIDLVITKSISRFARNTQDCLMYSRKLKNLGIGIIFEKENINTLDSTGELLFTILSSLAQDESRNISENCKWGIRTKFKNGEMHLNTFKFLGYDKDENGKLIINREQAKTVRRIYRDFLWGLNPAQIAKELEEERVPGCLGQTKWYASTVVGILKQEKHMGDALLQKTYTADFLTKRQVKNNGEVAQVYVKDSHKGIIDKETWNAVQEEFDRREKFMQKHGTDRYSYGSECYPFCEKIFCGECGSLFTRHSWKSRGIIQWQCKNHRKDGKVACTNAYVDNADLEKGFVKAFNRLVSEREKNTERWNAMKAEGTPLEKIRAVQMMEATENGQLQKYVPEAAQLVLEEITIFGAKKYEFAFLEGSRVKVSV

SEQ ID NO: 26585 - protein, 501 aa, synthetic construct
MEIQIREGNSGQKQKLKVCAYCRVSTDADEQENSLENQIRHYKEVITSNPDYEYAGVYSDFAISGFKEKRPGLQKMLADARKGKIDLILTKSVSRFARNTSIVLEATRKLKELNVGVFFELQNINTLSGEGELMLTILAAFAQAESESGSVGAKMVYQRKYEAGIPVQYLERSFGFKKDERGVYIADEEEAAWVRKIYEMVADGYTPAAIKRYLNENGVKTVGGAEWIDSTVFRLIENEIYKGDYIMHKHFVNEERKLVRNRGEVDAWYIEDDHEAIVSPELWQKAQDALEAKRDYLAEGSVIEEFTEENYPYMNKIYCAKCGYPLYKRIYSKGNRLNWGCSGMKRYGKSFCDGINIPDGVLRSAWRFEENTYIDEKASDKGVKEFSYLKERSWKRRHKKKQPPTIPENTEAEYPYREKIYCALCGSRLVRHVNTQSHKVTWVCNGRKRKGKDFCDGTRVPDTILKGWGEIKKDIYIQRKDDKNGKKRYSYTSKKPSGIGA

SEQ ID NO: 26586 - protein, 430 aa, synthetic construct
MKKIVKDITPELRANDTIKRVAVYARVSCEKDTMVHSLKAQIDYYRKFIMKNPGWKFAGIYADEGKTGTKEAREQFQALLTECRNGNVDMIITKSISRFARNTVTLLSITRELKELGINVYFEDQKMDSMSSDGQLMLTLMAGIAQAESKDCSDAVKWRIRHGYEQGRASSFRILGYRWDDGNVVMVPEEAPLVKRIFDLYLSGKGANAISKILNSEGVTAAGITKWAPTTIRNVLMNEKYYGDLLLQKSFVEDHINKRKVINNGELPQYFIEDDHEAIIDRQAMSDVKNEIAIRRARFYHGQGKESCLTSKIKCPYCHVNYHRKKINGISKWSCATSNRKGKSMCPKSKDIREDVLLAILAHQLGYKDFDEKLFAEQVDYIECFDDHIITHFYDGSIKNSKWSNPSRKDSWTDDMKEKARQRGLNQYGK

SEQ ID NO: 26587 - protein, 512 aa, synthetic construct
MQRAVIYARFSSDMQREESIDAQVRACKAYAKNKGYIVVDTYADEAKSGRDVTKRDAYNQMLADAMEDKFDIIIFHKIDRNSRNELNYFTFKDKLEKLGIRYEYAAQPIDALSPEGQMMETMMVGMAAYYSRNLAKETKKGLNENAYKALFNGGCPPLGYKIVDKKYVIDEQEAAAVRLIFELYLNGYGYAAICRELSAKGYTTKAGKAFAKNSLHDILCNEKYIGTYTFNKIPRKKGGRNSHAAERPEDFISIENAFPAIISKDDWALVRAKMDRNRHRAASYTAKEKYLLSGKVFCGHCGSAMVGHRIRKRYCYYGCTRKEQTPTSKCPQKMIRAEILEHWVLQILERVVFTVGGMRRIADAIVDAYEAEQKEQAGSQATLLQRKAVAEKKLNNLYKIFEEGNADEFDRQRLNQIKAELREINKSICETSVKPAKLLSKQKIAAILAAMKDEIFVKKNSYYVQQAVDLLVDHVTITDKVLKITLSTQNVCAYLVPRTGIEPVRVSLPEGF

SEQ ID NO: 26588 - protein, 519 aa, synthetic construct
MLAYGYCRYSSDIQNEKSIEQQKNELEDYAKKNNIKIIKYYVDEAKSGRYDTRDSFQELINDACKSKEVQAVLVWKTDRFARKAMDSLYYRTKLEKVGIKLISITQPIDTETPEGKLMSTLLAGMDEYFSQNLASNVKRALKSNAQNCQFNGGLAPLGYDIVNKKYVINKRESIIVQEIFSMYIEGTSLIDIALNLNSKGYKTKKGKTFGKSSIYDIIGNEKYIGKYIFNKGTKRNHDGIRPDAIIFEDGIPKIIDKETFKKAMDRRKTKKHAENSAKRIYLLSGLIKCQCGGSYVGRTATKVKNGNTYKTGYYYCTNHNKLSNCMMPSLKQELLEQKVIDILTEELINKNTMDTIVANVNKQYKELQEDCHESVESLKLNLKDIKKEMDNIVNIVCRGLATDTLLQKLDKLEKIKKNLEDEINFKNNISENNYITSDKIRAVLARDVLSLQDSSRSEIKKLIQKWIKKIEVTTTEVIIHFDCEDFLPPIMVARNGFEPSTCRVWTGCSSQLSYLAVND

SEQ ID NO: 26589 - protein, 519 aa, synthetic construct
MAMAQNITFIPAVRTVGTQKPAEKKQKVRVAAYCRVSTDFEEQESSYETQVAHYTSYINGNPEWEMVEVYADNGLSGTRTAKREAFNRMIADCEAGRIDMIITKSISRFARNTVDCLKYTRKLKELNIAVFFEKENINTLDAKGEVLMTIMAALAQQESESLSANVRLGIQFRNQQGKVQVNHNWFLGYTKDESGKLVIVPEEAEVVRRIYREYLEGASFVKIRRGLEADGILNGAKHARWHETNIKQILTNEKYIGDALLQKTYTVSVLDKKRSVNNGAMPKYYVEGCHEAIIDKETFLLVQEELARRSALYKGGKKRMYSSKYALSGNVACGHCGNIYRRVTWYVGDTKPVVWRCVSRLTPGEECVGRSVPEEELHAAIASAVNMTYANRDDIIPVLKENIESVVGCDVDEEIEVIDNMIRKSQMDLLDAGKDEVRIQEIGERIVSLRERRQDVLTQAALKKDKIERIKAMIRFIEEQTGEAEYSDALVRSMIGKVAIHDDRITVEFKSGLAIDVDA

SEQ ID NO: 26590 - protein, 511 aa, synthetic construct
MKRITKIDAAAKETKKLRVAAYARVSTDSADQLVSLDAQKEHYEQVIKNCPNWEFAGLYYDEGVSGTKMAKRDGLLRMLADCERGLIDYILVKSISRFSRNTVESVETVRRLSAMGIYIFFEKENIDTGKMEGELMLSIMSSLAEDESRSLSENNKWSIQKRFQNGTYVIGTPAYGYKNAEGRMVIDEEKAEVVKRIFASVLEGKSGTKIAGELQEEEIPTARGGRWQSSVVLGMIRNETYTGVAVFQKTYKDDRFNSRVNRGEKGMYRIEGHHNPIVSVETFRAANFAVDNNAREKGITKGSKYSKRYALSGKVFCGECGGKCKRKMIYGEVWYGCETHIRDKKKCRQLPVRGADVEAAFVNMINKLIYGRDAVLLPMSGKLLGGGNKDVIDRLEGLNAELETIAERRQAADRFFAKGLLDAAVYREELDALAQKEKEIHSLRAGIEGDPDLDFDRQTALNELLKYTAGAERLTAFSDEVFTKHVDRVIFFSRKEVGFVMKCGPVFRERI

SEQ ID NO: 26591 - protein, 578 aa, synthetic construct
MRKVSKIEPISPSLPTRKKVAAYARVSMETERLNHSLSAQVSYYSNLIQSNPEWEYAGVYADNAVTGTKSSSRGEFQRMLEDCEAGKIDIILTKSISRFARNTVDLLETVRHLKELGIEVRFEKEHINSLSGDGEVMLTLLASFAQEEVMSLSENIKWGTRKRFEQGIPNGRFLIYGYRWEGDHLVVEPEEAKIVRLIYDNFLKGLSAEATEKQLEEMGVKSMKGMHFPNSSIRAILKNITYTGNLLFQKEYTLDPISKKTRKNHGELPQYFVENTHEAIISMETYQAVQAEIARRRELGALANWSINTSCFTSKIKCGLCGASFVRNTRKSRAKTSQLGERYTFYGCGTNKRKGEHCSSGTIREDVLKEECAKALGLPEFDEETFSERVEKITIPTTGTMLFEFTDGSSLEHHWSRNAKKESWTAERRKAVSEYRRSWETGWKCYHTFTHFIKCGRCGVNYRCQTHKRVDGTVVRSWYCSSPTAVGCSKVGIREDTLRTLIADVMGLTEFDEELFNQQLAYATVPADNQIVFHFRDGHEASRTFVQKRQMPRQTEERKKHMSEVMKAKWRERHAEND

SEQ ID NO: 26592 - protein, 528 aa, synthetic construct
MPKTTKKITTIPATLTRFTATPITEQKKRRVAGYARVSTDHDDQFTSYEAQIDYYTNYIKSRDDWEFVDVYTDAGITGTSTKHREGFKRMVADALDGKIDLIVTKSVSRFARNTVDSLTTIRQLKENGIECYFEKENIWTFDGKGELLLTIMSSLAQEESRSISENCTWGQRKRFADGKVTVPFNRFLGYDRGPDGNLVVNREQAAIVQRIYAMFLQGMTYNGIAQQLTDDGILSPGGKPKWNTSAVKSILSNEKYKGCALLQKTYTVDYLTKKKKVNEGEIPQYYVEDNHEAIIDPDTFEMVQREMEKRGKGRKYHSGVHTFSSKIRCGECGSWYGSKVWHSNSKYRKVIWQCNHKFDGDKHCSTPHLTDDIIQRAFLSAANKLLATKDTAIADGREMMSLLFDTTDLEREQEELQQETQVVSDMVQQCIYENAHVALDQTEYQKRYDGLTERFEKAKARLDAVTDEIHQMQTQRASIEDFLNAFAAMPDELTEFTLESWNGLVDYGTVYAADDIRFTFKNGQEVKA

SEQ ID NO: 26593 - protein, 561 aa, synthetic construct
MDKKKKSALYVRVSTTHQIDKDSLPLQRSDLTNYTKYVLGIEDFEIFEDAGYSGGTTDRPAYQDMMNRIKKGEFTHLIVWKIDRISRNLRDFSEMYDELKKYNVTFISKNEQFDTSTAMGEAMLKIILVFAELERKLTGERVFSVMISRAQKGLWNGATVPLGYEWDAETKFPRPYNSEAKVVQYIYDQYEIIKSTTKLAKKLNIEKIPTKRNGTWTPRTVGSILTNPFYIGTYRYNTKTRKTRRWKNKSEWVVVEDNHQAIINKEQFERVVNIIQSNYKGDKNYQRTNNKVHILSGIASCHKCGKKMHSGLDRARKEGFTPSRYTCYAFNVNYTCANYSSDLAILPGLINYIANYITLQERITPKHSLRDMESILLRGKYFEDIDHIEKQDLKNTYNLLINNTLVTYNSLEDEKKEAIVSQNAIYEAEKEKYIKALKRLDDLYLYDINSMSQKDFVIKRKEISDKIESVNKKIQEVKLNDTPFINNDDFGVLSKASFYLLTKNLSSVKNIDVISLLNNLDKQTVKDFINAIITDVSVERGKIYNITFKNGIVHHFIYKNQ

SEQ ID NO: 26594 - protein, 594 aa, synthetic construct
MPKISKIEPTVPAIKQLKKVAAYARVSMQSERMMHSISAQVSYYSKLIQKNPDWEYAGVYADDFISGTNTVKRDEFKRMLADCEDGKIDIILTKSISRFARNTVDLLKTVRDLKAKGIEVRFEKENINSMSGDGELMLSILASFAQEESRSISENIRWATKKRFEQGIPNGKFRVFGYRWDEDQLVIEPSEAAIVKRIFQNFLDGKSRLETEKEFAAEGITTANGCRWVDSNIKVVLTNITYTGNLLLQKEFIEDPITKRRKKNRGEMPQYFVENTHEPIIDMETFRYVQDEIARRKELGALANKSLNTTCFTGKIKCPHCGVSYMHNKRTDRGGCLEFWCCGSRKKKGGRCGVGGSINHKNMVKACTEVLGLEEFDEEIFLREVDHIDVPKRYVLEFHMTDGRVITKDCPNTGHKDCWTAEYRAKTSAKRRKTGTNCKGSSCFTGKIKCKNCECNFRRATQPSATAESGKVNYWRCSEHSNGCQTVGLREDVLILLLADALGMAEFDDALFQKTVDYISVLTDKDLEIHKKDGTVTAVIYAPPAPKRLPRTEEQKEHMRSLMKEKWTPERKAEMSERMTQMRKERGENWRKEK

SEQ ID NO: 26595 - protein, 527 aa, synthetic construct
MAQRKVTAIPATINKFTATPVNSRKKRRVAGYARVSTDHEDQVTSYAAQVDYYTNYIKGREDWEFAGIYTDEGISATNTKKRDGFNRMVADALAGKIDLIITKSVSRFARNTVDSLTTIRKLKEHNVECYFEKENIWTFDSKGELLLTIMSSLAQEESRSISENVTWGHRKRFADGKVSFAYSRVLGLEKGPDGNIVVNQEQAKIVKLIFRRFLEGMTPHSIAAELTEMGIKSPGGKDKWNGATVRRMLSNEKYKGDALLQKEFTVDYLQKKTKKNEGEVPQYYVEGNHEAIIEPSVYDLVQVELAKRSKKSEARYSGVSIFSNKIKCAECGSWYGSKVWHSNDKYRRVIYRCNHKFDGNRKCETPHVTEEEIVTAFIKAMNTLITEKDEIIENIQLIRQTVCDVTALEQEQDKLRSEMEIVVELTQSCVAENARTAQNQEDYQKRYDGLVERYEKVKSRYDAIVEAIEEKQAHYEKLGIFINTIEKHGEPITEFDAGMWGSMVEYITVDKDKKMTVTFKDGSEIQV

SEQ ID NO: 26596 - protein, 514 aa, synthetic construct
MKQCVIYARYSSERQTEQSIEGQLRVCYEFAKNNDLIVVHEYIDRAMTGTNDLRKEFQQMLSDSEKTKEWDICLVYALDRFGRNSIEQAINKYRLQKTGKIVISATQRTSRNIDGSQNLDGIILENMYVGMAEYYSAELSQKVKRGMNESRQKGNFTGGYIPFGYCVTGDRKTGRKVQINEDQAVIVRKIFEDYAAGRLVTDIIDELHEKGIENRGQPFARNTVYYLLKNEKYAGIFRHGDEVFTNIYPPIISQTTYDIVRARIENNKYGKHKPDVEYLLKFKVTCGYCGSPINSDSGTSKSGVIMRYYKCSGRRKGKNCQSTPIRKEVLEKVVIDATYKALATPDLIEDIAERIMGAHQKRMDDQSILHILEERLAEKKSSIDNLIAAMEQGIISQTTKERLNALEAEKAELINKIAVEKLKSNLIIQKNDIVKYLQSAVKKRPLQMIQLLIKQVVLYNDKIEIHFNYTDGKRPDDELHQAFSFYSFNQRITIDQHKIGKEPIVTDYEIILFI

SEQ ID NO: 26597 - protein, 587 aa, synthetic construct
MTSQKSSIERKLSEQRAALYIRVSTHWQIDKDSLPVQREDLINYAKYALGIDKYEIFEDAGYSAKNTDRPAFQQMMSRLRTGEFSHLLVWKIDRISRNLLDFAEMYSEIKKLGITFVSKNEQFDTSNAMGEAMLKIILVFAELERNMTSERVTAVMLSRASNGQWNGGKVPFGYNYDKQTREFTINESEASVINLIYDTYEANNSLTLVARTLNEKGIYPRSGTPWNPTTVSTMLKNPFYTGAYRYNYHDESKSGGNTSSKHIKDRSEWVYIENHHPAIIDAERQSCILEILESNRRSNHRSSKTYIRKNVHIFAGLLYCGYCGNQMQSTIDRERADGYRPSIYACSRKRRFNDCPNKYVSDVTLAPFVLNYIANIIKAQNNFGKSTPLDTFERKLLRGEIFADVDHIEQVGLTEMYNMLKRGNLSDAVFSSARIQDAETDQMAADERDLLASERRKKERALDRLKSLYLYNDEAISERDYLVEKKSLTDSIDKIDKRLEEIERNSSHHFTLTDEEFMAKASVFIVTNQLQGKRFIDAEKLLRQIDTHVVKEFLNSVVQKIVIKDGRVLSIRFKNGLEHKFLYKDAE

SEQ ID NO: 26598 - protein, 572 aa, synthetic construct
MASRIAEKLAAKKAAIYIRVSTHWQVDKDSLKVQRRELIAYVTLVLGITDYVVFEDPGYSAKNTDRPEYQAMMDRIRTGEFTHLVVWKIDRISRNLIDFAAMHDELQSLGVTFVSKNEQFDTSSAIGEAMMRIILIFAELERKTTAERVTAVMLSRASDGQWNGGRVPFGYSWSKETKTFSIVPEEAKAIRRMAELYEQYQSLLYVAKYLNDAGIVTKTGGQWTPTTVRTILTNPWYIGQYVYNVHSDGKGIEKRDSDEWITVENHHEPILNEDVFCRMKFLLTRNKRGGVPSHQTYVRKNIHIFAGLLRCGQCGSNMTANLDRRRANGFRPSQYACGSRRRKGTSCTNKYISDTTLGPFVLNYVANIIRASKNSSEATTPEVLERKLLRGEAFEDVASVSTDALGQLLDAFRSAGDAVEYRPQIAFSGDDNSIREIDTLRARRRKLDNALARLNALYLYDDEAMPEKDFVMQRGQITKQLEEVNARIEELQNQESSEELGDDFIGKASYYIMANKLIEDRYIDYEKYIRAIDPSIPRSFLQQIIDHIVVNDGRVISITFKNGSTHTFTYKT

SEQ ID NO: 26599 - protein, 524 aa, synthetic construct
MATVTKIPATVSRYTATPIQTRVRRKVAAYARVSTDHEDQLNSYEAQCDYYTTYIQANDEWEFAGVYSDEGISGTSTRRRDGFNRMVEDALAGRIGLILTKSVSRFARNTVDSLTAIRKLKEHGTEVYFEKENIWTFDSKGELLLTIMSSLAQEESRSISLNVTWGQRKRFADGKATAPFSVFLGYDRGENGEFVINPEQAEIVKIIYGEFLKGFSFKAIARKLTEMGIKSPKGKDVWNESTVKSILTNEKYKGCALLQKHYTADYLTKKIVRNDGVVPQYYVEDCHEAIIDPATFDRVQEMIEQRSKVRHFSGATIFSTKIRCGECGGWFGSKVWHSTDQYRRVIWRCNAKYGGKAAGCNTPHVTEEEVKAAFVRVVNKLIGDRATLLADLREIQETYSGTDELSQRLHELDDRLNAEAEAVQGLIAQNARVAQNQDDYNAAYDAAVSRYETTKAEREKVAADIRQRGIRRREFERFISELEKLPEAVSEFDETLWGSLVDYVTVGKDKTMVFTLIGGTEVKA

SEQ ID NO: 26600 - protein, 556 aa, synthetic construct
MKGAVIYARYSCERQTEQSIEGQLHECYKYAEKNGLSILGEYIDRATTGTNDNRPAFQKMLADSERTTTWDIVLVYAIDRFGRNSIEIAINKQKLIKNGKNLISATQRTSTNIDGSKNLDGILLENVYIGLAEYYSAELSQKIRRGLTESRNKGLFCGGKVVYGYCVKDKTIYINEAETETVRYIFQEYNNGKTIPDIIEVLDAHGIKYKGETFKKNFLYRMLRNEKYIGITKYDGVEYKNIYPPIIKEDLFNAVQSRMVTYSVGAHSKDADLLLKGKVICGLCGHMMNGDCSTSRSGKLMHYYKCSGRKRGTGCESRILRQDKLDEFIVDVTKQVFCSKENIQLLVDKVIAIHKQRQKDESILNSLKNRHSDLVKSINNMLFALQEGIITPSTKERLNMLESDKAEIEEQIAKEELALSKQISRDEVEYYLRRAIKSSPKILLNNLVDKVIVYDDKIEIYYKYCHKIPDDPDDQRGYFFEELRIPINCGKRNKQFLPITIDHQKMIASVKYILNRRKKMLAPINYKKRPILASLNVTGADGYLLVEPRGFEPLTF

SEQ ID NO: 26601 - protein, 504 aa, synthetic construct
MEDFIYARQSVDKEDSISIESQIELCLREVGNNPHRVFRDKGYSGKNTERPDFQDMMAAVRAGGARRIIVYRLDRISRSVLDFANVISELQKYGVEFVSITERFDTSTPIGKAMLMIVMVFAQLERETIQQRVMDAYRSRSRKGFYMGGRVPYGFELENTVMEGIKTCMYKPIPEQIQVVQLIFSLYAMPQVSFADVVRYLSQNGIKNPNGKNFSRMRIRDIITNPVYAKADASIFEFFHGQGTEIINDISQFIGTNGAYLYTGNKAAKRKSISLDGHVLVLAPHAGCIDADTWIRCRRKCLNVRQIAKPVKAKNTWLAGKIKCIDCGHALSLKSYPRKRSADARYYICNSKYVSASCDGVGAIQAAGIEDIVFDEMSRKLKEFNKLSYKEKHGDPIELTKLKIRAEEIEKEIATLIDKIVSASTATMEYINERIDALDEEKKTVKEKIAQMSAEMYDRQNIGVISDYMSKWNDISIDDKLTVVDTLIESIHVGHGKVKIAWKI

SEQ ID NO: 26602 - protein, 507 aa, synthetic construct
MTKNAVIYARYSSDRQREESIEGQIRECKAFASTNGYEIIGIYTDRALSARTDQRPDFLRMIADSDRHIFQFVIVYSLDRFSRSRYDSAIYKNRLKKNGVRVLSAKENIRDDPTGVILESLLEGYAEYYSLELAQKVKRGMIDNLLEGKWVGTAIPFGYRKGDDAKLYVDETKRNAVIDIFQMYADHSRIVDIIRYLNNRHFTTSQDRPFSRNSLNHILSNPIYTGTFRWGGESYKDYAPRIISDELFECVQKIKTGRKHSRTRGKSPDYELTGKIFCGRCGLPMVGVSGTSKSGSSYYYYKCSGRTHGKKNCDSRSIRRDIIENAVYEATVSMLKQPQSVKIITEQAILAQKRSMDDSEVLRLKKEKDALEAKIRNISKAVAAGLTADEIIAQANEYSRRSKELETLIQVEELKEKTFTLTPEAVTFFLEKLLEKAKSGQATLSTFWDFIRCIKINGSIAEIQFNYTAVPATLDNPIQIELDLDEECSNETVLVGPPGFEPGTNRL

SEQ ID NO: 26603 - protein, 455 aa, synthetic construct
MKYVACYCRVSTDEQARFGFSIQAQKDALEKYCKENGYKYEFYIDEGISASSMKKRKALNEMLSKSSTFDMVLFTKLDRLSRNVLDANNINKLLIDNNCTMKAIDEDDIDTSTADGTFIFNLKVSLAQREIGKTSERINFVFKNKREKGEITSGTKKYGYDIVDKHFVVNEKEAENIKNLYKEFINNNGNLKETYKYFIQHFEGKGYDAMSNYLKETAYIGKYKLYRKNIYINNYIPAILDVEIWEKVQNLRKKKTVGRKITYPDLFSGLIYCHNCGNRLAKKTDYRVKNIVVRYVCDNSYRYKVGIDEKHCTNNKVIKEKDIENYLLNNLDKELSNFIAKVSVIPNTKKINNTPKIKSLEKKINKLKDLYLDDLINKETYAKDYKKYTSELLSLKNTTTQEPLKKDYSHLKQILNSDYKKIYYELNKTNKKKFWFSFINKIYVENGEIKEITFL

SEQ ID NO: 26604 - protein, 523 aa, synthetic construct
MVSFDSIIIYLRKSRSDDPAQTVEEVLAKHERILQDYCMKEYGKAIPEKRIYREVVSGETIQDRPVMQQLLKELEAENISGVLIVEPQRLSRGDLQDCGQIINSFRYTNTAVITPGKTYDLSDEYDRKFFEMELTRGNDYLEYTKKILSRGRVASVRQGNYICSVRPYGYRKITLGSGKDKCHTLEIIPEEADAIRLMYHLYLDENMGFTNIARTLDSLHIKPLKSDNWSAATIRDMIDNPIYIGKVVWNSRKVVKKWENEQITKVRPRNKGDDVICVNGRHEAIIDEHTFEAARNKRGLTPKVKKFKELRNPLAGLLFCGTCGHGMSMKKYVDKRSHTGKVTTVMLCNQQAVCHTKSAQYEDILAKIKVSLANAISDFKIKLKEQENNNIDMHELRIASLEEELNRLYNKDVRQKDAYEDGIYTKEEYIERNSKLQERILNVKEEIADEKNNVPVKIDYEDKIITFKDCLASLDDPNISAADKNILLKSCIDKIIYYNDMPSKPGIGRYIENSFRLEIFLKL

SEQ ID NO: 26605 - protein, 544 aa, synthetic construct
MAETAKKISMIPAKVQYDRNVKLSEKKMKVAAYCRVSTELEEQDSSYEAQVEYYTSKISENENWKNAGIYADDGKSGTNTKKRADFNAMIQDALAGKIDMILTKSVSRFARNTVDSLVTIRKLKEKNVAVVFEKEGINTLEGTGEILITILSSLAQEESRNISENIRWGVVRKFEKGKVIVNCTKFMGYTKNEDGDLVIVPEEAEIVKRIFRLYLEGYSTGKIAKHLEEQGIKTATGQDKWHSTVIDKMLRNEKYMGDALLQKTYTVDFMTKKKVKNTGLVPQYYVEDDHEAIIPKELFYRVQEEMMRRASLCKAAVTRKKNQKSRYSSTYALTGMLICGKCGQEYRRVTWARNGKKKVVWRCSNRLTNGVKKCGESETLEENALNRAVMEAIHRITSDDMEFMEHFRQNIIHVIGSYGTAKESGEYEEKIKEKQEEMVALIAENAKTGSYTPEFDERYRIIAEEINALKEAQKTARNEKRMADSYEQRIQDIDHYLSTSTCQIPEFDNDLVRRLISTIKVESSEKLLIQFQSGIVMEQEIRYE

SEQ ID NO: 26606 - protein, 521 aa, synthetic construct
MGNVMIIPAKRQVGNISRQQEDKPKLRVAAYCRVSTDSDEQASSYETQVEHYTEYIKKNPEWEFAGIYADDGISGTNTKKREEFNRMIEACKTGEIDMIITKSISRFARNTLDCLKYIRMLKDKNIPVFFEKESINTMDAKGEVLLTIMASLAQQESQSLSQNVKMGLQFRYQNGQVQVNHNHFLGYTKDREGNLVIDPEQAEVVKRIYREYLEGSSMDKIAKGLEKDGILTGAGKKKWWTSTINKILRNEKYIGDALLQKTYTTDFLNKTRVKNNGIVPQYYVENNHEAIIPKDIFLRVQEELVRRRVVKTSANGKKRSYSCNHCFAQLVICGECGELFRRIHWNNRGCKSIVWRCLSRLEATGMECHARTVNETVLENVVVQAINTLLGDKSTYQAQLQQNIAKVIREAQKNNTDGIDEQLMELQKELLEKANNKEAYDEIADQIFKLREQRENCTVDTAARDTQIARITDLQDFIKQQRTDLAEFDETLVKRWLKQITVWEYHFTVELKSGLSIDIEG

SEQ ID NO: 26607 - protein, 516 aa, synthetic construct
MARKKKVSPGNRLVAYYRYSGGSQQTEQSIEGQRRDCEAYARQHGLTIVHEYIDRHISGRGVESRLAFQQMIADSSKHLFDLVICWKTDRFARNRYDSAVYKKKLRDNGVRILYAAESSVEGPEGIILEGLMESLAEYYSAELAQKMRRGMRESALKGRAINPSRPLGLTTDEHKRFIIDEKNAPTIRFIFEHYAAGESSASIVEQLNAAGLRTSKGNAFNKCSIPRIIQNEAYHGVYICKAYDVRIDGAIPAIIDDDLWKRAQKMLTLNKQHRAPHSSHADYLLSGKLFCGCCHSLMRGISGHNCRNDVYYYYACGNKADGGTCKKKNIQKDVAENLVVNAICENILRPDTLEDLADAIAAAQQADVNQPDPERAMLEQNLADVHRKINNIIESIENGTASSRLSARLADLEQQESTLNYQLESLKEIHPPVLDRERILFLLEQFLISPNERTEDYNRRIIDTFVNRIEITDTEMLIYFNLSEASASEKQKNSQPNSCSTGNHLVRVARIELTAS

SEQ ID NO: 26608 - protein, 522 aa, synthetic construct
MGNVMLIPARRQVGNNARKQEEEKPKLRVAAYCHVSTDSDEQATSYEAQVEHYTEYIQKNPDWEFAGIYADDGISGTNTKKREEFNHMIDDCKAGTIDMIITKSISRFARNTLDCLKYIRQLKDMNIPVLFEKESINTMDAKGEVLITIMASLAQQESQSLSQNVKLGLQYRYQQGKVQINHNRFLGYTKDAEGNLIIDPEQAEIVKRIYREYLEGLSMDKIAAGLERDGILTGAGGKRWHTSTINKILRNEKYIGDALLQKTYTTDFLNKTRVKNNGLVPQYYVEGNHEAIIPKDIYLQVQEELVRRRVVKTSANGKKRSYSCNHCFSQIVICGECGEMFRRLHWNNRGVKSIVWRCISRLESTGLECHARTINELVLQDAVVKAINQMLGDKSSYQAQLQLNIASVIRASQATPVEHIDEKLIALQQELIQKAQSKEAYDEIADEIFRLRELRQQTTVDTAARDEQIKRINDLQDYIAQQTTHLTEFDESLVRRWIKQITIWNDHITVELKSGVSIDVDA

SEQ ID NO: 26609 - protein, 521 aa, synthetic construct
MKKITKIDGVQNNSTIKKELRVAAYCRVSTGSDAQLESLETQKIHYERYINSREDWKFAGLYFDEGITGTKAEKRPELLRLITDCEARKIDFVITKSISRFSRNTTDCLALVRKLQSLNIPIFFEKENINTGSMESELFLAILSSMAEGESASISENSKWSIKRRFQNGTFKLSYTPYGYDWDGANMIINPAQAAVVKRIFADILSGKSTNAIADELNAEKIPSKKNTNWTSSTIRGILANEKYTGDVIFQKTYTDENFNRHTNYGEVDQYMASDHHEAIISHADFEAANALVSQRALEKGVKKGSDKYQKRYAFSGKIICGECGDTFKRRIHTCTTYKYVAWACNTHLKDKSTCRMKYVRDNDIKAAFVTMLNKLIYGHRLVLVPYLKALENFSGDEALQRIQHLELLLDQNSEQRETLTKLMAQGYIDQILYNQETNALLLQAETYRSDIEAITICMTGDSAKVTETNLLLHFVSHADMLTTYSEELFESYADHVEITGRNEIKFVMKCGLTFTERIGD

SEQ ID NO: 26610 - protein, 482 aa, synthetic construct
MLGGENLKKKIIAISPEEQKKKAKIAPIEKIKVAAYCRVSSETDEQLNSLSVQRKYFDELFAVHSDWTNAGIYYDEGISGLGMKRRAGFNKMVDDALAGKIDLIIVKSISRFARNTVDALKTIRNLKAKGIRIIFEKENIDTSDTKSEFILTIMSSLAQQESQSISENVKWGIRKSYVEGKVKIPGFLYGYKYGGKYIYQVDKEEAKIVCLIYKMFLERKARNQIGAYLDKNNVPTAMGLENAKWSRNVVNSILTNEKYCGDAILQKRYVQDYITKKQVINDGKLTKYYVKNNHEAIIPRATLELTQEIIKSKRYENRQNNLFSLMIKCSNCGGWYQCKTQTRDYFIRTFKFYQCENKLTKTKECKNSCDITQDQLEFLFHIATLQLYDVFPELADDLCSITEKIIIGKRKQNRLKKLFKERPNFKISEYEKMSWPVLVNYAEITQNTLTFHFLNKGLITESFVRWKPIEHFEKKPKSPPKQ

SEQ ID NO: 26611 - protein, 526 aa, synthetic construct
MGKVRVIPSTINPLTHQSIVANVKRKVAAYARVSTDSDEQYTSYEAQVNYYTGYIQSRVDWEYINVYADEGISGTNTKKRVQFNKMIEDALGGKINLIITKSISRFARNTLDTISYIRKLKAAGVEVFFEKENLWTFDSKSEMVLSMLAAIAQEESRSISENVKIGKRWGFKEGKVSMPYKNFLGYDKVDGKIVINEEQAEIVRLIYRLYARKGYSRAAIADYLNEMKVPKPSNPEGKWSINNITAILTNEKYKGDALLQKGYVDNYLDHTVKKNKGVLPQYYVENSHPAIIDKDEWNMVQEELKKRDKFRYAYSKNNPFSSKLICGCCGHFYGLKVWHSNTQYRKEIMQCNKKYSKKDDRCDTPSVLREDVNKRFIEAYNAIMINKEEVIKSAKELIDLLTDTTKIDKRIEELNGEIFDTKTLVENIIHDNAFKSQDQDAYIKKYNSLTAQYEILKQQLEETIGERDVREMKSKSMNLFITDINEAPVMINEFDLTLWNIMIDEAIVNKDGSITFKFKNGMEYKN

SEQ ID NO: 26612 - protein, 446 aa, synthetic construct
MKIVTEIAAIAPIKKLKKVCAYARVSKDKDAMLQSLSSQVSHYNKLISSNPEWQFAGVYADEGISGTKEDRPEFLRMVEDAKTGKIDMIITKSISRFGRNTETVIKTVRMLKAINVDVYFESQKMHTLSEEGEFMLTVLASYYQEEARSVSENMKWRIKKDFEQGIAWGGNDNFGYKLNGRTLEIIPEQAKIVKRIFDMYINGLGVMAIAKALNEEEIKSTMGGKWIKSNVLRVITNINYIGDRVLQTTFRPDFLSKKKKINRGELKQYYVEDDHEPIIDKETFMKAQLIKEERAKRFKLDVSKRNITYPFTQKIKCSCCGSTYQHKITKYNQYWICSTFNMRGKKNCMDSKQIPEEKLYEAINNYLGIEEFDEDLFNKKIDYIVAKPNNVLEIHLFNGTTDEIKWTDPTRKNSWTPEMKEKARIKSKEIEKNLKRGADGKWVKSE

SEQ ID NO: 26613 - protein, 434 aa, synthetic construct
MERVVERVDALIPAQPKALRVCAYARVSAGKDAMLHSLSAQVSYYSKMIQSHNGWMYCGVYSDEAVTGTKRERAGFQHMIEECRQGNIDLVITKSISRFARNTVTLLQTVRELKILGVDVFFEEQHIHTQSSDGELMMTILASYAQEESLSASENQKWRVRKAFENGEIINLRFLLGYDITPGGIQVNEKDAAIVREIFERFNNGESMSSICRDLDTRGHKGVLGGTWCAERMRNTLSNEKYLGNALLQKQYRNNHIEKKLLPNRGELPMYYAEGTHEPIIDQATFDKAQERLRMLAQQAANRKKPTRSVFSGLIHCGLCGNTYKRVTYRKKHYWNCTTFQTKGKSECAAKRIPEETLEVLTCEVLGAVSFDPDMVRSKITAIRAEKNNVVVYCMDDGSEIVKRWKDRSRAESWTPEMKEKARQRALQARRKKE

SEQ ID NO: 26614 - protein, 538 aa, synthetic construct
MIAERKVVTKIEANPLLVSKERERTIIRVAAYCRVSTDSAEQLDSYQAQIAYYTDYIAKNPGWRFAGIYADEGITGTKAEKRPEFQRLMRDCKKGKIDLILTKSVARFARNTVDSLSYVRRLKAQGIGVFFEEQNLDSMKADSEMFIGIHSVLAQAESENISANVRWGIQQRMKSGTFKFRYNILGYKKGADGEPEIEPEGAETVRLIYSKYLAGESLDQIRDSLVQIGAKSFKGKVEWSKESIKHILTNERFCGDMLLQKTYIDNCISRKTRVNHGELPKYLITNNHVPIISRDDFQHVQMELARRSNKRKVSSRTITEQGKYSGKYALSEKLVCGECGTPYRRKTWIISGQKKIVWRCINRIEHGTRICHDSITVEEGRIHQAICNGLCNAATCRDEVLELIKSNLSYAIAGNEKILDAYAIQKNIERVNEEMDQAMIGFSTTQGDKNKYLEVINIKNSELAVLREQLALAKEQMNNDEYTRLEIEKLEQALASCDMIQTVFSDSQIRLLVECIRVNKNNTIDIVLKGGFSITEKL

SEQ ID NO: 26615 - protein, 519 aa, synthetic construct
MNAQRTVQIIRPSSELSTEDQKIKAAAYCRVSTDSDDQENSFLAQVKYYSDYIGSREDMILVDIYADEGITGTAMSKREEFKRLLSDAKLGRIDRVFCKSVSRFARNSLECIESIRALKDCGTTVVFENDNIDTKTMNSEMVLYVKSAFAQSEALAGSARVSSAYRMKMENGTFTTYCAPFGYRLVNGNLEIIPEEAEIVRKIFNMYLSGLGINSISAKLNREAIEGNGRQWNNPAIRYILTNEKYIGDSLTQKHYTPPMLPLRCIRNKGERDKFYISNTHEAIISRNDFDAAQRLLAERQKKIKTKQQSHLFSRMIICSHCGWAYRRKVQNGIIYWECSRKNDSGFDCDSPNLTEEAVKRGFVRAYNKLRTFEKEILDKTIADFSELQNKRTRGNAEINQIDSEILRLSEQNSRFENFRSKGILDEISFIEQTNRLRGRLTELRSRRFKLLQNCEEESIIESLSHVKEELEENPKALIDFSEDIFRATIEKIIVEEDGTVSYILKGGIKLNEKITEVI

SEQ ID NO: 26616 - protein, 540 aa, synthetic construct
MQANSSRIVTRIEANPLLSRTSTEFVKKKVAAYCRVSTDSEDQLNSYEAQIAYYTEAIAKNPNWTFAGIYADEGITGTATTKRKDFLRLMRDCEKGKVDFILTKSVSRFARNTVDSLMWTRKLRAKGIGVYFEEQAIDSLKAENEMLIGLFSVIAQSESENISANVKWGVQQRMRSGTYMTNFNCYGYRKGDDGIPVIVEEEALIIKKICQLFIDGYSMKQICDRLRSEEVKTYSGKLQWQPEHIQRILTNEKYIGDVLLQKTFRSNCIDKKAKVNRGELPKYLVSNNHPPIIDRDTFNIVQVELARRCSKKSKSDFALTERGKHSGIYALSDILVCGSCGAHYKRKGKTKNGQRIVYWRCINRIEHGTKICKDSIGVEEKKLHAAICRCLSKMMSNRDEVVELIRNNLQYALTGNDSVLDVYAIENQIQSYYDQMSILLDRLYSTGGEAEKYELEIKKINDKIAALREQLSTEKAKATSSDDLNREVERILNYIAQTDKDTFVEYDDVTVRRLVECIKVSNDGRIVVTLKGGFRGEEII

SEQ ID NO: 26617 - protein, 434 aa, synthetic construct
MKKTIVNIAPAVAETPHTKRVAAYARVSCGKDTMLHSLAAQIDYYRDYIMMNPEWRFAGVYADESKTGTKDNREQFQELLSECRSGNIDMVITKSISRFARNTVTLLETVRELKRLGVDVFFEEQNIYTLSAEGEVMLTLLASFAQAESLSCSDNCKWRIRKGFEEGRASTCTMLGYRLINGEITLIEDEAKIAKRIFDLYLAGYGLQKIANILNEEGLYSIFGNEWHPTTLRKVLTNEKYCGDLLLQKVYCENHLTKKIVPNNGELPQYFVEDDHPAVVSRETFAAVQKELKRRAEEKTPTVGSTSVFTGKIRCSCCGKNYRRKTTPYNTVWCCSTYNSKGKNHCPESKVIPEETLKRAVAGILKTDSFSGEEFERQICTIEAHPGNLLRFIFIDGSTTDYVWKDRSRSESWTDEMKAAAAKKAKERYASHDK

SEQ ID NO: 26618 - protein, 548 aa, synthetic construct
MTNKKVKKIEATKPTLSAQYSTFTRKRKVAAYARVSTAKEEQENSFDAQVSYYTQKIQANPEWVFVEVYSDEGITGTNTKKREGFNRMIEDALAGKIDLILTKSVSRFARNTVDSLVTIRQLKEKGVEVFFEKENIYTLDAKGELLLTIMSSLAQEEARSISENTSWGRRKSFADGKVSLGYSNFLGYDKGPDGELVINEEQAKIVRRIYAEFLAGKTPGGIAKGLTADGIETPGHKKVWQASTVLNILKNEKYYGAAILQKQITVSYLTKEKRPNTGELPMYYIEKDHEPIVSPETFQMVQEEMRRRREAGSNMQCVSIFSSRIICGDCGGYYGRKIWHSSTKYTAWHWHCNAKFQKRKYCETPTLKEESLEETFVEVFNGLIADKDEIMENYRLCIDAVTDDSEYRRQLEDLNNGCGEVQTLIRSLLMTYSRQDTAEDIHEKLQEYEERLDTMARLKQELDLKIAACAAKRVQITGFLNELMKHDAPLAKFDPLVWQAVINYAMVNRDCTITFTFRDGTEKTVPIKNGVRPYTKRNKPQEVDGNDG

SEQ ID NO: 26619 - protein, 490 aa, synthetic construct
MTDKNLLVITLHRKEPGKQRIAAYCRVSSRSDEQLNSLANQIDFYRSRFENDDTVVFVGIYAEEGLSGTQAKSRPQFMKMIEDCRSGMIDCIWTKSVSRFGRNTVDTLIYTRELRSLGIDVFFEKENIHSTESSGELMLTLMAAFAESESETMSENIKWGKRRRYEQGITGSITLNGMYGFRQNKGIVTIVENEAELVRRIYKDFIDGYSYGEIADRLIAEGVPTRMPGASWAKTTVQHIIRNEKYCGDCLFQKAFIANPITHQQVRNNGELPKYLVEDCLPAIVDKETWKLAQAVAARHTPHKQASNERYPFTGKLFCGVCGKPYCYYHYTTTNKQPLAAYRCMSRKTQSAVEVPGQTYTPPHKATFNLNASPELIAYRERYCKPPKERPMLCTDVRISIDLPQKAFCRAWNLIVAKKLRYQATLRSTVDNAEDILVRYRAEEMCLLIDEIGKLTEFSYPLMLKTLDRVVVNTNGKLTFIFQSGIKITV

SEQ ID NO: 26620 - protein, 503 aa, synthetic construct
MANIRRIEPVLPRLKARKRVAAYARVSMETEQLHHSLSAQVSHYSVLIQSNPEWEYAGVYADEGITGTATKHRDEFKRLVADCDAGKIDLVLVKSVSRFARDTVDTLKATRHLKDLGVDVYFERENIHSISKEGELLLTLLAAFAQAESRSISENIKWSIRKKFKLGIPNGIKAPYGYEWNGDSFSIILEQGEVVREIYDRYLAGEPAYSIAKGLAEKGVKGQSGVPMDDSTIKNILSSLSYTGTMLLQKNFFTEGHKRRKNKGELPMYAVEEMFEPLVSEADFEKAQQIMKDRAESMPNRNPKLTAFSGIVRCANCGCSISRRTSKYGKKWICNTKERKGKVVCDFRDIYESELEDAATKALSLDGFNADQVKSRIALITIDNAYITFQMKNGTSRQVLRKYKKGYSGFSTRLFCGCCGGMLEADTWNMGTAGKKTKYKVWVCRNCSVPREFDSTFRKATQELFHEEQCDGLFAQNIEKAINYDDKIEFYYKKGEVVTWQKE

SEQ ID NO: 26621 - protein, 525 aa, synthetic construct
MAKRVTTIPATLNRFDSRPLQSVRKRRVAGYARVSTDSEEQATSYEAQVDYYTRYIKSNPDWEFVGIYTDDGITATNTSHRDGFKQMVEDALAGKIDLIITKSISRFARNTVDSLVTVRELKEKGIEIYFEKENIWTLDAKGELLITIMSSLAQEESRSISENTTWGKRKSFADGKASVSFSRFLGYDRGPNGEFIINEKQAVTVRYIYKRFLEGFSTYQIAKELTKMGVKTAAGKDKWYTSSVLSILKNEKYKGDALLQKSFTKDFLTHKRVDNKGEVPQYYVEGHHEGIVTADQFEQVQAELYRRRNMDRYSGVGCFSSIIKCGECGSWYGAKVWHSNDKYRRVIYRCNKKYGKGCKCKTPHITEDEIKEMFIKAANELFSEKDEIIENTKTMMDMVCNTGDLDKELGDKVAQLNIIAEQMQTAIAENSRTALDQNEYERRYADLTERYNTIKADYDKISEQIESKKAQRELFKGFIRALEKQGALVEEFDEGLWSSLVQEVVVNTKDDIRFIFKNGFEIKTR

SEQ ID NO: 26622 - protein, 604 aa, synthetic construct
MKRKVAIYARVSTEHEAQINALENQIQYYNNILAQHPEWELVGRYVDEGITGTSVKKRKNFLRMMEDAKNGMFSLILTREVSRFARNTVDTLQETRKLKSYGVEVYFTEDNIRTSDDTDGELRLTLMATLAQNESKKTSVRVKAGQKISFENGVLYGNGNILGYDRVGRELVVNPEQAETVKMIFNMYHDGMGCKQIAYELEKRGRITSTGLTHWQPGTISRLLRNSFYCGKIVYRKQYVPDYLEQKKINNYDEVDKIEIMGKHEPIISEELFNDCQRRLDAKTVNRLRGKHAINPPKSAYARILKCQCGSNFERRKWHKYKDGRIRYGFECYKQKNHGSYRTRLKKGLDTTGCCTTKMFPEWKLKIVAHWLFNDLWKERDKIINRAIEMLNATIKDENVVDYTDEVKELNKKRKKYEEKLSNLVELRVEGDISKEVYEEKKGAFKKQIEYIDSELLKRDVKNSAIVSNVKTQIQLLTDLLEKKYDVISGDIPEDIVETFIDQIVVHDDYFEWRLRTSTEPVLCKVEGNAKDNTIIFLENDSHKVATQYRQRLRIRQNNLIHAIDSIELGNFVITKDYLAKYKETDENMKKVNKWNDIKIKVTI

SEQ ID NO: 26623 - protein, 465 aa, synthetic construct
MKGNAGDTIVKKIDLSPELVRVALYIRVSGEEQKIKGLSLEAQQERLEAYARERGWVIVGIYIDAAKTARKNIHKRTDFQRMMDSVKRDEVDILLFCRLDRWFRSVADYYKIMEVLEAHNCDWKTTDEEYDTTTANGRLYINVKLSIAQNEADIDGERIDVVFDSKIAHGTVVSGSAPFGFRVNEEKRLEVVPEDAAIVQDAFNYFETSISQRATVRYIRETYGVNWCDATFRRMLKEKLYTGVYDRGGRFNDHFCPAIISKQQFDRVQALLERNARSVPSGKVYIFTSILTCAECGHKLVGYKSSDYYYYRCNQHFQRGRCSHNHSAREDVVEQWLFEHLGEELERCQLEWGVEAAKKKVSIARTDKAALKRKLTKLKELYVNDLIDIEDYKKDYQIYVSALNQIPEPAQEAPPDFAAVRRLLDNSFRTIYDTLTREEKRTLWRSVIKEIRIDNDQNITGVVFG

SEQ ID NO: 26624 - protein, 496 aa, synthetic construct
MLKTVIYARYSSDKQNEQSIEGQIHECEQFAKTHDMVIIKHYIDRALSGKTDDRPSFLQMIKDSSSGLFDAILVYKTDRFARNRYDSAVYKAKLKKNGIKIFYAKENIPDGPEGIILESMLEGFAEYYSAELSQKVKRGIKENIRKGLSFGGACPFGYKIVNKKYVIDDEQAPYVKKIFEDYAKGRRAIDIFNELNTLPNYAGKGRKWNRSSLNRMLTNKKYIGIYELEDVCVKDAIPPIIDEALFNKVQSRILFNRRHTTRAKVNYLLSGKLFCGLCEHSMTGKTGTSKTKVKYHYYVCSNRHCKQKKYRKELLEDIIIQYTVKDILNPKHFKMIAKKCLEIQQADNKINDILLMLKKQLTATKTKINNIMNAIEAGIITTSTKDRLEQLEQEKYKLELEISTQQLNSNRLLSEKQIIYMLNVFYNKRVDVSFYNQIIDCFIYKIYIYSDKICIVYNLNNSDKDVTYSDINELYKSSHLNSCGSPNNAPTFVPPI

SEQ ID NO: 26625 - protein, 440 aa, synthetic construct
MIQKKITTIDAAPKLERLINVAAYARVSSGKDAMLHSLAAQIIYYQNLITSHQGWKFAGVYADEAFTGTKDNRHEFQRLIQDCKDRKIDMVIVKAISRFARNTVTLLKTVRMLKSINVDVYFEEQNLHTLSAEGEMVLTFLASFAQEESRSVSENMKWRIKKDFEQGLIWGSKPQLGYRIVDRHLVVVPEEAEMVRRIFNLYLDGYGFQGISNLLNAEGQTSALGNKWSKTAIEAIINNYNYTGDLILQKTFRVDHLTKHKKLNRGEKAQYLVEDAHEPIITKEQYMMAQTLKKQRAQHFNLLDMTKQINLFTGIIWCGACGKHYRRKKQERRMWWTCSTFNTAGKGACDSKSVPEEILIEITKKVLGVKEITAEIIKSKVDHIDVLKDNKLVFHLKNGTTAEETWKSLSRKDNWTPEMKEKARQRAIAQYRRKEGKHNG

SEQ ID NO: 26626 - protein, 518 aa, synthetic construct
MPKVTKIAPRAQTARLLRVAAYARVSCGKDAMLHSLSAQVSQYSRLIQSHSGWQYVGVYADEATTGTKDDRADFQRLLDDCRAGKIDMVITKSVSRFARNTVILLSTVRELKALGIDVYFEEQNIHSASADGELLITIMSSLAQEESRSISENVTWGQRKRFADGKVSMPYKRFLGYDKGPDGTPVVNEEQAEIVRMIFRRFLEGKTPLAICNELEGLGVRSPGGKDTWRSSTILSILSNEKYKGDALLQKRYTVDFLTKVLKKNEGEVPSYYVEDSHPAIIDPAEFDMVQAELSRRKAVGRSYSGTGTFASKLYCADCGGVFGQKVWHSNDKYRRIIWQCNSKFKAGKSKCATPALNEQAIRDMFLKAYAALLAQRRDIIDDCVTAVSALTNVDALNRSISAENERLEQNTELIRAVVREHASIAQTKEDYHRKYDPLMEEHSAISSKLDKLLAERESKTEHGKRLRSFLDALKQAPEALLVWDEQLWLLLVDHATVYPNGSIAFSFKNGTDITVND

SEQ ID NO: 26627 - protein, 524 aa, synthetic construct
MAKVTIIPSKLNPVTHQNLDAKTKRRVAAYARVSTDDEMQLTSYEAQVDYYTKLIKANDEWGFVKVYADEGITGTSLKNRKEFNKMVKDALDDKIDLIITKSVSRFARNTVDALTTIRKLKEKRKEIYFEKENIYTLDSKGEVLVTIMSSLAQDESRNISENVTWGQRKRFSDGKYNLARKNFLGYKKDQDGNIVIDEKEALVVKKIYRYFLDGVTPGGIAQSLMEEGVPTPGGKTKWIYSTITSILQNEKYKGDALLQKRFTVNFLEHKMKKNEGEVNQYYVKKGHPAIIEPLIWDRVQLEIKRREMGKNVYSSKDVFSSKLKCAECGSYYGKKVWHSNDPYRKVIWRCNHKYDGDKKCDTPTLEEDKIKDAFLVAYNNICVNKEIVIETTKELVDSLCDFEDLDNKIIKESEDLDLIADKVHKMVMENASTAQDQEEYQKRYDYLSSKYDEGKAKVKALQEERARRATQKEILELKIKELETADILKEWNGSVFKMSVDEILVSKEELTFKFYIGDEIKIKL

SEQ ID NO: 26628 - protein, 443 aa, synthetic construct
MAEKITKIAAKPALISKKRVCAYARVSSGKDAMLHSLSAQVSYYSKYIQGHPDWIYSGVYADEALSGTKDERPSFQRMIADAKEGKIDIILVKSVSRFARNTVTLLEVTRELKESGVDVYFEEQRIHTLSSEGELMLSLLAGFAQEEARSVSENMKWRIKKDFSEGILWGGKPHLGYDVVDKKLVIIPEEAEIVKRVFSMFLNGMGIQRITNILNADGVKTKVSNHWSKSSVRHLLNNINYTGDLLLQKTYRINYLTKKKKINKGELDQYYIENDHEAIISKEDFKKVQELIKVKGERNKINSSKRTFSVFTSKIKCGMCGASYRHKVTRYNKVWICRTYDSIGKASCASKQIPEEQLIEAINKYLGIDSFSDEAFNKRIKLITVLPDNILRILSTDDKETDIRWEDPKRSNGWTPEMREAARQRTIQQWKKRGDDGKWQKLQ

SEQ ID NO: 26629 - protein, 490 aa, synthetic construct
MKAALYTRVSTDEQAEHGFSLEAQKKRLIEYCNKNNIEIYKLYSDEGISGHSIIKRKALQEMLQDAKEHKFNYVIAYKTDRISRNLLDLLTIKNQLDEADVELLLSDEAIDTKDDAGMTMFSIMGAFAELERKKITERMMAGKRQKLMNEHIKLKNGRVPYGYLYDDENKKYIIDESRRSIVELIYKLASQGWSYNKITRHIAEETAANSSDSKKKWYISDIRAILTNPIYKGYSGISYYYNFNDRAKKPKNSAILYKATNVEPYFTEEYWDTLYSQLEKKTQYFKRKHPIDSYIFSDVLFCATCGLKIGTRQHHANYLYYVCNSKHKMYDNDHICDYAININKFNNWFIEFIRGIDENNIKLSVSKPKDLDRELQAVRSQISLKEKNREVLLDKLMNGVIDDTEYRLASNMVIASLNSLKSQEKELSDKMDSLKEKEQTKRYNRLKIKTLKALVNDWDNLTDQAKKTLINSSINKIMITKDGIQEIEFN

SEQ ID NO: 26630 - protein, 499 aa, synthetic construct
MDAIYARQSIEKKDSLSIEQQIDMCKKSAADAVEIYKDIGYSGKNTTRPDFQRLLDDVKSGTVNRVICYRIDRISRNLLDFMNIWQLFQQNHVEFISVSEQFDTSTPVGKAMLYIAMVFAQMERETIGTRITDNFYARTAAGAWGGGPAPYGFKKVRGMLHGKTQTLLEPVSSEQENIKWMFTEYATGLRSLGWLGREMWKRDPDRGIRWTNVSLRRILINPLYAAADADLYAFFSSSGINIVSPLSAWDGKHSALQTGSRSADTRVRRPISEQQLSVFSTDPVVSSQTYIRVQKQLAKNRQIKNTGKGQWSWLSGKIKCAECGYSCTLCHSPGVTRTKAYIRCSGRYGQFAEKRCTTRHTETIESVEEYVLAQLKDHLSGVTPSKRSKKSAAQERKRNELKLQLIEVQQKQQNAAAAIAEGGATIMRLMMPEIEKLDVEATKITDELSTLAGSEQQSWMPDMILDFDAIDDTGLRDLVALTIDKVLVSPSRPPEIIWK

SEQ ID NO: 26631 - protein, 453 aa, synthetic construct
MKCVAYMRVSTEKQAEEGNGLESQKRDIENYCRKNELIIADWYVDEGYTGSNMNRPELQRLITDCSRKKVNCVVAFKLDRISRSMVDGIYIIEKVFQSNNVAFKCVHDSISYDSPMEQAYTQMMAVFAQLDKNTMMLRMRGGMLERIKQGYWWGGGNTPYCYRYDKEQGILIPIQERAEQARKALELFISGYSDAKIKEICGFKSELVTRKVLTGVVNIGMIPYKGNIYQGKHKPIFDKDRFELAQELRKSRCSAKISCFTEPNLLTGLCYCGVCGCKMRYQKWSNGNHKIYCCSRNKGLKYLPNYNPNCNNSLEWAYDIEKQVTDEILKISLNLSSYKPKAKETKLEIMQSQLEREQTKLKRLYSLYADGNDTVLEMIKDLESQISKTKEDISVESKNAINTQKKEFTYQNIKKLADVWDNIDKKQKNFILKTIIDKVIIVNGNVEIQLKNF

SEQ ID NO: 26632 - protein, 523 aa, synthetic construct
MENAVIYARYSSHGQNEQTIEGQIRVCKEYAKNKKLKIIDTYIDRHKTGTDDKRPQFLKMIDDSASGRFQYVIVYMIDRFSRNRYQSTVYNFRLAQNNVKLLSAMENISESEEGEFYQMFLEWNAEKYSKRLSKRVTEGLTTSVNNGTFTGGRLIYGYKIVYDIPEKRTNPRVFIKEDEAETVKYIFNEYAKGTTKKDIAEALNNKGIRHNGKLWQSRDFEHMLVNRKYTGRFELGGRECNETFPQIIDDILFSKVQKRAQANKHSAGSNTTTEKYLLQGKAYCGMCGANMVGDSGTGRSGTQYHYYSCSNNIKKHTCKKTREKKDFLEWYVTEQTVLYLSDENRLKIIADDVIKYYESRTDKSEINRIIQESTKTKKEIDNSVNLMISGVSPETVKILDAKIVELNRLLNDLTEQRERLEFEQKLKVTRKDIIDFVHEFTNGENHDKEFQKRIIDNLVNAVYIYDDKVVIYFNINGGKEMSFIGKAETDEAMEDIYKSKMTMNTELSDDSTDIKSVRTLSHS

SEQ ID NO: 26633 - protein, 460 aa, synthetic construct
MKYVACYCRVSTDEQAKFGFSIQAQKDALKKYCKDNNYKYEFYIDEGISASSMKRPALKSMLSKVNVFDMVLFTKLDRLSRNVLDANNINKLLIDNNCTMKAIDEDDIDTSTADGTFIFNLKVSLAQREIGKTSERIKFVFQNKRNKGEITSGTKKYGYDIIDKHFVVNIDQQENIIKFYEYFINVGADTKLSFEYFKDHFPFKSYEAYKKMLTETSYIGKYKLYKKEEYIYNYIPRLMTDELFYTVQDLLGKKRKIVKNNKEAPISLFDGILKCSECEGSMSRRISYTKYGNYISYRCWKSEKLSKEIGKQYKCSNRHSIFESKIEKYLLENIKKEAENYIANNKIVSVKEKESFLDNSKDIKKKLEKLKDLYINDLIDKEMYENDYKKYNRQLQEIETKKNKYKNNTQKDFNKLEKILNTNFDDLYSSLSQIEKRRFWVSIIDKIYYNNKKIERIIFK

SEQ ID NO: 26634 - protein, 527 aa, synthetic construct
MAQHRKVKTIPATLTRFTSAPITEQKKRRVAGYARVSTDHDDQFTSYEAQIDYYTKYIKSRDDWEFVQVYTDEGITGTSTKRREGFRTMVADALDGKIDLIVTKSVSRFARNTVDSLTTIRQLKEKGIEVYFEKENIWTFDGKGELLLTIMSSLAQEESRSISENCTWGQRKRFADGKVSVAYKRFLGYDKGADGNLVINPEQAVTIRRIYQLFLQGMTYNSIAQELTKDGVLTPGGKTKWSISTVRSILSNEKYKGDALLQKSYTVDFLTKKTKINEGEIPQYYVEGNHEAIIDPDVFEMVQREIERRGKGKKYHSGVHAFSSKIKCGECGCWYGSKVWHSNSKYRKVIWRCNHKYDGDKTCRTPHLTDEEIQAAFLKAVNKLLETKDEVIANGYAMIPVLFDTAALEAEHDELLQETQVVSDMVQQCIYENAHVALDQAEYQKRYDALTQRFDKAKDRLEEVTEEISQKQTQRANYEAFLKVFEKLPEQLPEFTLETWHGLVDYATVNAEDDIRFTFKNGQEVKA

SEQ ID NO: 26635 - protein, 606 aa, synthetic construct
MYRPVKGADFMAKIRKIEPVMPTLPTRKKVAAYARVSMETERLHHSLSAQVSYYSDLIQRNPEWEYAGVYADDGITGTKANSREEFQRMLEDCEAGKIDIILTKSISRFARNTVDLLETVRHLKELGVSVRFEKENIDSLSGDGEVMLTLLASFAQEEITSLSNNVKWGIRKRFEKGIPNFRNKILGYEWEDDHLVVVPEEAAIVKRIFQNFLDGKSRLETERELNGEGITTKAGCKWCDSNIKVVLSNITYTGNLLLQKEYIEDPITKKRRKNKGELPQYFVENTHEAIIDMETFQHVQDEMARRRKLGALANKSLNTCCFTGKIKCPYCGFSYMHHIRKRENGTENYWKCGTTKKKDGRCPIKGGIRDDKLRMACADALSLGEFDETAFLAQVDHIEVPKRYQIEIHLKDGRVIPKDCTPTGHQDCWTQEYRDKVSEQRRKNGTNPKGASCFTAKIKCAECGNNYRRQTRKRSTGEKYYLFACATTKDCSNNCIHEDVLKELAAEALGLSTFDDDAFTDQVDHVDIAPGGHITFFLKDGTCKAMTYSTKRRMPKWTEERRKKQGDAIRASFTEKRRQRMSETMKKVRRERYWHSTGKSKRSQQP

SEQ ID NO: 26636 - protein, 463 aa, synthetic construct
MTTKVERCAIYIRVSTTEQMMHGKSLEAQKEYLTNYAREHNMAVVGVYADEGKTARKELKKRKAIHSLLQDVEAGKIDVIIFWRIDRWFRNLSDFYKVQDILDSHNVRWISTSEPGINMETRDGRLQLNVVLSIGQNEVDTTSERIKFVNEASIRSGKLIFGDVNMGYGYKSGIVDGQKRMIKDPDREHVVDAFYKYFFKHQNKCATLRYIQETYDPDFSFGIMRTLLSSEFYKGTYRGFPYCPAYLTEDEWSKLQKIQKRNVKATPSGRIYLFAGMIRCPVCGQLLCGTGCSSIINRKTGAKRTYCYYRCNRAMIDHICSYRHRLSQNLVENYLLDNLENEYKNYKVKCEKIEKEKEKQKKKQSPEKLRKELDRLNFLFQKGRIEWDYYNEEYGRVESELNDLQSALPEPAPNYSYLEELLDTDFRTMYDQLSQENRRAFWRSIIQEIHVNEDHAITSVDFL

SEQ ID NO: 26637 - protein, 586 aa, synthetic construct
MTNPTVQVRKATKQTVSRRKGVHLNTLRVAAYARVSTDSEEQLESYQSQVKYYTELISNNPEWQFVGVYADEAITGTQTTKREDFNRMINDCMNGDIDLIIVKSISRFARNTVDTLQYVRALKEKSVAVMFEEENINTLTMDGELLLTILSSVAQQEVQNISEHVKLGLSMKMQRGEMVGFNGCLGYDYHKEDKTITVNEKEAEAVRYIFNRYVEGAGGKVIARELKNLGYKNKRGESSFSEHGVIGIIKNEKYKGDLLMGKTFTVDPITKRRLDNMGEADQYYTENHHEAIISRELWDKANEILNKRKGSHSRSNGKRDKYSRQYSFSCLLKCGFCGGNLTRRTWNSRTDYKKTIWQCVTATKHGKKECPYCKGVPEALIEEAFIRAYNALCTYDGEFIDGFLEHVRAGLQNNDTDRELKNLNKKITRLKERKSSLVDMRLDDKIDEEIYQIKVTEINEQMDGLLLQKQSLKDKLQDQQDINKRLTEFQNVISKHEILQKFDRHVFESIVDRVIVGEKAENGEINPYKLKFIFKTGYEKDEVASSQPFSFANSCSNGNNDCGIISLQGDNDTPRQRTNAAVANSA

SEQ ID NO: 26638 - protein, 514 aa, synthetic construct
MPKKNPSGGKRLVAYYRYSGGSHQTEQSIEGQRRDCETYARIHGMVILHEYIDRHISGKTDDRPEFQQMIADAGKGMFDYVICWKTDRIARSRYDSIIYKKKLRDNGVELLYAAEANVEGSGGIIVEGLMEALAEYYSAELAEKVRRGMRESALKGKAIGSSRPLGLTVDKDKKYIIDPAGAAAVRYIFEQYAAGAASSAIVAHLNEQGLCTSRGNPFNKSSVVRIIQNEVYRGVYVSPKFDVRIEGAVPAIIDDDLWERAQKMFIRNRQSRSPRNDRADYILSGKLFCGECGTAMKGVSGHSSNGEVYFYYNCPCKDCHRRNIPKDELEGLVIRTVCNDVLQPDVMNRIADSVIEAQTAELNQPNPEKEALQHELADVQRKAKNLLAALENGTAGAMLTNRLAELEQQSDTLSYQLSSLESEPKFPVFSKEEVLYLLEQFLIAPSEKTKAYRRRLIDTFVSKIEVSNTELTIYFSIAEEDCGKMKKAPQSNQPEGCSTEKQMVRVARIELTAS

SEQ ID NO: 26639 - protein, 492 aa, synthetic construct
MNIQEIPTKKVEKPRVCAYVRVSTDSDAQEDSFAFQSNYWQRRFESDESVEYIGLFSDEGIGGAFMKKRDGLKRMFQKVRNGEIDRIYTKSVSRFARNKVELMEIVREFRDIGVEIIFESENIHTLDPKCGLILTVMASLAEEELISMSQNQKWAARKRFANGSVELTQILGYDMIDGKLVINEKEAVIVRRIFELYLQGNSFRTICYILENEGYTPMHGGRWSKSTITGMLRNEKYCGDSIMQKSYSTMKVQKYNYGELPKYYVQDNHEPIVSREDYQKAQEIMIARGNKYRPRGSPTALYPLSGKLICGECGTSFKRKTSAHGTPYMCIKWTCRKKDVYGVKECTSHDIKDEVVTRLLIEAYNESLDANNDVNGITEQEEVLRKLIANEQELRQLRAKGYISESKCREETDKILIKIKEQETLIKNLRMRDMVKGKYKKSDELTEQMAEFLVKATVKDWTITFEFQNGYKTTKEYTNGRAGNVNGKLCKH

SEQ ID NO: 26640 - protein, 544 aa, synthetic construct
MSMENCANTKPKITIIPAKTRVERLDPLSIAMGQKPKIRVAAYARVSTDHEEQESSYEAQVDHFTKLIASHDDWTMVDIYADPGLSGKNTKRVQFKRMIKDCEDGKIDLIITKSVSRFARNTLDCVQTARKLKADGIGIIFEKENLDTLQERSEFVLTIMASLAEEESRSISNNIRWSVKKKFQEGKVILNTKHFLGYTRDKKGTVLKIVPEEAITVRRIYAEFLDGKSLKEIAEGLERDGIASPSGRETWHPSTVKSILQNEKYKGDCHLQKTYLPDFLSPRRIKNEGFAQSWYVEDSHAAIIAKETFDMVQQEFQNRQSLRSTGETGCGKFSGKYPFSGMIVCGECGETYRRHQQYNKYKKYYIWVCKRHENTGAEYCKSRPIKEEALEKAFVRALNELIGDKERILEKLQSATVSEITDSCATAINEVNAEIEKLQEQMMELLMKRNNGEITDKEYEQQSQQVGIKIDQLLMRKEEILSEQGKVQLASYRIEEVTKLLQTGKILEEFDRVMFKSLVRKITVLSNKEIEIEFECGITVRETL

SEQ ID NO: 26641 - protein, 545 aa, synthetic construct
MRTIRKIEQKISGLKQRKKVAAYARVSMESERMHHSLSAQVSYYSKLIQKNPNWEYAGVYADYGISGTGIKKRQEFRRMLEDAEAGKIDIILTKSIQRFARNTVDLLQTVRHLKELGIEVWFEKENIHTMSGDGELMLTILASFAQEESRSISDNIKWRFRKKFEQGIPHAKFFVYGYCWEKDNLVIQPEEAAIVREIFDAYLKGRTRKDILRELKRREIRTMYGNYFKDASIRQILTNRIYTGVLEIQKTFVTDPITKRQTVNHGERNKYVVEWHHEAIISSDMFERVQQELKNRKEMGMQRGGYARDFLNTSCFTGIIKCGICGKSYVHVVRKYKGRIREYWTCDSHKGKGTNCGAYGSIPQPALKKACAAVLGTDEFDEELFVQRVKKIVVPSYHTLVFHFKDENVITQEWKSTALKDMWTDEQKKKQRQWMETYHQRDTSSRYTAFSERIVCPACQTKFIRCLEKRKNGKVAYWRCRGEHRCIHVRSIKEEWLQRMAAETMGKLEFDDTAFRAQVQRIEVQDNETLLFQFNDGHTKEVKLP

SEQ ID NO: 26642 - protein, 519 aa, synthetic construct
MKKVQVIPATLQNYTEKSFHNQKKRKVAGYARVSTDRDEQLTSYEAQVEYYTHYIKGRSDWKFAGIYTDEGISGTNTKHREGFKRMIADALAGKIDLIITKSVSRFARNTVDSLTTVRKLKDKGIEIYFEKENIWTLDAKGELLITIMSSLAQEESRSISENVTWGHRKRFADGKVSLAFSHFLGYDKGLNGNLVVNKEQAKIVKLIYRLYLSGYTFHSIAKELTERKIPTPAGCKIWRANTIRSILMNEKYKGDALLQKKFTVNFLTKESKKNEGEVPQYYVEHNHEAIISPQVFEWVQEEIKRRREGKRRYSGVSIFSSKIKCGDCGGWYGAKVWHSKDKYRRTIYRCNDKFKNRCQTPHLTEDDVKAAFIRATNQLIENKAEIIDNVTLLKERLTDTEALEEERDKLSTDLNLLADKVQQLIAENARVAQNQDDYDRNYSELVSRYEAAKTQYDKACDTIQYRKARSLQMDSFIKELRNQELIKEFDARLWSSLVDFITVYSKDDIRVTFKNGIEY

SEQ ID NO: 26643 - protein, 503 aa, synthetic construct
MKKAVIYARYSSDNQREESIDAQLRVCRKHCADKGYIIFHEYVDEAYTATNDNRPAYQQMLRDSGRKEFQIAVFHKVNRNARNEYDYYMNKAKLMSNGVKIEYAGQSFDTSTAEGQLMENQLVGMAAYFSRNLAREVKKGQHENALKCVHNGGTPPLGYNVSPMTRRYVVNEIEADIVRFIFDAYAAGKKYPYIIGECKRRGYKTKRGRDFGYNSLHDLLRNKKYIGIYTYGRVRGSRNMPRNSHRNSSDVVEIENGLPAIIDMDTWSRVQDRMDEKSNARGSLHAKVTYLLSGLIVCGKCGKRLVGNNYRKLVKNGSRNMHRYYRCKECKGIHISKERVEQYVIELVKSNITGKRKIKSIVSAINKELDKDDTEHASELAAIQKELASIDKANDNLMAFIESGELSDIIKQRLLKNSERASKLRARESEIFSAKRPKITADEIAEVLKAWQDVSDDEGLKAMLHTFVQAVVIYPTKIEVDMCIAMNGIHYSTTSSGKNKTDI

SEQ ID NO: 26644 - protein, 449 aa, synthetic construct
MKKAGLYCRVSTDIQMEGYSIDAQKDFLKSYCKMHEIDNYEFYIDGGYSGSNINRPDMQRLIEDVEDHKIDIVVVFKLDRLSRSQKDTLYLIEEVFNPNDCGFVSIKENFDTNTPFGKAMVGILSVFAQLERETILERTRIGRKKRAEEGLWYGTGNLPFAYDYDEKKGILVPNKEKVEIVNKMVELYLQGMPMTQVGALFGLQDQTVRSIFTSPVGLGKIPYKDEIFEGQHEPIMTQETYDKLQQKMKERAVTYKHANYLLAGKIVCGKCGAKYRYQKAGTSSIRLYCYSQQTSKKNLIKDANCDNRRYYDYEIEDYVIKDLISMSLDESKFRHNMNMNDINVSQARIDRIAQIDKQVVNLLDYISEGIAVEETKEKIRKLQEEKEKIQKELSDEKAKERKSENLKVVISDLNIAWKTMTFEEQRNIVLEVIDKVVVNDNEIQIYYNI

SEQ ID NO: 26645 - protein, 581 aa, synthetic construct
MARKRTNLIGNTPSVRETKVAIYIRVSTIHQVDKDSIPMQKKDLIAYCQLILGTDNYEIFEDAGYSGKNTDRPAFQNMMGRIRKGEFTHVLVWKIDRVSRNLLDFAEMYEELRSLRVTFVSKNEQFDTSTAIGEAMLKIILVFAELERNMTSERVTATMISRANSGQWNGGRIPFGYSYDPKEKVFSIREDEASICRELKDLYLLNRSLAYVSRALNEKGYKTRAGVSWSPHSVWIIASSPFYAGIYRYNRYKGVESRTINPEEEWVMIQNHHPAIFTLEEHQAMRSIMKSNKRNMDNLPGRVHLSTKTHIFQGIMYCDKCGSKMVSTPGRLHVDGYRTSNYGCPLRRNTKKCNNPTVNDIVIGEFVINYILNMLNAKKTFSTINTPDELNVALLSGSVFSEVSSVEENGLNSFFNLLSRYGSDRSYIFSVKSPRKKKAAVDPELSKLRKEKEKQERALQRLQNLYLYSETSMSEKDFIIRKSEISSHLDNINRQLGLMTQDQASFLSDEEFIKQASHLLIQKELKNKKYIYFKKLVSTVDPDILKAYMETILDSIYTADGKITAITFKNGLTHRFIYKDK

SEQ ID NO: 26646 - protein, 520 aa, synthetic construct
MVKCMKSVAERAVPAVIYARYSSSHQREESIEGQVRECREYAEREGYSVLQVYADRAITGRTDERPEFQRMLADASKGVFQAILIYKYDRFSRNRYSFAVWETKLKKHGVKVISARENVAEGAAGIVLKSVLQGMAEWYSVDLSEKVTRGMKENALKAKWTSGTVPFGYTRDAEQRLIIDPERGEFVRQIFEKVLAGEKYVDIASWLNMLGVRTARGAAWNKSSFTWMLKNVVYTGLFRWKDIEIKNAVPPIVSKELFEAVQRKLKTYGRRGINVQKSDKYLLTPNIICGECGGPMHGMSGKSRSGELYYYYACANKRAKRTSCSISPLNRDELEQAVYNCAREVLLHEENIKLIAEQAEAVAEAQVDNELAEMKAERSRVKKSIANYAAAIANGATSGTIIELINAAEAKAAALDEAIAERELITAPPKVSKEAIEYFLRNIAAAPDDKMKEKVISTMVNSVVVERVPDEGTKKDSDEKYSITVRFNFTDTPQLSALQSFDVREKSKMVTSAGLEPATF

SEQ ID NO: 26647 - protein, 502 aa, synthetic construct
MEIQIREGNSIQKRKLKVCAYCRVSTDADEQENSLENQIRHYEEAITSNPDYEYAGVYSDFAISGFKEKRPGLQKMLADARKGKIDLILTKSVSRFARNTSIVLEATRKLKELNVGVFFELQNINTLSGEGELMLTILAAFAQAESESGSVGAKMVYQRKYEAGIPVQYLERSFGFKKDERGVYIADEEEAVWVRKIYEMAADGYTPASIKRHLNENGVKTVGGAEWIDSTVFRLIENEIYKGDYIMHKHFVNEERKLVRNRGEVDAWYIEDDHEAIVFPELWQKAQDALEAKRDYLAESSVIEEFTEENYPYMNKIFCARCGHPLYKRIYSNGNRLNWGCSGTKRYGKSFCEGINIPDGVLRGAWHFDENMYIGEKPTDKGKKEFTYLKEASWKRRHKKKEPEPIPENTETEYPYREKIFCGLCGSRLVRHVNTKSHKVIWVCNGRKRKGKDFCDGTRVPDTIIKGWGEIKKDIYIQRKDDKNGKKRYSYTSKKPKGADRA

SEQ ID NO: 26648 - protein, 464 aa, synthetic construct
MARSVTVIPARSQKVRTGHKAVQEKKIRVAAYCRVSTDQEDQLHSFEAQVEYYTKYINEHENYEMAGIYADEGISGTNTKKREQFKKMIADCEGGKIDLVITKSISRFARNTQDCLAYSRKLKNLGIGIIFEKENINTLDSTGELLFTILSSLAQDESRNISENCKWGIRTKFKNGEMHLNTFKFLGYDKDENGKLVINKEQAKTVRRIYRDFLIGINPAQIAKELTEEKVPGCLGQTKWYPSTVTGILKQEKHMGDALLQKTYTADFLTKRQVRNNGEIAQVYVKDSHKGIIDKQTWNAVQEEFDRREKFMESHGTDRYSYGADCMPFCEKVFCGECKSLLTRHSWRSRGIVQWQCKNHRKDGKVACTNAYVDNADLEKGFVKAFNRLVTDRDKHMERWQQMKSDGTPLEKIRAGQMMEAVGNEPLTRFVPEIAQLVLCEVAVLGAKKYEFFFLEGSRVKVSV

SEQ ID NO: 26649 - protein, 656 aa, synthetic construct
MGLRSKYTEQQICKLEKKEFMKEASFDDIFIDYGHDLNVLILCRESTAHEDQQKALNDQVERMKGIVDRHRQLHLVDDGIIIEDAKSGLAMDVRPKFQATIKRAVAEDIDVILVQEASRFSRNTGDFFYNMNILQNSGVGILIMEGGFWTYFMAPGDYPRLANEVAKGQAESLTTARRVNRGIETYRSRGQLVSGNMFGYDLVKAVERKNNTYKINPVDGATVQLIFDMYVNKGIGTELIATHLNAHNYPTAKRTGEWSASKVRRVIMNEKYANLIMYGKFQIVDTSTKKKIATHIKPVRTTTYDKDGNIIQERNVQYGTWEPLVDEETWWKAQEIMASRSNSYNLKDDTGKSKRCANGLRTSNDAYANKAYCCCGHTLSPQYTHAATDTKYAQFRYNCRWQINSHTDEYRKKHGLPPSDCTCKLPAVTDVAMRLMSIKVFEYLFTDIRDTIDDTVRIIEMANKQAVDSLNNSGVSVEDLEATYAKLNNRLSRFADMYADGDLTREQYRDKKSSVEEELKHTKELIDSKKLAISEQKKKSLDIETIKARLNTYVDLKGYGVSNEMIEFFVERIIRRPDNEYVWELNLTGQPSKPNKYKIKKYNKEYSDSLQDDSNFNIIKTFVISLDECKKFCETLAHRQFRASYWNQITVKIAVK

SEQ ID NO: 26650 - protein, 597 aa, synthetic construct
MPKKRGSNEEFLNPGAKRFRVPEVMPRKLKAAIYVRVSTRYQVDKDSLPFQKEELINYIKYALNIEDYEIFEDAGYSAKNTSRPKFQEMMSRIRNNEFTHLVVYKIDRISRNLLDFAQMYEELQKHNCSFVSKVEQFDTSTAMGEAMTRIVLVFAELERKMTGERVTAIMFSRAEKGLWNGAPIPIGYKWSEEKKYPVVDPEEAKIVRYIFDRYISLESALKVSYDLAANSVKTKRGGEWTSKTVRDVIRNPFYKGTYRYNHKTQAGTEKPLSEQIIIECNHEPIISEEVWSRANAIMDTNAERSVAHLRNNIRYTHIFSKMLKCWYCGMTMGAGLDRPRSDGYRPSKYYCTSHNRKQGCPNRYISDIIIGPFVLNYLANMVQAAQNVSKRTRVDTLEKMLLRGKFFSNVDHIEREGLLTTFNNMVYGVARADFDPKKGQQDEPNNAELDLLASEREKYIRALDRLQSLYLFSDDGISEKDYIVQKGELEDKLESVNRRIAEIQGEAPEDDADLLQKATRFYIQNELVKKRSLDFKKAVSVFDKESLKDFFSSVIDTMTVKDGRVKAIRFKNGLTNVFVYKGETGPEEHENAVEASE

SEQ ID NO: 26651 - protein, 514 aa, synthetic construct
MQMEYAMYLRKSRADLEAEAPGEGDTLARHEHILMELAKSRALPIGAIYREIVSGERIANRPVMQQLLSEVEDGRWKGVLVTETSRLARGDTIDQGIVAQAFKFSGTLIVTPAKTYDPTQEADEEWMEFGLFMSRQEYRMIRRRMTAGMQAAKREGRYISNVPPYGYERYKLDGRGWSLRPIEPQAKVVRMIFDLYLSGLGYCEIEKRLNALHIPAPKSDKWSARTIPGILRNAHYIGCIPAAFRPGKKVVKDGQVKVTRPRVKSCELYKGLHEPIIDRAVWDQVQARLGKNAAVRTPGNRQQSNPLAGLIVCDCCGKRMQRRPQTGTGSQTQIQCTTRGCATVAHNADELEQLVLDSLRTFLAQIEVGTPVAPDLSAEQHALSEIEKQLTDLEARQRRTFELVEDGTYTREIFLSRQAELNTERERLTADRTAIQHKIEQAQHEYDARTGLAPAVRHVLDTYNTDLPAADRNKLLKQVIDRIDYHKRTRTRWTKESDLSLTLHPVVFSASANR

SEQ ID NO: 26652 - protein, 522 aa, synthetic construct
MELLNVCIYLRKSRADREAEARGEGETLSRHERILLDLAKKRGYNVGAIYKEIVSGETISARPVMQQLLREVESGMWDGVLVVEVERLARGDTIDQGVVARSFQYSNTLIITPLKTYDPNNEYDEEYFEFGLFMSRREYKTIRRRLTAGRESSAKEGKYCGSKPPYGYSRVKLVGEKGWTLQPVPDQAEIVKLIFNLYVHGVSGERIGMAKICRKLNDSGIKTMDGGLWTISRVQAILRNPVYEGMIRWNSRKAVKHIKDGQITISRPFAQDYILVKGRHPAIVSRELFQQAQDIVNKNPARPLNSLHVLRNPLAGIVRCGKCDHVMTRKSPNGRQGDLIRCPYSSCSNISSKLPLVEKALLDGIQELVDGYRLNNSVSDQEYSLSISEREKMIQGKLKEIDILKKRKQRQYDLLEQGIYSTEEFLERSRATAAELSACDAVILSLKQEIEHEQELQFQRSSFIPKCEDLLANYWTWDTSTKNRFLRELIEKAVYTKNAKNTWKNGDDISFTLDIYPKIQQK

SEQ ID NO: 26653 - protein, 518 aa, synthetic construct
MQENETYVIYLRKSRADSEKSSLEEVFTKHESELQSLAERTLGNRIPEDKIFREVVSGETITDRPVISQILKVMESKKIKGVFVVDPQRLTRGDLLDKGHLINVFKYTNTKIITPYKTFDLNNDFDLKLFKMELDKGSDYLEYYKMIQARGRIASVRSGQYIGSTAPYGYDKYSYKENKHTVNTLKPNSDEATVVQLIYHLYVNESLSYAAIANKLNTMNIKPRKSTSWSPYSLKEILHNPVYIGKVRWNRRKTVMKYKNESLLKTRPIALNDSIISDGIHEAIIDEALFDSAQECNGKTPRNHSSSKLINPLAGLIFCGNCGRAMSYKTYKNNAGSEKQSPRYLCNNQSNCHTKSAKATDVINQIISALECYIEDFKVKLENDDGNSFNVRSQIISVLNKQLQDLEVREETQYEMLENKIYTPELFKKRRQKLLEEREVLLDKLQEAKVQEPVKIDYQEKIISFTDTVEALKNPDIDILHKNMLLKKCIKKITYTTDKEKGNRWRKSTFEIDITPLI

SEQ ID NO: 26654 - protein, 504 aa, synthetic construct
MNYNDSKGIYLMYLRKSRADEYNQDVENILKRHEEELQSLAKREFGELIPEKYIFREVVSGGTIKDRPLMKEILKMMESGIIAGVLVVDPQRLSRGDLLDQGHIINAFKYTNTLIITPYKTYDLNDTTGTDMKLLKMELNHGADYLDYYKMVQARGKLASVRAGNFIQPIPPFGYRKVRYGKVTTLEPIEDEARIVRIIFQKYAEGKTICGVTNELNAEGYIPPSKQIWTKGSVKRILSNPVYDGKIRWGLTPNKTVMEDGKLKKYRPERHDYLLFDGKHDAIVNHGLFMSVQERLSKNKSFTNDRSLKNPLYGIMYCKRCGRKISRLNVSESRGGHRYACPNKLCDVQSSRYDLVIEAVIDTIQCAIDDFDITFHDCNSSGSDEKIRELRQELTRLNNKEDTLFELLETKVYSTSVFTQRHAELEKKRQEIIGKINTLSLIPPPESCNDKKMRFKDALLALKDESMPPKEKNHLLKKCIERIDYDIEGVRYHSKVKLDVYFKF

SEQ ID NO: 26655 - protein, 519 aa, synthetic construct
MKKVTKIDKVQNAPSQKEKIRVAAYCRVSTCNKAQLESLETQKSHYESYINSRSDWELAGIYFDEGITGTKKDKRPELLRLIKDCEANRIDFIITKSISRFSRSTTDCLELVRKLLNLNIHIYFEKENINTGSMESELFLTILSSIAEDESASISENKKWSNRKQFRDGTFKTMCPPYGYCYNDGTMCIFPEQAEVVKRIFSDVLSGKGTTTIAKELNNDGIPSKQGKKWNQTTVKKILSNEAYIGDAIFQKTYTDEYFNRHINNGEKEMYYIQNHHEAIISKEDFKLASAIISQHATEKNISSNDNKYRNRYAFSGKIICSECGNTFKRRLHTNTYSKYCAWCCNTHLVDKSKCSMLYLRDDDLKIAFATVLNKLIYGHNLILKPYVEALKNISGNKDFARIQHLEQLIKQNKEQQEVLTKLLCQGYIDQVLFTNETNSLLAQSSKYKKDIDVINSTINSDNSRHYEAEKLLYFTEHNTMIKEYSENLFERFVDHIIVYSRHLVGFVMKCGLTFKEVI

SEQ ID NO: 26656 - protein, 521 aa, synthetic construct
MGNVMVIPAKRKIGNTNRKKDTKPKLRVAAYCRVSTDSDEQATSYEAQVAHYTEYIKRNPDWEFAGIYADDGISGTNTKNREEFNRLIKDCETGTIDMVITKSISRFARNTLDCLKYIRRLKEKNIPVFFEKESINTMDAKGEVLITIMASLAQQESQSLSQNVKLGLQFRYQNGQVQINHNRFLGYTKDENGNLVIDPEQAEVVKRIYREYLNGYSMDKIASGLESDGILTGAGKKKWWTSTINKILRNEKYMGDALLQKTYTTDFLNKTRVKNNGIVPQYYVEDDHEAIIPKEIYMMVQEELARRRVVKTSANGKKRSYSSNHCLSQKIICGECDEMYRRIHWYSHGRKTVVWRCISRLESTGIECHARTIHETDLQEIVVIALNELLGNKSKYQKLLQQNIATVIRASAEKTTDEIDKKLIELQKELVKKANDKDSYDEIAEQIFELRDKRQQFTMDTAQRDEQLKRITELQDFIKDQTTDLKEFDETLVVRWLKQITVYPDHCTVELKSDLKVDVEK

SEQ ID NO: 26657 - protein, 516 aa, synthetic construct
MKAIYVRQSLDKKDSLSIDAQIEDCINLCKRSGWNDYKVYKDKGWSAKNLDRPAFRQLNQDVQNGIIDGVICYKIDRISRSIRDFVNLIVDYQDLGVHFISFADNINTAAPGGMMMATLFVSLAQMEREAIITRVTDNYYYRCELGFWGGGPAPYGFRLVKTTENGQKHTILEPVPEEAEVIRTFFAWYLEPGATVRSIMNRAHLAGMQTRSGSDWTSRVLSDMLSKPLYAPNSMDIYNFYASQGVRVKISPEQCDGKQSLNIFGMRDRNSAHPKRSRPVSEMTLAIAKHKPIVDSDTYLKVQYKKKSRLAVTPRSGTSRTAVLSGLVRCGYCGRAMSPSGAKNGRYFTCSGRRNYAKGVCQGKSVKMDFLDDYVLNDLADFISQPEIKSMFKDGKAQRIPSSEQAKINEYKQRIATIDIDIQKLLDACLTSGDVAVKYLNERIDLLDTEKQNLQAEILAIQNKSNRKLELEGLDINSAPTALAGGEFDTKKYLCNFFIEQIIFYDRDNVQIRYKM

SEQ ID NO: 26658 - protein, 463 aa, synthetic construct
MSFFTPNPQLFGLRVVKYIRCSHDDQVLHGDTLEAQDLILEDFIKVNRMILVDTFIDEALTARKKFNKRKEFVRLLSGVKAHSFDLIIFTKLDRWFRNIGDYHKIQEILEANGVQWKAVTENYDTTTTNGRLHINIRLSVAQDECDRDSDRIKDVFAYKLKNKTYVSGSLPRGLKLDAEKHVIIDPEWNCFALDMFDRFEATCSKRDTQLFLQEKYNIRVCYDTVARYLKNPLFKGQYRDDPDFCPATISPERFGRIQKLAIRNVRIRHTQQFYIFSGLLICSSCNHYMCGTVTYRRMADGSEKMYKNYRCNFKAQSKLCDRGKTYREADLEEYMLAHIRPALSDYIVKYEVTAASTVQKNPVTEIAKIERKMKKLYDLFMDDLIDKEAYRSEYDKFKAQIEELQKCSTAAPMRSLDSVKKLLSEDWEAVYHTFSDQEKNTFWKSFVESVLVYEDGSMDIRFL

SEQ ID NO: 26659 - protein, 503 aa, synthetic construct
MQRAVIYARYSPGPNQTEQSIEGQVRECTKYAELHDLRIVGTYIDRKISGKTDNRREFQRMIDDSEKHIFDVIILYHTDRFARNRYDSAIYKHKLKENGVELRYATTDIPKGPEGIILESIMEGWAEYYSAELSRKIKRGMRESALKCHSTGAGRCLGYRTAEDKSLVIEPEGAKAVQTVFDMYIKGKSHADICRYLNDCGFRTAQGKLFNKNSVTHIIRNKRYIGVYTYDDITIEDGIPAIISKDTFHLAQLEAAQRKTAKRPKEPKAEYLLSGKAFCGHCQKPLVGVSGTGKSGNKWYYYYCQESRAKRGCTKKPVKRDWLEREVVERTVAEVLQPEVIQHIAKKCYDLQMEYRQDNSDVLFYELKLKDVRKAIKNTMHAIESGVKTKTLPARLQELENEEEALEAELAIAKASDFVITTDQIEFLLTQFAEPWECESEEEYHRRIIKCFVHKVFLFDDKLLIYYNVSRDGKTREQSEAELLEEALGEGFDKRSSGSTKTI

SEQ ID NO: 26660 - protein, 517 aa, synthetic construct
MTKNKKADTVNEKCKAVIYARFSSDKQREESIEGQIRECTQFAKSQNLEIIGTYIDRALSARSDNRPDFLRMIADSSKGLFQYVVVYQLDRFSRSWYDSAVYKHKLKKNGVRVLSAKERIGDDPSSIILESMLEGYAEYYSAELSQKVKRGMTENVLEHKWTGGYVPLGYSLAPDKTLQIDPSGAEAVKIIYEKWLSGYRIMDIIRYLNEHNYVTSRKSKFRYNSLNRILTNPIYTGLYRWGTIEVADYAPAIITQKQFALAQEKIHHIKAHPRAKRRSANYALTGMIYCGVCGSPMTGQSGHSKSGALYHYYRCSTKNNYHARGKKLNVKCTNRNISRERLEDLVLQTTINILMNPEAVHMIAKQAVAVQQKDPASMELDCIRDDKKIIQKKLNNSIKAVEAGIISTTLAANISQYEKEIADLDIRMEKIKLSSTPVKIDEIAVEFFLKNLLLQKKEHDKYRLDMFQTFIRRVIVYPDKVEIQYNYTATPHILENPVTKMMTGNSGCSRYERLVTR

SEQ ID NO: 26661 - protein, 493 aa, synthetic construct
MLKTIIYARYSSDKQNEQSIEGQIHECEQFAKTHDMVIIKHYVDRALSGKTDDRPSFLQMIKDSSSGLFDAVLVYKTDRFARNRYDSAVYKAKLKKNGIKIFYAKENIPDGPEGIILESMLEGFAEYYSAELSQKVKRGIKENIRKGLSFGGACPFGYKIVNKKYVIDDEQAPYVKKIFEDYAKGRRAIDIFNELNTLPNYAGKGRKWNRSSLNRMLTNKKYIGIYELEDVCVKDAIPPIIDEALFNKVQSRILFNRRHTTRAKVNYLLSGKLFCGLCEHSMTGKTGTSKTKVKYHYYVCSNRHCKQKKYRKELLEDIIIQYTVKDILNPKHFKMIAKKCLEIQQADNKINDILSMLKKQLTATKTKINNLMNAIEAGIITTSTKDRLEQLELEKYKLELEISTQQLNSNRLLSEEQIIYMLNEFYKKRADVSFYNQIIDCFIYKIYIYSDKICIVYNLNNSNKDVTYSDINELYKSSHLNSCGSPYVNQRRN

SEQ ID NO: 26662 - protein, 523 aa, synthetic construct
MRFFSYGRKSVFSDKSDSIDNQFLMNREYCESKFSGQVDSWQQFSDEDFTGANTSRPDLQRMLSFIKGGFCDVLVVYQLDRLSRDVRDFANIYALLEEHGVMFISIKENIDTTTPIGRAMMYVTVVFAQMERETIAARVTDNMLGLAKKGYWTGGNPPVGYVRKHIVVNGKKHCSIEVDPDGARYVTQIFDTFLAYNCSLQGMETRFKNQGIRTQSGKFFSTTQLHKMLTMPYCVEATPEVYDFYAAKGCIMDPGSPREMWDGSVGVIIYGRSTEKNKKHQAQPPEKWTVCLGKHKPFMPAEKWLAVQSRFTQNKCIKDAKWPVPLLKGVLRCKCGNLMQVSRKKKVDGTCSSWYYCRKRMRQGVDACDMGQIKCDLLDEEVLELFRGITADPALIQKFVKAEAPADVPDLKAAQTRVSACERKIGRLAASLALAEDSAASKYIIAEMERLDVELGALKREASLAEMESHRAAASAKDAKATAAKIAKLIHGLDGFDDKEKNAIARAVIQECTWDGERLFIKL

SEQ ID NO: 26663 - protein, 564 aa, synthetic construct
MEKKQKSALYVRVSTTHQIDKDSLPLQRSDLINYTKYVLGINDFEIFEDAGYSGGTTDRPAYQDMMNRIKMGEFTHLIVWKIDRISRNLRDFSDMYDELKKYNVTFISRNEQFDTSTAMGEAMLKIILVFAELERKLTGERVFSVMISRAQKGLWNGATVPLGYEWDSETKFPRPCDKEAKIVQYIFDQYEEIKSTTKVAKKLNIENIPTKRNGTWTPRTVGSILTNPFYIGTYRYNTKTKKTRRWKDKSEWVVLENNHQAIVNTEQFERVSQIIQNNYKGDKNYQRSSTNVHILSGLASCHKCGKKMHSGLDRARKDGFTPSRYTCYAFNVNYTCANYSSDLAILPGLINYIANYMTLQERITARHSLRDMESILLRGKYFEDIDHIEKQDLKNTYDLLINNKIVTYNSFEEKNKEAIISQNVIYEAEKEKYEKALKRLDDLYLYDVNSMSQKDFVIKRKEISDKIENINKKIQEVKFNDTPFINNKDFNLLSKASFYLLTKNLSSVKNIDVISLLNNLDRQTIKDFINTIITDVSVEKGKIYNITFKNGIVHHFIYKNEQKI

SEQ ID NO: 26664 - protein, 516 aa, synthetic construct
MQKNNNIGNRCVIYARYSCSNQTEQSIEGQMHDCEQFAARNNLQIVNSYIDRATTATTDKRPQFLKMIADSKQCVFDVVLVWKLDRFSRNRYDSAMYKKKLKDNGVRVMSAMENITDSPEGVLMESVLEGFAEYFSKDLSQKVKRGMRETAAKHKITNRIPFGYCKSEEDTYIPDPHTANAVCKVFDMYITGFRKSDIADWLNSNGYKTSYGNQFTLTAITPLIKNTRYIGKYYYADNEYTDETQRIVTDDIFYKAQQKAIANQHGGSCKAIERYLLSNKLYCGYCHNKMIGECGKNQNGLAYHYYTCVGRKRKHICNRKNIKKKDIEQYVINAISCLLNDEYAINKIIETAINYQQNDVEHINEIKDIESTIKEIERKISNILSAIEAGIFTDSTKNRLQELENQKTRLTQELNYKNQSSTKIPRTTLKQILKNLDLSEAATNPEKQNIIDLLIHRVYLWQDKILIVFNQSNLCDNEISVDDTDVNTIIKTLSEPNASSSDSVEYGTPDQSRTGD

SEQ ID NO: 26665 - protein, 456 aa, synthetic construct
MRNKEIAPALVRVALYIRVSGEEQKIKGLSLEAQQERLEAYARERGWVIVGIYIDAAKTARKNIHKRTEFQRMMDSVKRDEVDILLFARLDRWFRSVADYYKVMEILQAHNCDWKTTDEEYDTTTANGRLYINVKLSIAQNEADIDGERIDVVFDSKIAHGTVVSGSAPFGFRVNEEKRLEVVPEDAAIVQDAFNYFENTVSQRATVRYVRETYGANWCDATFRRMLKEKLYTGVYDRGGRYNDQFCPAIINRQQFDRVQALLTRNVRSAPSGKVYIFTSILTCAECGHKLVGYKSSDYYYYRCNQHFQRGRCSHNHSAREDVVEQWLFEHLGEELERCQLEWDVEAAKKKASVARTDKAALKRKLTKLKELYVNDLIDIEDYKKDYQIYVSALNQIPEPAQEAPPDFAAVRRLLDNSFRTIYDTLTREEKRTLWRSVIKEIKIDNDQNITGVVFG

SEQ ID NO: 26666 - protein, 514 aa, synthetic construct
MSTEYAIYLRKSRADLEAEAHGEGDTLARHEHILMELAKSRALPIGAIYREIVSGERIANRPVMQQLLSEVEDGRWKGVLVTETSRLARGDTIDQGIVAQAFKFSGTLIVTPAKTYDPTQEADEEWMEFGLFMSRQEYRMIRRRQLAGTRASKKEGHYVPGRPPYGYERYKLDGRGWSLRPVEPQASVIRTIYDMYLSGKGFSEIANELNAMKIRTPLDKKWVPATTRAILQNPHYAGFIPSAMKVNTKIVQKGKLITKRPVNKNCELYEGIHEAIIPRDVWYSVQQRMKDTVTPRVPRKYQQMNPLAGLVYCDQCGKLMSRHPYRREDKVRFGCENPSCSTVSSLFEDVENLVLQSLREFLHEIELSSPALLDTKNEEIALQNIEKQLTDINHRLQRTYELLEDGVYSKETFLQRQSAISQDQTALLNTKHEIERKLHNKQTDIEAQKNSAPLIRHVLDVYPTLEDPKEQNLLLKQVIRRIDYHKTVRVYGKAKSDLHLTIHPKIAIPQTSNI

SEQ ID NO: 26667 - protein, 684 aa, synthetic construct
MSILQTIKTIIRVVLYLRLSDEDKNKLSKEELSQSIKNQEIMLRDYAEEQGWEVVGVYNDDDWSGSDATRPDFNRMIEECKNGNVDIVLCKTQARFARDMELVEKYVHNLFHEWNVRFITVVDRIDNARKETKKTSQILGLTDQWYLEDTSLNIRETLKSKRKDGQLTSSFATYGYMKDPENKNHLIIDPISAEVIKRIYDEYLSGTGLDKIARRLNEDKILSPYEYKLLNGSKLKIPVIKDYVNYGYIEKTGTYMLDVSFTNKEEYILKDLVSFNYITTDMKSFNNKCDIVLKKYTNNRTKIYYSENDNIDINNFNIDDCILLNENDVIPKTAKVIISYTKELDRTHTINYQFEITLKENREHEDYYISICGKAKDEIKKSDFIHNIRKKFKWSSSTIRTLLTDEVYIGNMVQFKSTTVSYKNHTVVWNDDETRIRKDNTHEPIIAKDIWYTVQERLENTARSCKGGTVHPLCNKVYCSNCNQIFTKTGNRRSDGTGYLCCKDKKTNWSNCDNKASIREDQLHQFILEKMNEMLKKFYEEDDLKEMQNEVIEQDLYKDKLNSLEKELQSINKELQGKSTYFQKLYEDRTNGILPEKEFLILMNKYKDDNEKLEERQKIVKKEISSTLAKKETVKTKKNIFKKYRHIEELSIEIVEDFIDKILIGSYDETTNSRDIKIIWNFTI

SEQ ID NO: 26668 - protein, 592 aa, synthetic construct
MPNLRKIEAAVPIIREKKRVAAYARVSMQSERMLHSLSAQVSYYSGLIQKNPDWEYAGVYADDFISGTNTVKRDEFKRMLADCEAGKIDIILTKSISRFARNTVDLLETVRHLKDLGIEVRFEKENIRSMDGDGELMLTILASFAQEESRSISDNVKWGTRKRFEKGIPNGRFQIYGYRWEGDHLVIQEDEAKIVRLIYDNYLNGLSAETTEKQLAKMGVKSYKGQHFGNSSIRQILGNITYTGNLLFQKEYVIDTISKRSKINRGELPQYFVENTHEAIIPMEVYQAVQEEKVRRRELGALANWSINTSCFTSRIKCPLCGKNYRRSGKRQRKNPDEVYYIWICRTKSEKGAKSCPAKAIPEKALKNACAEVLGTAEFDDAVFSAQIEQLYVVGDDTLEFHFYDGSVLEKKWKSTAKKDWWTEERRAAWGELHKHKATNPNRRRFYEFTGLIKCGQCGESFRCQSMTRKDGTRIRSWHCGRTCGNTNIRDEILKSMVCDVLGLDAFSEESMDAALEKITVNGTAVRFHLRDGSVAEREYTQPKRKGTKHTEEFKEHMRQLMKAKWKEGKMHGTKKSDNHSSHDQPVHGGAD

SEQ ID NO: 26669 - protein, 451 aa, synthetic construct
MSEIQKPVFSSHYENLLSISTVEKPLSIPAAENSLSISTAIYCRVSTFHPHQQDSLENQIRHYQEFMKKTPNYILTEIYYDFGISGYKETRPGFCKMLEDARKGCFRQIITKSITRFARNTDTVLKTTRQLKELGIDIYFELQKIHTLSQEGELLLTLFAAFAQAESENARWLTKMAIQQKYRKGHPMRQLHRCLGYQKDQKGNLVPDKNAELVRQIFQMAADGWSISQITKYLNENKITTQNDRTFSRSTVSRILHNHAYKGDYICQRYYVNNQRKLVRNKGEKQMYYIRHDHPAIVSEELWETAQEKLAKKSERNRQELPSDEIAVTEKAQVPDAPEKITLKETILQKQESGFIPDKPPLTLANYPYKDRIFCKYCGSRLRRIIARNHSVWWICNGLSRKGKAFCKGVRIPDEKLSPLRNVSFSAYIGKELIDGKETYGYSSKPDEWKR

SEQ ID NO: 26670 - protein, 456 aa, synthetic construct
MEKKLTVIPPSQTNGNAKSASSSQCRVAAYCRVSTEQEEQLGSFANQIAYYTDYINEKEEYQLAGIFSDEGISGTGTRKRAGFRSMIAACEAGKVDLVITKSISRFARNTRDCLHYARYLKSLGIPVIFEKEGINTMESSGELLFTILSSLAQEESRNISENTRWGIRSRFQQGIPHINAACFLGYDKDEAGHLVINEGQAKVVRRIFREFLEGWQPSEIARMLNTENVSGVHGESCWAAVSVVRILQNEKYKGDLLMQKYYIRDFLTKELEKNDGKLTQYYVENDHEAIIEREIWDAAQLEINRIKEFKRNHQIRELGSSSLEPFYGKIFCGCCGGRMVKKSRKSVWRCINSGKEKGGFCKAKPVEGHKMEEYVSAAWAQLVSQRENLLPDWEKDIAQGNALERLRAAQMKELTEKYPAWFQAAKKTRMVIREIIIGGDKGCEILFMDGVRMVTD

SEQ ID NO: 26671 - protein, 499 aa, synthetic construct
MQTAVIYARYSSDKQTEQSIEGQLYDCYNYAKQHGITVVQEYIDRAMTGKNDDRPAFQQMLHESAMHKWDSVIVWKLDRFARNTIDSAVNRQILAKNGVKLLSVMESFGDDASGQMMTHIIEAINEYYSADLREKTIRGMRQSAMKAQTTGHIPLGYKVVDKKLVIDDETRIIPETVFRMYAEGERLTDIAEHLNAQGYRNRRGRPFTTNSFYNMLANEKYIGIYKYDDIVIEGGIPQMIPNEVFEAVREKLITNRKRAAKNTAKADYYLSGKLYCGHCGEPMSGLSGTGRNGVKHYYYRCNGVQKKSGCHKKLENKYLIEDEVCRAARSAFEQMDKAETAETIYQMYLQTVRNEYAPAELEKELTECTKQAENVVNAIAQTGGNQLLYDKVRELEERKEQLGSALRLSQAMTDNVPSVEQITVFIDDILATDINTIEGKKAIADIMISKVYVYDDKLTVIFKDKDGKCVDIPLSAVSDSSSADCAPSALGSQANFKAT

SEQ ID NO: 26672 - protein, 486 aa, synthetic construct
MNGVIYARYSSENQREESIDGQLRECTVFAQHNDIQIVGEYIDRAFSAKTDNRPSFQKMIKDSAKGEFDVIIVWKLDRFARNRYDSAHYKNILKKNGVKVVSATEAISSGAEGIILESVLEGMAEYYSAELAEKVSRGMKENALKCKYNGGSVPLGYYIDESKHFQIDSSVAPFVVECFEHYADGMTMKQLRDELNMKGVKNSRGGKLSIDVISRMLTNRKYLGEYTFQDITIKDGIPAIVSTSLFEKVQDRLTKTKKAPSSHKADDDYILTTKLFCGKCKSFMVGESGTNAQGKKYRYYKCVNHKKHQGCDMKSIRKDLIENMTIKYIREFLNDEDLINTLIDLAYDAQHKENEQLPLLRKQLAQTEKGIKNIVDAIEQGISTKSTRERLLDLEQRKNDIEMSISKESIENPMLTKKQFKFWFDQLKKLDISKSEQRQKLVDLFVNSIIIYDDHIKFFFNYKEHTETITFDELNNCSDLPDSPRP

SEQ ID NO: 26673 - protein, 477 aa, synthetic construct
MKAGLYIRVSTEEQAKEGYSIEAQRNKLTAYCQIHDIDILGYYIDDGISGKSLERPRVKELIADIKAKRIDTIVVFKLDRLTRSVKDLLMLMDIFDKFKTKFISLSEQIDTSSATGRMFVQLLGVFAEWERSVIGERVVVGMEQRAKTGMYSARRVLGYDYNPETKQFTINAKEAEIVKLIFSMHNQGKGYVAIAKELNRLGYKTKDGNSFAHNSLVYLVNNGWYYCGKFMYKAKGKEPQLLDATNVEPIITYEEFIKSQNIRNANFSLAKKYGTDEFILKGRVFCECGSPLRTGTSGTKTHEARPYRYYVCRKHAEGRCDKFSSIGLTKLHRLFYDELKKFTDSNHTYDAIANGKAIASYNKQIQQLTSEVEKDFARKKKLTLLLLDGTISNNDYQDMLSTIIEAIDEKTKLINELEKMVQSLTDQNISEQFKKTIAVVLNNWEHLTDTEKKEFVQAFIRKVVINKNGIQSVEFIY

SEQ ID NO: 26674 - protein, 588 aa, synthetic construct
MRTIRKIEQSVPNLRPRKKVAAYARVSMESERMHHSLSAQISYYSSLIQKNPEWEYAGVYADYGISGTGIKKRQEFRRMLEDAKAGKIDIILTKSIQRFARNTVDLLRTVRHLKKLGIEVWFEKENIHTMSGDGELMLTILASFAQEESRSISTNVKWGTRKRFAKGIPNGRFRIYGYRWKGDQLVIEPKEATVVKLIYDNFLNGLSAEATEKQLAERGVKSSNGKHFSNTSIRAILKNITYTGNLLFQKEYVTDPITGKTKINRGELPQYFVENTHEAIIPMEVYQKVQAEQERRRKLGALANWSINTCCFTSKIKCGICGKSYVHYIRKKGKQKQDYWSCGSHKVKGRTCQSKGSIPQKVLIQECKKVLGIEEFDEKTFLDHVDKIVVPEQHVMVFHMKNGEKITRQWVSTARADWWTPERRKAWGERHKLKSTNPNKKAFNEFTGFIKCGNCGENYRSQQTTYLDGGKERYWRCAGKCGNGSIKDSTMKNLTASVLGMASFDEGRMDELLEKAVIQNGEVVFYFKDGHTETRQYKEKIHRCRHSAAYRRYMHDLMKLARSKDPEAKVKIMELKKEWRRDDNRWKE

SEQ ID NO: 26675 - protein, 459 aa, synthetic construct
MSTTHFYSHYPTIEYKTCALYVRCSKEEQAKFGDTIEAQIEDLKAFAKLHHLKIYAIYVDEGHTARKKYNKRKEFMRMLQDVELHKFEYIIFTKLDRWFRNIADFYKIQEILDNNGVTWLTALERYEMETTNGKLNVNIRLSVAQDEADRDSDRIKDVFRLKVKKGEAITGSLPIGLMVGENGKVDIDPDTVQIAYDMFDYFEVHNSKRGTLLHLIDKYNRYFCYETIARALRNPLYKGEYRGNPDYCPKIIDPARFDRIQVLGKRNVKVRKNNRYYVFSGLAQCKECGHALVANTTVQKRYNREYTQYRCNYYSNSHLCTHSHGTNEKVIEKYLLDNIKPELEKYVTAYEVKQNAPTKKADPSKIKTKMQRLKELYVNELIDLDDYRIEYEQYKQELDRLTSTAAPEVKDLSAIRSFLALDLQSIYDSLTPQEKRTLWSSIIDKIIISDSGDIEIVFL

SEQ ID NO: 26676 - protein, 534 aa, synthetic construct
MQQALNAVIYARYSSHSQQEQSIEGQLRDCYAYAQREGLQVVGEYIDRAISGKTDERPDFQRMIADASKKQFQRVIVWKLDRFARNRYDSAHYKAKLKKYGVKVVSATENISDEPEGIILEGLLESMAEYYSANLSKHVRRGQRESIINGTYLGGVPPIGYKVENKRLVIDERTAPTIRYMFEQYAKGVPKREIIAELNARGIRNKKGKPLTLSSMQAALRNEKYIGIYRYSGQEVTGGCEALIDEATFRKVQERLDKVKHAPAAAKAKIDYLLQGKAFCGYCGSRMVGESGRGKMGNTYHYYACGKRKKEHTCAKKNEKKDFIEWYVVEQTVEYVLTPDRMDYIAAALVAQYEKDFGDNRIKDYEKQLERINGEIRSLVDTLAVCPPSARQPIFDKMELLDVQKTDLEIDIAKLRVAARVQLTEEQIKVWLKQFCKGDLDDMEFRERIIDVFINSVYLYDDKTVIYYNIEGGKQVSYMEMLDSAEEPPFADDPQGSSGVRISNDTPRQRSTVILIQCVSRPRCFLSGPRPLFL

SEQ ID NO: 26677 - protein, 428 aa, synthetic construct
MNKTVTDITPKLQKDLRKLRVAAYARVSCDKDAMLHSLDAQIHYYRNLICGNPDWEFAGIYADEAKTGTKESREQFQQLLSDCRAGNIDMVITKSVSRFARNTVTLLRTVRELKELGINVFFEEQNIKTLDADGEVMLTLLASFAQAESLSVSDNCKWRIRKGFEEGRASTCTMLGYRLVNGEITIVPDEAVIVKKIFDLYSDGCGQQKICNILNEEGICTRRGYAWHPSAVRLILENEKYAGDLKLQKVFVRDHLTKEKVINHGELPIYWVENDHERIISRDQFQAVQLRLKKQSEGCTASKGAESVFTGKIRCADCGKNYRRKTTPYRVVWCCATFNSRGKKYCPTSKMIPEETLKTACATALGLPEFDEEIFDEQVLYIDACPGNLLRFHFHYGSEKELTWRDRSRRESWTQEMREAARQKALSR

SEQ ID NO: 26678 - protein, 556 aa, synthetic construct
MVKNVRKIEPTAPVMSALDLRPLLKKKRVAAYARVSTEKDEQQNSYDAQIDYYTALIRNNPEWEFVDIYSDEGITGTSIKNRDGFNRMIDDALAGKIDLILTKSVSRFARNTVDSLTTVRKLKEKGIEVYFEKENIYTLDAKGELLITIMSSLAQEESRSISQNTTWGQRKRFADGKMSLAYSNFLGYRRGAELGDMEIVEEEAVIVRRIYSEFLSGKTPYDIAKHLTEDGIPTPMGKTKWHTTVIESILKNEKYKGDALLQKTVTTDFLTHTHKRNEGEAPQFYVEKNHPAIVRPEVFEMVQEEFRRRKAAGGRMQCVSIFSGRIVCEDCGGFYGRKVWHSTSEKYRAYHWHCNNKFQKRCSCQTPTLKEESIEQAFLSAINSLIKKKKEIRENYALCLDTITDDSAHVARLDEINAECCRLQEETKSLLTAAGRKNGGGLSEINRQYEDYLARFEALQKEKSELSAQISKCAAKRVQVSSFLEELQKYDGPLKEFDPLIWQATLNHAVVHKNCTITFVFRDSTEVTRKIKNGVRKYVKRKASDPDNPESTGEKA

SEQ ID NO: 26679 - protein, 490 aa, synthetic construct
MSSEKQVIPIIQSPPEKRRKERVAAYCRVSTQAEEQIHSLAAQREFYEKSLSGNSEVEFVGIYADEGISGTRTRNRTQFLALIQDCRDGKVDRILTKSVSRFGRNTVDTLIFTRKLRSLGVDVYFEKENLHSISPEGELLLTLMAALAESESVSMSDNIKWGKRYRYKQGLVTALAISNIYGYCKKNGEIAVNKAEAVIVRRIYKEFLDGKNYDEIIAGLTADGVPTRKNATWYSRTVIGILSNEKYCGDCLFQKTFIPDPISHKTVVNCGEIPQFLVEDCVPAIIEKKQWLAAQEMRKRHQGVSKPPIEALPFRSLVFCGTCGKPCPQYSSHSEGRRLTAYHRCISRRDHTAVEVPGMTYVPPHKAGYNYNPTPELAAYRETYKKPKSRPFLCTDMKIRTERFPKAFVQAWNLIVSKKQRYLPSLQNTAATSENPLTAYRAEEMVGLLKTAGRLEEFDFSLMIRTLDRVEIMPTEKLSFIFQSGIRITV

SEQ ID NO: 26680 - protein, 569 aa, synthetic construct
MTNQKEKIVALYVRVSTGYQIDKDSLPFQKKELKAYCEHVLHVDKKRIEVFEDAGKSGKNTKRPAFERMMEKVKAGKVSHVVVYKIDRITRNLVDFSLMYDDFKYNNVTFISLNEQFDTSSAIGEAILKIILVFAELERKLTSERVTDVMIGRAQSGQWNGARVPYGWDWDAENKCPVHSKKEAPYAKAMYQMYLDGGSSVTIRDYNNSHNIPTKRGGEWTSKTVADFLRNPINKGDYRYNYRESARGKRKADEEVIYMEGVFPPLIDPEIWNEVNRRMDANHTRKNTSAMHPIRKNCNVFAGLIVCGKCGSNYQVTSKDRRRGNGFRPSSYACTGKYQKKHCDNFNVSDVKIGPFMINYIAAIIDASKSRRFIKDTESLERVILSHIDFTDVAGISESSLQDTIDLLYGRSGTETLSGKPVSKDGKNTDTAEKKKELQEKLQKTDRALERLKKAYLFDDDAMDEKEFLEMKTKLEVDKVKLENSIKSLDSSSISENVDQAAFIKSASQFLISHKINSVWNIEYSELAMMDEEAMKTLMNSIIDHITVMDRHITEIVFKNGLTHTLLYR

SEQ ID NO: 26681 - protein, 441 aa, synthetic construct
MEMKITKISTLPQLDRKKRVAAYARVSTGKDAMLHSLSAQVSYYNNLIQNNNEWEFAGIYADEAISGTKDNREEFNRMVDDCKAGKIDLIITKAISRFARNTATLLSTIRELSSIGVDVFFEEQNLHSMSGDGEMILTLLASCAQEEARSASENVKWRVKKDFKQGILNGGNDCYGYKLIDKKFVLVPEEAEIVKMIFALYIAGEGVVAISKKLDDMGIKPVRAKYWLPNTIMRMLKDRCYVGDLILQKTYVTDYVSKKKKRNHGEFDKYFVENDHEPIIDIETFEKANALMVERAKRFKAQDRTALRYPLSGKIVCGECGSRFGHKVYMHSSPGWICSAFDRKGKKTCQSRKVPEYAMDEAVDAVIGGYDNIKVLDFIEVFNNNRLLFHLKNKEIKEFIWEERSRSQSWTDEMREEAKKRTIINNKNKKRGANGKWQKSE

SEQ ID NO: 26682 - protein, 461 aa, synthetic construct
MNNDVEAGKIKAVVCYKIDRISRSIRDLVNLIEDYHELGVHFVSFADNINTAAPGGLMMATLFGSLAQMEREAIIARVTDNYYYRCELGYWGGGPAPYGFNLKKIVENGQKHTVLEINEREAAVVKQFFKWYLEPDGTIYEILKKADKAGITTRKGGAWTSRVISELLSKPMYAPNSMDIYNFYAAQGVRVRVTPEQCDGKLSLNVFGRRDRGSKHPKRSRPVNEMTLAICKNPPIIDSDTFLKTQFKKKAKLQVSPRTGTAKTTMLSGLVKCAICGRAMSPSGSSRGVRYFTCSGKRNYAAGTCTSKSIKVSALEKIVIDDILRYATNPKVIDMFHAMQGSKLTAEQSHEVNLLQQEAAKLDIEIDNLLDACSAGNTTAIEYLNKRIEKIDTRKHEILTRINEIKRDTENVISLFSGIEIENVPYILAHGSIAEKKNVCQFLLSSVLFTNADDVKVYYKM

SEQ ID NO: 26683 - protein, 530 aa, synthetic construct
MEQYLIYLRKSRSDLEAEAHGEGETLSRHEHTLLELAKRQHLNVTDIYREVVSGDTIAARPMMQRVLSEVEQGVWSGVLVMEVERLARGDTIDQGIIAQTFKFSGTKIITPIKTYDPDNEFDEEYFEFGLFMSRREYKIINRRLQRGRLASAKEGKWPSGLAPFGYRRVKLKNEKGCSLEPIEEQAAIVRMIFDLYTVGLQDEDGSARPLSLGSIATRLNDMHIPSPSGSQWARITIRGIIKNPTYIGMVRWGSRETKKKVVDGKVVSVRGPADPEKECVFKGIHPPLIPKETFELANDKLTRSENTSTHKEKVVRNPLAGLLVCSECGRQMMRMINPVHPDMPVVRCPRRGCPNCSSYLPIVEERVIQGLSEWMKGYELEWSSAAASSSVSSVGVREKALASAEAELRKLQQQLERTHDFLEQGVYDTDTFLSRSRMLSDKIAAAKDSVTRCSRELTEEKLRETSRRDIIPKVKNLLDVYPLLETAEEKNALLKEVLEKVVYQKLNEKRKKSPDGFTIEIYPRIPKSEK

SEQ ID NO: 26684 - protein, 684 aa, synthetic construct
MSILQTIKTIIRVVLYLRLSDEDKNKLSKEELSQSIKNQEIMLRDYAEEQGWEVVGVYNDDDWSGSDATRPDFNRMIEECKNGNVDIVLCKTQARFARDMELVEKYVHNLFHEWNVRFITVVDRIDNARKETKKTSQILGLTDQWYLEDTSLNIRETLKSKRKDGQLTSSFATYGYMKDPENKNHLIIDPISAEVIKRIYDEYLSGTGLDKIARRLNEDKILSPYEYKLLNGSKLKIPVIKDYVNYGYIEKTGTYMLDVSFTNKEEYILKDLVSFNYITTDMKSFNNKCDIVLKKYTNNRTKIYYSENDNIDINNFNIDDCILLNENDVIPKTAKVIISYTKELDRTHTINYQFEITLKENREHEDYYINICGKATDEIKKSDFIHNIRKKFKWSSSTIRTLLTDEVYIGNMVQFKSTTISYKNHTVVWNDDETRIRKDNTHEPIIAKDIWYTVQERLENTARSCKGGTVHPLCNKVYCSNCNQIFTKTGNRRSDGTGYLCCKDKKTNWSNCDNKASIREDQLHQFILEKMNEMLKKFYEEDDLKEMQNEVIEQDLYKDKLNSLEKELQSINKELQGKSTYFQKLYEDRTNGILPEKEFLILMNKYKDDNEKLEERQKIVKKEISSTLAKKETVKTKKNIFKKYRHIEELSIEIVEDFIDKILIGSYDETTNSRDIKIIWNFTI

SEQ ID NO: 26685 - protein, 502 aa, synthetic construct
MEIQIREGNREQKRKLRVCAYCRVSTDADEQENSLENQIRHYETVIKANPSYEYAGVYSDFAISGFKEKRPGLQKMLADAQKGKIDLILTKSVSRFARNTSIVLEATRKLKELNVGVFFELQNINTLSGEGELMLTILAAFAQAESESGSVGAKMVYQRKYEAGIPVQYLERSFGFKKDERGVYIADEEEAVWVRKIYDMAAQGYTLAAIKRYLNENNVKTVGGAKWLDSTVLRILENEIYKGDYIMHKYFVNEERKLVRNRGEVDAWYIEDDHEAIVSPKLWQRAQDALEAKRDYLAEGSVIEEFTEENYPYMNKIFCARCGHPLYKRIYSNGNRLNWGCSGTKRYGKSFCEGINIPDGVLRGAWHFDENMYIGEKQTDKGKKEFTYLKEASWKRRHKKKEPEPIPENTETEYPYREKIFCGLCGSRLVRHVNTKNHKVIWVCNGRKRKGKDFCDGTRVPDTIIKGWGEIKKDIYIQRKDDKNGKKRYSYTSKKPKGADRA

SEQ ID NO: 26686 - protein, 600 aa, synthetic construct
MIDNCVRAVFYARVSTQEEEQLKALPKQVEECKDIIASKGWRLIDGYVDEGKSGTKKDGRKAYIKLLEDMQEDKFDIVVVKSQDRLQRNTFDWYKFTDLLNKNNKRLYLYMDNKFYEPSEDALITGIKAILAEEYSRDLSKKLNNSNKRRIEKARAGEEVSAMGNGQTYGYQIVNGKWVVDESQREVVRRMYELYTELHSVRKVRDALNEQGYRNQRGNLFTDENISRIVKNVMHKGWVILNRHHRDFDSKEIIEKSEEEWVIVKNDHEPIVSEELWDAVNDEIQSHRNRGNSGSRGKRRGTDPLSGKMICNCCGRVLWKHASQGSYKSKEGRKYTYKSYTQWYCSGKMGRGELACTDPATISGVKLQKYLVEMADMFLDYSTVEYSKNLLKKRTISWLEDLKDKLTTPNDNGKIEQDLKALEGKKGKLIDLYTDELISKEEFKSRSVDLDAEIEKKRALLVPVEENPDIKAIEDTIANIDAEIEVLFEDEAMVEEKKVQFIQEHIKKIYVSKNSDVFIILDNVAGAFLFIDKEDTRIEVVPVAEYNPEELSEEGITENDFVPFDRESMPQHHGPKHLHPSGPQTAPRCCFRDRFSCDQP

SEQ ID NO: 26687 - protein, 438 aa, synthetic construct
MSTDQEEQLLSYENQVNYYTNYISENPLYEYAGTYADEGISGTNTKKRDEFNRMIADCRAGKIDMIITKSISRFARNTLDCLNYVRELKDLGIGIIFEKENINTLDAKGEVLLTILSSLAQDESRSISENCTWGIRRRFETGKHKMSTKRFLGYDTDETGKLVINRTQEPIVIRLYQEFLDGKTTDYIKRIFERKGVKNWDGGTKWQSTTLMSMLENEKYKGDALLQKSYTVDFLTKKRTQNKGEIQMFYVEDDHDAIISKRIWECVQLEIKRRKKYLEEHGTNSYSHRPESNPFASKIICGDCNKVFARKGWRSSTGVDRKVWQCSERYKVKGVMGCVNRHVEEETLIKAYLMAWNALVENREDFMEQWTEQLQSENLLEGYRAEKFIEYTDGAEPLTEMDTDFMLKTLDHIKVFEDGALLVVFLDGTEIECKNEEE

SEQ ID NO: 26688 - protein, 520 aa, synthetic construct
MPRKKAPAAEAPRLVAYYRYSGGSRQTEQSIEGQRRDCEAYARAHGMTILREYVDRHISGKTDDRPAFQQLVADSAKHTFDAVICWKTDRLARNRYDSAVYKKKLRDNGVEILYAAESNISGAEGIIIEGLMEALAEYYSAELAEKARRGMRESALKGKALGSSRPLGLTVDADKHYIIEPTGAEAVRYIFEQYAAGLSSSSIVERLNAMGLRTSHGGPFNKSSINRIIQNEMYRGVYVSKKFDVRIEGAIPAIIDNDLWERAQKMFERNRQSRTPHASRADYILSGKLYCGECGCLMKGVCGRSSGNGQMYHYYACPGRSIGRACTRKNIPQDELEAMVVNSVADLLLEPELLEQIADAIVELQQAEAARPDPEKQALEKSLSDVRSKIQNILTAIENGTSSAALSARLADLEQQESTLSYQLSSLTAKKPLTFTRDQILFLLQQFRVSPSERTKAYCRRLVDTFVDHIELTNTELILYFNLSDETVDKNKKAPRSNPSEESSTEKRLVRVARIELTAS

SEQ ID NO: 26689 - protein, 456 aa, synthetic construct
MYKKELAPDLVRVALYIRVSGEEQKIKGLSLEAQQERLEAYARERGWVIVGIYIDAAKTARKNIHKRTEFQRMMDSVKRDEVDILLFARLDRWFRSVADYYKVMEILQAHNCDWKTTDEEYDTTTANGRLYINVKLSIAQNEADIDGERIDVVFDSKIAHGTVVSGSAPFGFRVNEEKRLEVVPEDAAIVQDAFNYFENTVSQRATVRYVRETYGVNWCDATFRRMLKEKLYTGVYDRGGRYNDQFCPAIIDRQQFDRVQALLTRNVRSAPSGKVYIFTSILTCAECGHKLVGYKSSDYYYYRCNQHFQRGRCSHNHSAREDVVEAWLFDHLGEELERCQLEWDVEAVKKKASVARTDKAALKRKLTKLKELYVNDLIDIEDYKKDYQIYVSALNQIPEPAQEAPPDFAAVRRLLDNSFRTIYDTLTREEKRTLWRSVIKEIRIDNDQNITGVVFG

SEQ ID NO: 26690 - protein, 516 aa, synthetic construct
MPKTEEKQAAKAVIYARYSSDRQREESIEGQLRVCEDYARRNNITILHTYADRAMTGRSDQRPEFQMMIRDAATMAFNVILVYKLNRFARNRYDSAKYKHKLKKYGVKVVSAMENIADDPSGILLESVIEGMAEYYSAELSENVLRGMTQNALEGKWPGGVIPLGYKLDKGGRLIINEEKAPIVRMIYQMFLDGMSVARIERKLNDKKYTTDAGKVFSRSRVYYILHNERYIGTFQWKDIKKEGIIPPIISKEAFHAVQERINAMKSSSYRTNNNYLLAGKAFCASCGAKVSGTSGKSQNGNKYCYYGCSHHHRSARYEYCETKNIRADVLEKLVCDKTHEILSSKKAIKEIARQAVKLRPRDESELEIRAIKNHISSCQKKIDNCIKAIENGVVSNALVESLNENERTLDVLKEKLAKASLMQGSGLLTEEKIQFFFETIREKAKETEKYNDILLTSLVRAVYICNEYVEIQYNYAEQLPILTNPVRIESCSYKCTNGGTIWIRTKDLFDVNEAL

SEQ ID NO: 26691 - protein, 520 aa, synthetic construct
MPRKKSTAADAPRLVAYYRYSGGSRQTEQSIEGQRRDCEAYARAHGMTILREYVDRHISGKTDDRPAFQQLVADSAAHTFDAVICWKTDRLARNRYDSAVYKKKLRDNGVEILYAAESNISGAEGIIIEGLMEALAEYYSAELAEKARRGMRESALKGKALGSSRPLGLTVDADKHYIIEPTGAEAVRYIFEQYAAGLSSSSIVERLNAMGLRTSHGGPFNKSSINRIIQNEMYRGVYVSKKFDVRIEGAIPAIIDNDLWERAQKMFERNRQSRTPHASRADYILSGKLYCGECGCLMKGVCGRSSGNGQMYHYYACPGRSIGRACTRKNIPQDELEAMVVNAVADLLLEPALLEQIADAIVELQQAEAARPDPEKQALEKSLSDVRNKIQNILSAIENGTSSAALSARLADLEQQESTLSYQLSSLDAKKPLTFTRDQILFLLQQFRVSPSERTKAYCRRLVDTFVDHIELTNTELILYFNLSDETIDKNKKAPRSNHSEESSTEKRLVRVARIELTAS

SEQ ID NO: 26692 - protein, 668 aa, synthetic construct
MAYVRNKKKILKFWSKKKAALYVRVSTRYQVDKDSLPFQRKKLKEYCKFLGIEDFVIFEDDGYSAKNTDRPHFQEMMSRVRDGEFSHLIVWKVDRVSRNLLDFAAMYQELKDHKVTFVSMNEQFDTSTAIGEAMLKIILIFAELERNMTSERVTGIMLDRAEQGLWNGARMPVGYRWNPEIKFPEPDPEETKIVQFIFDEYERVRSTTKIARYLNHNQIASKRGGQWTSKLIRDIIRNPFYIGTYRYNLRESGRGPLKPESEWIVRENNHPAIIAKEQFDRCNAIMDENGTSRDTSDLRARKYVHTFSGRLVCGKCGANMIASKDRARANGWRPSMYRCAQRSRMMDCDNSKTVNESYIGPFIFNYVANLARIQKNFKNIKTLEQLEKELLKGPEFENMKVSKESLRRTFDALAFQEVGKGAYLPDIDLSDGDDDYTAAEQLSILKRELDKYKTAIDRLTDLYLYDPDSMTKEEFAKKKKDLVNKIAGYEKQIEASQATGDKDDLADLEFIRKASAFLVAQRIVSKKHVDYIQMALDLDNEILKDFVDQVIDRIEILEGRVQSIRFVNGLVHEFTYSTPADLPVCQKCGGHIGSTCGCRTRTFDFAGKPYRRIKVGDPGDKFHGVAGAVCPECSAQAGRWHHWKCGIERCPICGEQLIACEHGPNGKD

SEQ ID NO: 26693 - protein, 545 aa, synthetic construct
MDVVGYCRYSSEGQRDGFSIEAQQRAIRDFCESEKYNIIKFYVEEARSGTNDNREAFQDMIEDAKLRKFKAIIVHKFDRFARNKYDSVFYKRKLRDLDIKVISICEPLDDSPESVILESLYEGMSEYYSRNLSREVLKGKKEAALKCQHNGGIPPYGYTVDKEMHYVIIPEEAKIIQMVFEKAELGFSHAAIARYLNERGFKNRAGNRFGREYITRMLVNELYKGTFVYGKKSKRANSNIIKVENALDPIISPYLFDKVNKIYNDAYSINREKREIAKAKNAGIDYLLTGYAICGCCGAPLTGFHSHKAYQTSTGADRLYSSYFYRCSRKAKRETVLTGMTRGCILKNLRKDNFEDFILGVIENIIFNETNLKLIVEKAKQLILEKINKKIDNTKIINEINRISNQLNRLLDIFLDGTIDKESYNVKKNELEKMQNYFKEQIKTYPKIDVDKLTPQLLKKSIDKFLSSANADTIEYKKKTLSTFVDSIIVDNKKIVIYFKFPINTSDNDKKSEFSYDNHFLHNSTTVSQLDVCGNISTGCTNLIS

SEQ ID NO: 26694 - protein, 548 aa, synthetic construct
MKFKYPAMGTTKNAVIYARYSSHSQREESIEGQLRICHEYAKAEGLAIVGEYIDRAISGTTDARPDFQRMIDDAKKSQFSYVIVYRLDRFARNRYDSVLYKHELKQCGVKVVSATEGIGTGDESILLEALIEASAEYYSMELSRKIKRGRQDSAMKGNFLGGSVPLGYKVVDSKFIIDDETAPIVRYIFERYAAGTGKKQIIDELTAKGYMRRNGKPFTYRSFDSVLRNRKYTGEFTQTGITVEGGCPAIVDTEMFEKVQARLEINRRAPAKAKAKTEYLLSGKMFCGYCGEPMIGISGTGRHEKTFYYYSCVGRRGKSGCKKQHEKKDFIEWYVCEQTVQYMQDPERLSHVAKRIIEINDAEFDGGKVKELERAVENCDSDIRKLVDALTTIPDAARPALYDKIERIGAAKADMEIDLAKLRVLSEVRYKQEDVEAWIRSMCRGDLMDFEFRRQLIDVFINSVYLFDDRVVIVYNIKHGKQVSAIDVLNAVEELDGVELFPDSAEDSSAGGNGSFLVADAPPKQDNPNLRPIGQGFGFLVFIKDIEV

SEQ ID NO: 26695 - protein, 531 aa, synthetic construct
MKGAVIYARYSCERQTEQSIEGQLHECYKYAEKNGLSILGEYIDRATTGTNDNRPAFQKMLADSERTTAWDIVLVYAIDRFGRNSIEIAINKQKLIKNGKNLISATQRTSTNIDGSKNLDGILLENVYIGLAEYYSAELSQKIRRGLTESRNKGLFCGGKVVYGYCVKDKTIHINEAETETVRYIFQEYNNGKTIPDIIEVLDARGIKYKGETFKKNFLYRMLRNEKYIGITKYDGVEYKNIYPPIIKEDLFNAVQSRMVTYSVGAHSKDADLLLKGKVICGLCGHMMNGDCSTSRSGKLMHYYKCSGRKRGTGCESRILRQDKLDEFIVDVTKQVFCTKENIQLLVDKVIAVHKQRQKDESILNSLKNRHSDLVKSINNMLFALQEGIITPSTKERLNMLESDKAEIEEQIAKEDLALSKQISRDEVEYYLRRAIKSSPKILLNNLVDKVIVYDDKIEIYYKYCHKIPDDPDDQRGYFFEELRIPINCGKRNKQFLPITIDHQKMIASVKYILNRRKKMLAPINYKKNPS

SEQ ID NO: 26696 - protein, 523 aa, synthetic construct
MKKVQVIPATLRSYTKKLMDSQKKRRVAGYARVSTDHDEQLTSYEAQVDYYTRYIQSRNDWEFVGMYTDEGISATNTKHRKGFKRMIDDAMDGKIDLIITKSVSRFARNTVDSLTTVRKLKDKGIEIYFEKENIWTLDAKGELLITIMSSLAQEESRSISENVTWGHRKRFADGKVSLAFSHFLGYDRGMDGNLIVNKKQAEIVKLIYRLYLNGYTFHSIAKELTERKIPTPAGCKIWRANTIRSILMNEKYKGDALLQKKITVDFLTKETKKNEGEVPQYYVEHNHEAIISPQVFDWVQEEIKRRRKRKKRYSGVSIFSSKIKCGQCGGWYGAKVWHSTDKYRRTIYRCNDKFKNHCQTPHLTENEIKGAFIRAVNQLIENKEDILSNITMLKKRLTDTASLEKERDALELDLNMLTDQVQQLIAENAQVAQDQDEYGRKYNGLVSRYEETKKKYDQVCDAIQQCVDRYWKLDNFMKNLQKQNLVYEFDERLWCSLVDFIIVYSKVKIQIVFKNGTKIHVGI

SEQ ID NO: 26697 - protein, 569 aa, synthetic construct
MPRAQKQKAAIYCRVSTLHQVDKDSLPMQRQDMINYATYVLSIKDYEVFEDAGYSGKNTDRPAFQEMMERIERGEFSHVLVWKIDRISRNLLDFATMYARCKKLGVTFVSKNEQFDTSTAMGEAMLKIILVFAELERNMTSERVASTMNARAAEGKWNGGRVPFAYAYDRETDSFSIRDDEAKIALELKDIYLRTRSLTYTARMLNEAGRRTRRGYAWTPATVAIILRSPFYRGTYRYNYRDESDVTFSFKAQNEWILCAKHHPPLFSEADCRQVDYWLDKNRRHHGKATHVQRKHVHIFAGLIRCGVCGSNYAASVDRARASGYQPSMYNCGGRRQKGTCKNRYVNDITIGGFVFNYISNVIRLRTAFRPQWSLARIQRFLLQGENFREVASLSADTLRRVQSILLGHTVGTAGYQAGQDMRGHGNATAQAREANLRAELERKKRALSRLTHLFLYAEDEMHEADFLREKRSLQDDIASLQDDLAKAEQASVFASSMTDEEFLQKAARLLFQDAMGHGSIDFPGLALHVGKLELKNFINAVIEQIIVLDGRITQLTFRNGEVHTFLYA

SEQ ID NO: 26698 - protein, 481 aa, synthetic construct
MKKKNINAPSPIDMVDLYIRVSTTEQAMEGYSVGEQENRLRRFCEALGYQIHKVIIDPGYSGASLNRPGIKEVIHDVQDHLVNKVIVWKLDRLSRSQKDMLIMLEDIFLANNCDFVSMLESFDTSTAFGRAIVGILAAFAQLERENIKERTTMGRQARLAKGHYNSSRPPLGYSFLPGCNDLKVDPYEASIVREIFSLFLSGTAINTIASTMQKKYPTVRSWKNTTIRRTLRNSVYIGKVSDVDITRDGIHEAIISDSDFNMANAMLQHNLEIKKQSCRSHSLLTGLLYCGDCGARMQPRTISKGYPLRRYVCYSVSRTNKAMIKSDHCTNRLHPYTLEELDNIIISEIKKLAVDEKYLKSIIQEDAAPIINEAELCQDRLAELDKQTDKLLNLYQIGAVDLSQIQDRLTSLKQERNALTQTLNKVSTEMPMNIQQIQDYATAFQEALAKNDYDQVNNIIHILIDKIVVLNEDIEIHWTFC

SEQ ID NO: 26699 - protein, 684 aa, synthetic construct
MSILQTIKTIIRVVLYLRLSDEDKNKLSKEELSQSIKNQEIMLRDYAEEQGWEVVGVYNDDDWSGSDATRPDFNRMIEECKNGNVDIVLCKTQARFARDMELVEKYVHNLFHEWNVRFITVVDRIDNARKETKKTSQILGLTDQWYLEDTSLNIRETLKSKRKDGQLTSSFATYGYMKDPENKNHLIIDPISAEVIKRIYDEYLSGTGLDKIARRLNEDKILSPYEYKLLNGSKLKIPVIKDYVNYGYIEKTGTYMLDVSFTNKEEYILKDLVSFNYITTDMKNFNNKCDIVLKKYTNNRTKIYYSENDNIDINNFNIDDCILLNENDVIPKTAKVIISYTKELDRTHTINYQFEITLKENREHEDYYINICGKATDEIKKSDFIHNIRKKFKWSSSTIRTLLTDEVYIGNMVQFKSTTVSYKNHTVVWNDDETRIRKDNTHEPIIAKDIWYTVQERLENTSRSCKGGTVHPLCNKVYCSNCNQIFTKTGNRRSDGTGYLCCKDKKTNWSNCDNKASIREDQLHQFILEKMNEMLKKFYEEDDLKEMQNEVIEQDLYKDKLNSLEKELQSINKELQGKSTYFQKLYEDRTNGILPEKEFLILMNKYKDDNEKLEERQKIVKKEISSTLAKKETVKTKKNIFKKYRHIEELSIEIVEDFIDKILIGSYDETTNSRDIKIIWNFTI

SEQ ID NO: 26700 - protein, 554 aa, synthetic construct
MMNGYEYTDMDAILAGSFRAAIYCRLSKDDDLDGESASIANQRDMLEKYCEKQGWEVVAVYQDDGYTGLNMERPDLKRMLKAIERRQINLVITKDLSRLGRNYLQTGTLIEDFFPRHGVRYIAMNDGIDTMRENNDIAPFKNILNEMYSKDISKKVHSSYLLKAQQGQFTGCIAPFGYQKDPEDKNHLLVDEETAPIVRQIFRWALEGHGPNFIRRRLEEQKVPCPTWWNRERGFRNVRTKWEKKDPVNGRYMWDFSVIKDILMNPVYTGAIASQKKDYRFKIGTIGEKKPQDWIVVEERHEPIVDRKSFDIVQDKLKSRQRSRQTGEISLFAGLLKCGECGKSLTIRYTNDKHPKQIYSCKTYNAYGKQHCTQHRVEYETLYRLVLNKIRECAKAALMDGEAVAGRLTNTCEAEQKGQREALERSLTKHEERIEVLEKMVLRLYEDMVAGRISEANFNLMLDKTQKEQAELKERVEQGRRKLADEIRLAVDAKQWVDAIQEYADITELDAATLNRLIKEIVVHEHIDSDKTRHISIEIHFNLKPIPEVEQVTA

SEQ ID NO: 26701 - protein, 456 aa, synthetic construct
MRNKEIAPALVRVALYIRVSGEEQKIKGLSLEAQQERLEAYARERGWVIVGIYIDAAKTARKNIHKRTEFQRMMDSVKRDEVDILLFARLDRWFRSVADYYKVMEILQAHNCDWKTTDEEYDTTTANGRLYINVKLSIAQNEADIDGERIDVVFDSKIAHGTVVSGSAPFGFRVNEEKRLEVVPEDAAIVQDAFNYFENTVSQRATVRYIRETYGVNWCDATFRRMLKEKLYTGVYDRGGRYNDQFCPAIISRQQFDRVQALLTRNVRSAPSGKVYIFTSILTCAECGHKLVGYKSSDYFYYRCNQHFQRGRCSHNHSAREDVVEQWLFEHLGEELERCQLEWDVEAAKKKASVARTDKAALKRKLTKLKELYVNDLIDIEDYKKDYQIYVSALNQIPEPAQEAPPDFAAVRRLLDNSFRTIYDTLTREEKRTLWRSVIKEIRIDNDQNITGVVFG

SEQ ID NO: 26702 - protein, 508 aa, synthetic construct
MKKAIAYMRFSSPGQMSGDSLNRQRRLITEWLKVNSDYYLDTVTYEDLGLSAFNGKHAQSGAFSEFLDAIEHGYILPGTTLLVESLDRLSREKVGEAIERLKLILNHGIDVITLCDNTVYNIDSLNEPYSLIKAILIAQRANEESEIKSSRVKLSWKKKRQDALESGTIMTASCPRWLSLDDKRTAFIPDPDRVKTIELIFKLRMERRSLNAIAKYLNDHAVKNFSGKESAWGPSVIEKLLANKALIGICVPSYRARGKGISEIAGYYPRVISDDLFYAVQEIRLAPFGISNSSKNPMLINLLRTVMKCEACGNTMIVHAVSGRLHGYYVCPMRRLHRCDRPSIKRDLVDYNIINELLFNCSKIQPVENKKDANETLELKIIELQMKINNLIVALSVAPEVTAIAEKIRLLDKELRRASVSLKTLKSKGVSSLGDFHAINLTSKNGRELCRTLAYKIFEKIIINTDNKTCDIYFMNGIVFKHYPLMKVISAQQAISTLKYMVDGEVYF

SEQ ID NO: 26703 - protein, 558 aa, synthetic construct
MNRYGKRCVLYPRVSTEMQVDGYSLEGQKNMLTRFADREEMIVVDTYEDAGKSGKSIEGRPAFQKMLRDIEDGLDIDYILVYKLSRFGRNAADILNSLELVQSYGVNLICIEEGIDSSQTSGKLLISVLSAVAEIERENIIEQTMNGRREKARQGGWNGGFAPYGYTLEDNKLMIEETEAVAIRKIFELYTSSEIGLGGIANQLNLQGIRKIPRQNGTLEDWTGHFIKLILDNPVYCGKIAYGRRTKEKVKGTKNDYQMKRNDDYILTEGQHKGIVSEEVWEKAHAKRLRTGVKQPSKIGRDRVHLLSGLLKCPVCGSPMYTNKHAWTNKDGTYKEIYYYVCSRNRMVRGKHCEYKAMLKKTDIEPMVIEAIREIVRNEEYAQAIKKRIGVQIDTKAVDKELEGYQAKLKEVDLNKTRLEREIDSLPADVKYRERKLHDMTLRLDSLYDVIVELEEKIEDARLRRDAIKQQAITLENIYKIMVNFDCVYNIINDEEKRNVVTALIKEIEIYRNDESEYPLKRIGLNFPVFKDGGEVTELLWDKGNTVECVVLMSMKDK

SEQ ID NO: 26704 - protein, 521 aa, synthetic construct
MGNVMIIPAKRQVGNTSRRQEDKPKLRVAAYCRVSTDSDEQASSYETQVEHYTEYIKKNPEWEFAGIYADDGISGTNTKKREEFNRMIEACKAGEIDMIITKSISRFARNTLDCLKYIRMLKDKNIPVFFEKESINTMDAKGEVLLTIMASLAQQESQSLSQNVKMGLQFRYQNGQVQVNHNHFLGYTKDREGNLVIDPEQAEVVKRIYREYLEGSSMDKIAKGLEKDGILTGAGKKKWWTSTINKILRNEKYIGDALLQKTYTTDFLNKTRVKNNGIVPQYYVENNHEAIIPKDIFLRVQEELVRRRVVKTSANGKKRSYSCNHCFAQLVICGECGEMFRRIHWNNRGCKSIVWRCLSRLEATGMECHARTVNETVLENVVVQAINTLLGDKSTYQAQLQQNIAKVIREAQKNNTDGIDEQLMELQKELLKKANNKEAYDEIADQIFKLREQRENCTVDTAARDAQIARINDLQDFIKQQSATLEVFDETLVKRWLKQITIWNDHCTVELKSGLKVDVER

SEQ ID NO: 26705 - protein, 519 aa, synthetic construct
MKKVTKIDKIQPAKKAEDKLRVAAYCRVSTATDAQLESLEAQKSHYENYINSRDDWCFAGVYYDEGITGTKASKRPELMRLLADCKAKKIDFVITKSISRFSRNTMDCLEIVRTLLNLNIPVYFEKENINTGSMESELFLSVLSTMAEGESASISSNNKWSIKKRFENGTYRLSSAPYGYKLESGGLQVVSEQADIVKRIFRELLSGKGMYSIAKELNAEQVPTQKGGRWTSTSVHNILTNEKYTGDCIFQKTYADSNFNRHTNNGELNRYLIQNHHEAIISHEDFNATAALIKQRATERRIESGSDKYQQRYAFSEKLICGECGNTFRRRIHKGKYNSYVAWVCNTHLSDTNRCSMLFVRDDALNLAFATMLNKLIFSYRLLLKPYLAAMQSNTADEAVLRIQYLEKQLDQNAEQRSTLHKLMAQGYIDQILYTQESNELLLQARDFRSEIEALNNTVAGDTTKVYETERLINYCKRGEMLTDFNESLFELFVDHILIYSRQKIGFVLRCGLTFEEMI

SEQ ID NO: 26706 - protein, 591 aa, synthetic construct
MAKITRVEQAVPTIKTKKKVAAYARISMESERMNHSLSAQISYYSSLIQKNPDWQYAGVFADDGISGTGIAKRDEFKRMIEAADNGEIDIILTKSIQRFARNTVDLLETVRHLKDIGVEVRFEKEHINSMSGDGELMLTILASFAQEESRSLSENCKWGIRKRFEKGIPNGHFRVYGYRWEGDDLVIVPEEAEVVRRIFQNFLDGKSRLETEREFAAEGITTREGCRWVDSNIKVVLTNVTYTGNLLLQKEFISDPISKQRKKNKGQLPQYYVEDTHPAIIDKETFDYVQSEIARRKELGPRANKSLNLTCFSGMLKCPHCGQSYMHNKRTDRGFMEFWVCGSRKKKGGKCPVGGSINHENLKKACAKVLGLEEFDEDVFHDRVDFINVPERYVLEFHMKSGEVITKDCPNTGHQDCWTEEYRAKTSEKRRKKPNCKGSSVMTGKIKCAGCGCNFRRATQPSSTSETGKAYYWRCAERDGCETVGLREDVLKPFIAETLCIPEFDDAEFEKQIDHIDVLSATEMAFHFKDGRTVSRTWEQLKRLGRPWTDEQRAKFKESIKGRYTPEIRQQMSEHMKQLRKERGKAWRKEK

SEQ ID NO: 26707 - protein, 526 aa, synthetic construct
MAQRKVTAIPATISRYTATPINSTKKRRVAGYARVSTDHEDQTTSYEAQVDYYTNYIKSRDDWEFVAIYTDEGISATNTKKREGFKAMIADALAGKIDLIVTKSVSRFARNTVDSLTTVRKLKDEGIEIYFEKENIWTLDSKGELLITIMSSLAQEESRSISENVTWGQRKRMADGKVSFAYSRFLGLDKDKETGKIVVNPEQAETVRLIFHLFLEGMTPHSIAAELTNRGIKTPAGKDVWNQQTVRRMLSNEKYKGDALLQKEFTVDFLQKKMKKNEGEVPQYYVEGNHEAIISPAVFDMVQAELAKRMKGGSRYSGVSIFSNRIKCADCGGWYGSKVWHSTDRYRKVIYRCNRKYNGEKCQTPHVTEDEVKAAFISAYNQLVTEKKEIIANAEIIRKTLCVTDALQEEKGKLEEEMAVLVEMTQNIVAENARVAQDQDEYQKRYDGLVERYDTAKARYDEVVAAISAKEAQSERLADFIKVLKAQDGTISEFDGSLWGSMVEFVTVGRDKVITVTFRDGTEIQA

SEQ ID NO: 26708 - protein, 580 aa, synthetic construct
MARRKTALRGVSAPARITKVAIYIRVSTIHQVDKDSIPMQKKDLIAYCQLILGTDNYEIFEDAGYSGKNTDRPAFQDMMGRIRKGEFTHVLVWKIDRISRNLLDFAEMYEELQSLRVTFVSKNEQFDTSTAIGEAMLKIVLVFAELERNMTSERVTATMISRANNGQWNGGRVPFGYSYDSSTSQFSIREDEAVICHRLKDLYLDNKSLVYTARALNADGYKTRAGADWTPTAVWIIASSPFYAGIYRYNRYKGTENRTLNPEEEWVMIPDHHPAIFTLEEHETMKSSLKANARYVDNPIGKPHTTTNIHIFQGIAYCGKCGNKMVSTPGRKHTDGYRPSNYSCPLHRKSNKCDNATVNDMVVGEFVINYILNMLNAKKTFSNINTPKELQKQLLTGSTFSDIFSIEEDGLNDFFNLLSRYGSDNSYVFAIKTPRKKKASVNPELAALRKEKEKQERALQRLQDLYLYSDKSMSEKDFILRKSEISDHLKSINAQLGLITQNTDSFLSDEEFIKQASHLLIQKELKNRKYIYYKNLATSVDPEILKTYMETILDSIYIADGHVTSIVFKNGLTHKFIYKN

SEQ ID NO: 26709 - protein, 556 aa, synthetic construct
MKGAVIYARYSCERQTEQSIEGQLHECYKYAEKNGLSILDEYIDRATTGTNDNRPAFQKMLADSERTTAWDIVLVYAIDRFGRNSIEIAINKQKLIKNGKNLISATQRTSTNIDESKNLDGILLENMYIGLAEYYSAELSQKIRRGLTESRNKGLFCGGKVVYGYCVKDKTIYINEAETETVRYIFQEYNNGKTIPDIIEVLDARGIKYKGETFKKNFLYRMLRNEKYIGITKYDGVEYKNIYPPIIKEDLFNAVQSRMVTYSVGAHSKDADLLLKGKVICGLCGHMMNGDCSTSRSGKLMHYYKCSGRKRGTGCESRILRQDKLDEFIVDVTKQVFCSKENIQLLVDKVIAVHKQRQKDESILNSLKSRHSDLVKSINNMLFALQEGIITPSTKERLNMLESDKAEIEEQIAKEELALSKQISRDEVEYYLRRAIKSSPKILLNNLVDKVIVYNDKIEIYYKYCHKIPDDPDDQRGYFFEELRIPINCGKRNRQFLPIMIDHQKMIASVKYILNRKKKMLAPINYKKRPILASQNVTGADGYLLVEPRGFEPLTF

SEQ ID NO: 26710 - protein, 506 aa, synthetic construct
MKTAAIYARYSSNSQTEQSIEGQLDVCNKYAKDNDLQVVATYIDRAMTGTNDNRPDFQRMLKDSEKSSWDAVLVYALDRFGRNAVEVAVNKQKLKKTGKILISATQRTSDNLDGTKNLDGIILENVYIGIAEYYSAELSQKVLRGLNENRKKGLFCGGGVPYGYRVENKRVYVDEDAAEIVRYIYERYSIGVTVPQILKELNARNVLFKGRAFNSGHVYKILSNERYSGKYTVHGETYTNTFPKIVSDEIFDRVAQTAKKNLRCKRSVEVVYLLKNKVKCGYCGMPVTAETGTSRHGKTIHYYKCSGRKRNITDCDLMIVRKETLEKIVMDAIINALSEPNAISKIVDHIYQVQEQMLNEQKELKLLQSEKQKIDLTIDNIMSAIERGVMSNNAIRRLNELEEQQLEYEKKIAIEKSKTVDLIPKAEIANYYKSALKLEPLLLINYLIDEIILYNDRIEIRFTSPIPKSPDDCQGFLLYSNSTTISCYDKITGIFVNEPFYCIVKL

SEQ ID NO: 26711 - protein, 543 aa, synthetic construct
MEVKKIPKKTVTLIEPKRSVLVDKEKYHQKRVAAYCRVSTDSEEQLTSYVNQKKFYTDMIARNTEWEFAGLYADEGISGTRADKRPEFNNMIKACLAGKIDYIITKSVSRFARNTVDCLDYVRLLRARGIGIFFEEQNIDTLKSDSELYLVIYAGFAQSESESISKNITWSYRKNFEDGKPIFMFKKLLGYKKGEDGEPVIVPEEAEIVERIYTMYLSGMTVDVISRQLQSEHIVIPDKKFSFGKNMVMNILKNEKYCGDCILQKTVTVDCISKTRKKNEGEAPMYIVENSHPAIISREMFNRAQEELSKRKARSPQSQKTAITASGKYSKYALTDVLICAECGSRYKRVTWTSLGQKRIVWRCVNRLDNGKKYCQHSPTLSEPALQEAIVRALNKFNDEDTSTYLTLMKATIGEAIGANGGSDEIDLLERRIDALNSRMLKMVSDSVERGADMEENEDEFKTISEQIEQLNRRIEAIRKSEGSDEDRQERLSLIQATIDQREANRDTYDDAIVRQMIECVKVHEGGKLTIIFGGGYEIEEQI

SEQ ID NO: 26712 - protein, 501 aa, synthetic construct
MNIREDVIYARQSVDRKDSISIESQIDFCKYELKGGSCRVFKDKGYSGKNTDRPEFQKLLGEIRKGKVRRVVVYKLDRISRSILDFANMMELFQEYDVEFVSSTEKFDTSTPMGRAMLNICIVFAQLERETIQKRVTDAYYSRCLKGFHMSGQAPYGFDLEPTVVENIRTKMMVADPRAASHVRLMFEMYAEPETSFGDITRYFEERGIKVYGKSLTRSYLSQLLRNPVYAQADLEMYEFFKSQGTVVVNDAADFAGTNGCYLYQGRDVKEDKDKSLKDQILVIAPHEGFVSADVWLRCRKKLMTNTTFQNGRKARNTWLAGKIKCGKCGYALKTTHNPSGYEYLRCSKRADHKGCPGCGTLRKTEFEQFIFTAMGEKFREFKLLRGGEEKANPKITAYQVELAQVEAEIEKLLDTLTGANATLLAYANKKIEDLDNRRKTLSKAIADLSVETLSSQQIELLSGYLDDWENISFEDKRKAADGLISSISATSDYVKIEWKI

SEQ ID NO: 26713 - protein, 459 aa, synthetic construct
MNNTHFYSHYTSIEYKTCALYVRCSKEEQAKFGDTIEAQKADLKEFAKQHHLKIFDIYVDEGYTARKKYNKRKEFMRMLEDVELHKFQYIIFTKLDRWFRSISDFYKIQEILDNNGVTWLTALERYEMETTNGKLNVNIRLSVAQDEADRDSDRIKDVFRLKVKKGEAITGSLPIGLMIGENGKVDINPDTVQIAYDMFDYFETHNSKRGTLLYLIDKYDRYFCYETVARALRNPLYKGEYRGNSNYCPAIIEPDRFNRIQKLGVRNVKKRKNNRYYIFSGLAECKECGHALVANTIIQRRYNREYTNYRCNYYSNSHLCNHSHGINEKKIETYLLNNIKPELEKYVADYELKQKITSKKTDPSKIKNKLQRLQELYINELIDLDDYRASYNQYKKELDEITSDTIPVKKDLSSIRSFLNLDIQNIYDSLTPQERRALWGSIIDKLIISNDEDIEIIFL

SEQ ID NO: 26714 - protein, 440 aa, synthetic construct
MPKVTMIPATVNSLTHLPKASVQKRRVAGYARVSTDSDEQFTSYEAQVDYYTRYIQSKPEWDFVRVYTDEGISGTNTKRREGFKEMIADALAGKIDLIVTKSVSRFARNTVDSLVTIRKLKENGVECYFEKEGIYTFDGKGELLITIMSSLAQEESRSISENITWGQRKSFADGKIHLAYKHFLGYKKGEDGRPAIVEEEAVVVRLIYRLFLDGKTQAGICRYLEDLEIPSPSGKAKWSKTTVTSILTNEKYKGDALLQKSFTVDFLQKKTKLNEGEVPQYYVEGSHPAIIEPDEWNHVQAEFARRKALGNAYSGKSVLSAKLVCEDCGGFFGSKVWHSTDRYRRTVWQCNNKFKGGERCLTPTVDTETVQQLFIKAYNQMMGNRKQIIEDCELMRKKLTDFKSLDADIERHLEETQIVAELVKAAVKDNAVTAQSQEAY

SEQ ID NO: 26715 - protein, 552 aa, synthetic construct
MSTTHQIDKDSLPLQRSDLINYTKYVLGINDFEIFEDAGYSGGTTDRPAYQDMMNRIKMGEFTHLIVWKIDRISRNLRDFSDMYDELKKYNVTFISRNEQFDTSTAMGEAMLKIILVFAELERKLTGERVFSVMISRAQKGLWNGATVPLGYEWDSETKFPRPCDKEAKIVQYIFDQYEEIKSTTKVAKKLNIENIPTKRNGTWTPRTVGSILTNPFYIGTYRYNTKTKKTRRWKDKSEWVVLENNHQAIVNTEQFERVSQIIQNNYKGDKNYQRSSTNVHILSGLASCHKCGKKMHSGLDRARKDGFTPSRYTCYAFNVNYTCANYSSDLAILPGLINYIANYMTLQERITARHSLRDMESILLRGKYFEDIDHIEKQDLKNTYDLLINNKMVTYNSFEEKNKEAIISQNVIYEAEKEKYEKALKRLDDLYLYDVNSMSQKDFVIKRKEISDKIETINKKIQEVKFNDTPFINNKDFNLLSKASFYLLTKNLSSVKNIDVISLLNNLDRQTIKDFINTIITDVSVEKGKIYNITFKNGIVHHFIYKNEHKI

SEQ ID NO: 26716 - protein, 524 aa, synthetic construct
MRFFNYGRKSVYSDKSDSIDNQFRMSREYCEQKFPGKIESWQEFSDEDFTGANTSRPDLQRMLSYIEEGFCDVLVVYQLDRLSRNVRDFSNIYAMLEEHNVMFISIKENIDTTTPIGRAMMYVTVVFAQMERETTATRVADNMRGLAKKGYWMGGQAPLGYVIKHIVIGGKKHSALELDPDGVRYVTQIFDDFLSSHGSLNAMVTRFRHQGIRTLTGKFFSKAHLHNILTMPYCVEATPEVYDYYAAKGCIMDSASPREKWDGSTGVLIYGRFSDKNQKHLVQPPENWTICLGLQKPFIPAEKWLAVQERFKQNTFCKDAKWPVPLLRGILRCNKCGSLMPVSRRKKVDGTCSSWYYCRKRKDEGSEACDMNQIKCDLIDEKVLEIFRKIALDPDSIHQFVKTESPSEIPNLSFISSRISSVESKIGKLAASLALAENSTASKYIIEEIERLDAELAALKREASHAEMKIHQAAAKERDSQATAIEIAKFINNLDGFSAKEKNEIARSVIRDCRWDGEKLFLTL

SEQ ID NO: 26717 - protein, 505 aa, synthetic construct
MSNAVIYARYSSGHQREESIEGQIRECTDFAKRNGLTIVEHYIDRAISAKTDDRPSFQQMVADSSKKTFDTIIVYTLDRFARNRYDSAVYKAKLKRNGVRVLSAKENITSDPSGIILESVLEGMAEYYSVELAQKVKRGMTENALACRWASGRIPFGYTIDADKHLHPDPALVPIVQEAFEMYAAGAKIVDIARKINSYHVVTGMGNKFGRSSFDRMIRSETYIGVFKWNDIRKENAVPPIITPELFYKCQARYNARNRKNVARPSAIYLLSGKLRCGCCGGSMCGMSGKSRNGTMHYYYSCYSTRRRTSHCDIGNIRRDEIEHIIAAHAASILKKPINLDIIANQALKTNNSVKNYRLESLLQQEKDLTQKLENCMKAIDQGLVSITLMDRIKQYEADLQSVKNDISLEKIKSNPIQVTKEHIIFFLEKFALLEGEEFKDRIISTMVKDIVIKKEKDGNYLVTVQYNYANSKELPNEESYSVPESIGSQDVELVETSGIEPLTS

SEQ ID NO: 26718 - protein, 594 aa, synthetic construct
MPKISKIEPTVPAIKQLKKVAAYARVSMQSERMMHSLSAQISYYSKLIQKNPDWEYAGVYADDFISGTNTVKRDEFKRMLVDCEEGKIDIILTKSISRFARNTVDLLETVRHLKAKDIEVRFEKENINSMSGDGELMLSILASFAQEESRSISENIRWATKKRFEKGIPNGKFKIFGYRWEDDKLVPVPEEAEIVKRIYQNFLDGKSRLETEKEFAAEGITTANGCRWVDSNIKVVLTNITYTGNLLLQKEFIEDPITKRRKKNRGEMPQYFVENTHEPIIDMETFRYVQDEIARRKELGALANKSLNTCCFTGKIKCPHCGVSYMHNKRTDRGNCLEFWCCGSRKKKGGRCGVGGSINHKNMVKACTEVLGLEEFDEEIFLREVDHIDVPKRYVLEFHMTDGRVITKDCPNTGHKDCWTAEYRAKTSAKRRKNGTNCKGSSCFTGKIKCKNCECNFRRATQPSATAENGKVNYWRCSEHSNGCQTAGLREDALIPLIADTLGMAEFDDALFRKTVEYISVLTDKDLEIHKKDGTVTAVIYTPPAPKRLPRTEEQKAHMRSLMKEKWTPERKVEMSERMKQMRKERGENWRKEK

SEQ ID NO: 26719 - protein, 527 aa, synthetic construct
MAQRKVTAIPATINKFTATPVNSRKKRRVAGYARVSTDHEDQVTSYAAQVDYYTNYIKGREDWEFAGIYTDEGISATNTKKRDGFKRMVADALAGKIDLIITKSVSRFARNTVDSLTTIRKLKEHNVECYFEKENIWTFDSKGELLLTIMSSLAQEESRSISENVTWGHRKRFADGKVSFAYSRVLGLEKGPDGNIVVNQEQAKIVKLIFRRFLEGMTPHSIAVELTEMGIKSPGGKDKWNGATVRRMLSNEKYKGDALLQKEFTVDYLQKKTKKNEGEVPQYYVEGNHEAIIEPSVYDLVQVELAKRSKKNEARYSGVSIFSNKIKCAECGSWYGSKVWHSNDKYRRVIYRCNHKFDGNRKCETPHVTEEEIIAAFIKAMNILITERDEIIENIQLIRQTVCNVTTLEQEQDKLRSEMEIVVELTQSCVAENARTAQNQEDYQKRYDGLVERYEKVKSRYDAIMEAIEEKQAHYEKLGIFIDILEKHGAPITEFDAGMWGSMVEYITVDKDKKMTVTFKDGSEIQV

SEQ ID NO: 26720 - protein, 508 aa, synthetic construct
MSVQVIKSKKTRKGRIRVAAYCRVSTETEIQEGSIENQIEHYEELIKSNPDYEFVNVYYDFGISGYKEKRPGFQEMMKDARSGKIDLIITKSITRFARNTNTLLKATRELKSLGIGVFFELQNMNTLNEGGELLLTVYAAFAQGESETYRELAQMTFKRKFSEGRPEYQLRKTLGFDMTENNEIQIVPKEAEGVKQIFQWVKENYSTQTIVKMAAAKGITLKSGKPFTAQWVYKTVRNVAYKGDYIMQRTYTDSERKVHVNQTLVPSFYIENDHEAIVSKRLWNAANKVIDDRAKERTTHLEMRPLTEENYPYIHKLHCAKCGGVLHGQKTKSGAQYSFSCGRRNRQGKGFCSGVSVPQKVIESWGEIDGNIYISFDPDKPLHKQHSYVKESTWKKNHTKKKLPPLPAYNVENYPYYRRVYCAECGHLLTRSRRYDGLVEFICNGMASRGKSYCKGVRVPEEVLNRLPEWDGYYWIKEDKENGEKHYSYTCKEEKPQRKEYSAGSRED

SEQ ID NO: 26721 - protein, 519 aa, synthetic construct
MKKVTKIAETASSKVKLKKIRVAAYCRVSTDSDAQLESLEAQKTHYENYITSRDDWEFAGLYYDEGITGTKKDKRPELLRLIDDCKAGKMDFVITKSISRFSRNTTDCLELVRKLLALHIPIYFEKENINTGSMESELFLAILSSMAEGESVSISENSKWSIQKRFESGTYKVSYPPYGYDWDGEQMVINPEQAAVVKEIFAALLSGKGTHAIADDLNRRGIPTKRNGRWTATTIRGMLSNEKYVGDCLFQKTYSDSSFVRHNNHGEQTQYMVKDHHEAIISREDFEAAHAFIHQRATEKGVVKGSDKYQNRYTFSGKIICGECGDTFKRRIHSCTGYKYTAWCCSTHIKDKDKCHMLFVKDDDLKQAFVTMMNKLVYAHRIILKPYVDALKNTSSDDSLRRIQEIQTLLAQNTEKRETLTKLMTQGIIDPIIFNKETNELLSQADSFRDEINALKNAVSGDVTKVTAATALLHFTEKGGILQEFDDGLFNEYVNRIIVHSRNEVRFELKCGLTLRERM

SEQ ID NO: 26722 - protein, 522 aa, synthetic construct
MGNVMVIPARRQVGNTVKQSDQKKLRVAAYCRVSTDSEEQETSYEAQVTHYTEYIQKNPEWELAGIFADDGISGTNTKKRDEFNRMIDECMAGNIDMVITKSISRFARNTLDCLQYIRQLKDKNIPVYFEKEAINTLDAKGEVLITIMASLAQQESQSMSQNIKLGLQYRYQQGKVQVNHNRFLGYTKDDNGHLIIDPEQAEIVKRIYREYLEGSSMDKIADGLMADGILTGAGKTKWHTSTINKILRNEKYMGDALLQKTYTTDFLTKKRIKNNGTVPQYYVEGDHEAIIAKELFMQVQAELVRRRVVHVSPTGKKRSFSCNHCFAQMVFCGDCGELYRRVHWNNHGCKSIVWRCISRLEPTSAEMDCTNRTVNELLLQEVTVKAFHQILTERDFFLKTLQQNIAKAVVNADTLSPDGIQARLEELQKELIKKANNKQDYDAIADEIFRLRDQKEQSELDSHHREEAMNRIKELQDFISGQETDITEFDEALVKKLIEKITVFNDHFTVEFKSGITIDIES

SEQ ID NO: 26723 - protein, 531 aa, synthetic construct
MEQYCLYLRKSRSDIEAENHGEEETLARHEKILLDLAKKREYNVTQIYREVVSGETIAARPVMQQLLSEVEHGIWSGVLVVEVERLARGDTIDQGIVAQTFKYSDTQIITPMKTYNPNNEYDEEYFEFGLFMSRREYKTINRRLQRGRLSSVKEGKCVCSIAPYGYDKVKLKGDKGFTLAPNPNEADVIKMIFELYTKGDLQPDGTYKRLGVALIARKLNEMKIPARKSEYWVPASIKDMLRNPVYAGKIRWNWRSQNKRMQSGSISISRPRSEEDNCIIVNGLHPALITEETFDLAQEYLAKNPPRPTKRNAPTKNPLAGIVVCAFCGRKLVRRPYTSASCPPTLICSVPHCPNVSSFLHLVEERILKSLEEWLRNYKLQWNLSNNKPSELISESEILRQSLNDINSQIAKLNKQMIKAHELLEQDIYTTDVFLERSRTITERLNQLSYDKAEIEKRLGVETIREKSMKEIIPKVEKLLDVYHELPSAKEKNDMLKDVLEKVVYKKMQNTRWSGSPDDFEITIYPKLPKS

SEQ ID NO: 26724 - protein, 558 aa, synthetic construct
MNKLRAAAYCRVSTDRAEQSGSLASQRSFFDDYIRNSDSMTLVGVFYDEGTSGTTTLNRYGFNKMISLAVSGGIDIILTKEVSRFARNTVDTLNITRMLRAKGVGIIFINDNIDTRDSDGELRLSIMATIAQEESRKISERVKWGQQRKMEQGVVFGRSCLGYDVKDGKITVNADSAEIVKRIFTEYTVLLKGAESIADGLNAEQIRTVNGGRWSGAFIRKVLRNVKYAGDLEQKKTCTPDFLTHKKRLNSSEHIYIRNHHEPIISRELWEQTQAEISRRKPTDTSRHSDRYVFSGKVYCGVCGSVMVSRVKTLKNGKIYHALRCSGRIGGKSCNNETLNVTALKACIKRIFTDMPIDKTAVINAVIKGLSRTDKPDIPALRRKIETLNAKKRRAVDLMLDGLITQQELIEQKSYYDSIIEKLSQEISSDRSIFETDKIRKNAEKFLDFTSDPIWLLVIRADYIHGTLTVYLNGIEKGFTTCFTATGRGDSYRVITGNTVRSQGIIPGTMQVPKNWFHHDVNDKLIKKSAPDIFQVHFVLICRLFCFLYAAGHSVPTL

SEQ ID NO: 26725 - protein, 543 aa, synthetic construct
MSKKKTKVIREIPENPFIQGQAKRKKLRVAAYCRVSTEQEEQESSFENQVAYYTDLIQSNPEWEFAGIFADRGISGTKDTIRPEFMKMIEHCQRHKIDLIFTKSLSRFSRNTLDSIKYIRLLKSLNVTIEFEKEGLNTSDVSSEIYLTWFSAFAQAESESISQNVTMGKRRQYKEGHFAFRYKNFLGYRPGENGEPEIDPEQAAIVSRIFFAFLSGDTPEQIAKSLEADHIPSPTGKPTWSKTTIRNMLQNEKYAGDVLLQKTYTADFLEKKVKKNRGEVKQYYITDNHPAIIPRDIFQEVQLEIARRSSKRKVSCRRTKSGRGKYTSKYALSERTVCGECGAMYRRTMWIKRDGTKEDVWRCVNRLEFGTKYCKHSPSLKEPILHQAILNCIQSVFHNKEEIAEAVREAQKKIILFEDAKNNPEVIRQRMQDIDHGMANLLTLAAQSSQTELFEKKFKEMTEEKARLAEQLKQAEEDATTDAKRQKQLDDILRAIDIDIVELTEFDDTFIRRIVEQVTILSKDKIEVRFIGGFSKVGDIPTK

SEQ ID NO: 26726 - protein, 515 aa, synthetic construct
MPEIRVIEPIIFAPAEKLRVCAYARVSSDSTDQRNSFASQVNYYTKYIQAHEGWTFVDIYADQGITGTSALKRDEFLRLMRDCRQGKIDRILVKSVSRFARNAQDCIEAVRELRQLGVTVYFEKEHINTASMSNEMFLSMMSAFAQEESISISKNMRKGAVMRMKNGTFRLSQAPYGYYLDEKGILIVQQEEAKIVQRIFGDFLSGMGIQEIAAELQKEHIPKLNGEPIWSYTGILYILTNERYIGDELFQKRYTTDTLPFQKKINRGQKKQYYAEDTHDPIISREVFRKAQELLKRKSERHGHQNNGQYPFTSLIVCDECGTNFCRRIAKNQRVLWTCRKHFKGKHLCSMESLNETEIQRYFLTLYKKLAENRQEILGSYLRQLEELKDKDFMAHPDAMELNRQIAGLLEQNHTLHRLRAKECIDSAFFIAQSNELGQKISNLKAELKQYRNLNEYADFIDNTRLILTILDSPMPVFSASVFRNIVSRITVTHETLRFQLVNGLELEEERISGG

SEQ ID NO: 26727 - protein, 527 aa, synthetic construct
MAQRKVTAIPATINKFTATPVNSRKKRRVAGYARVSTDHEDQVTSYAAQVDYYTNYIKGREDWEFAGIYTDEGISATNTKKRDGFKRMVADALAGKIDLIITKSVSRFARNTVDSLTTIRKLKEHNVECYFEKENIWTFDSKGELLLTIMSSLAQEESRSISENVTWGHRKRFADGKVSFAYSRVLGLEKGPDGNIVVNQEQAKIVKLIFRRFLEGMTPHSIAVELTEMGIKSPGGKDKWNGATVRRMLSNEKYKGDALLQKEFTVDYLQKKTKKNEGEVPQYYVEGNHEAIIEPSVYDLVQVELAKRSKKSEARYSGVSIFSNKIKCAECGSWYGSKVWHSNDKYRRVIYRCNHKFDGNRKCETPHVTEEEIVTAFIKAMNTLITEKDEIIENIQLIRQTVCDVTALEQEQDKLRSEMEIVVELTQSCVAENARTAQNQEDYQKRYDGLVERYEKVKTRYDAIVEAIEEKQAHYEKLGIFIGTLEKHGEPITEFDAGMWGSMVEYITVDKDKKMTVTFKDGSEIQV

SEQ ID NO: 26728 - protein, 512 aa, synthetic construct
MLSIPKVAQYARFSSDNQRSESIDAQIRAMNQFCKQNHWQVVSTYTDEARSATTDNRPQFQQMIADSGKGLFDIVLVHKLDRFSRDRYDSAIYKKKLKKNHVKLCSVLERMDDSPESIMMEAVLEGMSEYYSKNLAREVMKGMNETALQCKHTGGCPPLGYDLDENRHLIINESEAQAVKIIFQMFAEGYGYTAIIDHLNAHGYKTKRGKMFGKNSLYEILSNEKYTGVFVFNKAAARSDGRRNNHAQKDSYIRIEGGCPAIIGKKLFAQVQRIKAKNKRNTGRYHSKEFYLLTGKLVCDVCGKRMIGNLRFSGRSKTRLATYRCNTHRAMCNNKELNKDYLDAYIAVLIGERLKPKNLRKAVSKVNQQVQKFNSSYDKYHTDVLQQYNEVQDSFANITRAIEKGIFTDDLLQRAEQLESEKAKLETRLHELKLLEPLQYEDVAYLHTQWKELKRNTEEFRTFIQQFVKAIHVRPYDFDIVLDMGFGVVELRETISMQRGELYEMFDSKVKE

SEQ ID NO: 26729 - protein, 512 aa, synthetic construct
MPKTEEKQAVKAVIYARYSSDRQREESIEGQIRECKAFAAANGYRIIGTYIDRAMSARTDQRPDFQRMIHDSDRHLFQFVIVYALDRFSRSRYDSAIYKNRLKKNGVRVLSAKENIRDDPTGVILESLLEGYAEYYSLELAQKVRRGMADNLLEKKWVGTVIPFGYKKGTDSRLYVDESKRQAVIDIFQMYSDRYRLVDIIAYLNAHHFTTAQGRPFSRNSLNNILVNSIYTGTFRWAGTVYPGYAPRIISDELFNKVQKIKEGRKRNMIKSTSPDYELTGKIFCGRCGRPMVGVSGTSKSGNTYFYYKCSGKTHGRKDCDAKAIRRDAVESAVYNATVAMLKQPHAIKIITAQAILAQEREQGNSEVDRLKHEKAALDAKIRNISKAVAAGLTADEIISQANEYSNRSKELESLIQVEELKEKAFTLTPEAVTFFLEKLLEKAETGSTTLSTFWDFIRCIKINGCIAEIHFNYTAVPATLDNPIRVKIETNEECSNDDVLVDHQGFEPRTP

SEQ ID NO: 26730 - protein, 517 aa, synthetic construct
MKTITKIEANRSAAVHRKCRVAAYCRVSTEHDDQIESLETQKAHYESWIKLHTEWESAGIFYDAGITGTKAEIRPGLQDLLQACRMGRVDRILVKSISRFSRNTAECLALVRELLGIGVSVFFEKENIDTGSMESELFLTILSSMAEEESLSISRNEKWSVQHRFQNGTYVSSSFPYGYCRNDRGELVLEPEEAEIVKYIFSALLSGKSSCQIADLLEQQGIPFKNGRHWCDATIRGIVANEKYVGDVLLQKTYTDVHFHRHKNHGEVECYLLSDHHIPIVSRETFAKANAVIRQRAAEKGIVYGTGKYQKRYAFSGKVICGKCGSTCKRRIHSGNEIAWTCAAHIESAQKCPMKYVREEVLEAAFITMLNKLIFSRKHILKSLLEQLKTNSNDENVQRMQELQKQLESHAEKKNTLHRLYAQKVVDPVLFRQEMNALQKQAESCRMEIAQLEQETHGETEIIAELKLLLQFTEQHSAMLTEFQETWFSAFAEQIILYDRNHIGFRLKCGLLLKEEI

SEQ ID NO: 26731 - protein, 518 aa, synthetic construct
MPKVTTIPPRKQRNHAVTSQETRKIRVAAYCRVSTDTEEQATSYQAQIAHYEEVIHRNPEWVFAGIYADDGISATSTKHREQFHQMIQDCMDGKIDMLITKSISRFARNTVDCLNYIRQLKAQNIPIYFEKESINTMDAKGEVLITIMASLAQQESESLSQNVKLGMQYRFQQGKVMVNASCFLGYDKDENGDLVINPEQAETVKRIYREYLEGASCQQIARGLERDGIQTARGNTRWHDSSIRLILENEKYMGDALLQKTYTVDFLKKKRIKNNGEMPQYYVEDDHEAIIPRALFLQVQEEIASRGSQVDCMGRRRGFSANHCFTGLLYCAECGEQFRRIHWNNRGCKSVVWRCMTRLEKKGACHARTVYEESLKQAFVDALNQLTGGSETYFSILQENMAEVIEMEQSDLPEEIQRKLDVLQKKLIECAERHEDYEEIAQEIFRLREQKEQALRENVSQQEQKDRMRELQEFLAAQPHHITEFDETLVRHLLVKVTVSSDRLDFTFQSGVTVSIEK

SEQ ID NO: 26732 - protein, 514 aa, synthetic construct
MAKRKFNKGGEVRLVAYYRYSGGSGQTEQSIEGQRRDCETYARLHNMTIQKEYVDRHISGKTDDRAAFQQMITDSDKGAFDMVICWKTDRFARNRYDSAVYKKRLRDNGVEIVYAAESNIAGAEGIIIEGVMEALAEYYSAELAEKMRRGMRESALKGQAISRCRALGLKTDEHKRFVIDEKTAPTVRFIFEHYAAGESATSIVDKLNAKGLRTSQGNPFNKSSIPRIIQNEAYRGVYVSKSYDVRIEGAIPAIIDDELWERAQTMLKLNRQLKAKNEPKADYILSGKLYCSCGSLMRGMSGHSATGEVYRYYTCPNKNCHLRNIPKDDLEGKVMQSISDHLLQPEAMEALAEAMVEVQKADAEKPNAERVAIEQSLADVRRRSKNILDAIENGTANAQLCARLDDLSEQERTLNFQLSALEKEKPVVFTKEQYLFLLEQFLVEPSERTPEYGRRLVNTFVTSMVVSDRELVINFNVSDETVNKNKKTSQTNLQKESSSGMRLVRVARIELTAS

SEQ ID NO: 26733 - protein, 481 aa, synthetic construct
MVENEIVKTGIYLRVSTEEQAKEGFSIHAQKEKLTSYANINDWDIYDFYIDDGISGKNITDRPSIKRLIEDVKSGKVNNVLIYKLDRLTRSVKDLINLIELFEEHNCSFNSVTEKLDTSNAVGRMFIKIIGIFAEFERENLAERVSFGYEQKTREGNYTNTNGVNGYDYIVGSGELVVNEVEKDIVNRIFDLYLEGNSMLKIARTFNQEQIPTKRGGDWSQSTIKSILTNPLYIGKIRYGVGKKNQSKAFKVDGTQENIVDEDKFNKVQLVMKKRKHFINKKYPSERAYFTTALRCAKCGAKFHPKMSKKENSDTYYITYYCNNKQLSRCSCSGISHIKVLNAFEKYIENIKLEPIKEINTKKKDVKKEENIIRELNKLDSKRKNLQTLFINEEISSTDYQDMIKIVEDKKVFLNNALKSLKEPKEEEINISDIKDIITNIKKNWDYLDTNERNNFITQFIKKIELDVVDGKAIINDIQFS

SEQ ID NO: 26734 - protein, 430 aa, synthetic construct
MKKIVKDITPELRANDTIKRVAVYARVSCEKDTIVHSLKAQIDYYRKFIMKNPGWKFAGIYADEGKTGTKEAREQFQALLTECRNGNVDMIITKSISRFARNTVTLLSITRELNELGINVYFEDQKMDSMSSDGQLMLTLMAGIAQAESKDCSDAVKWRIRHGYEQGRASSFKILGYRWDDGNVVMVPEEAPLVKRIFDLYLSGKGANAISKILNSEGVTAAGITKWAPTTIRNVLMNEKYYGDLLSQKSFVEDHINKRKVINNGELPQYFIEDDHEAIIDRQAMSDVKNEIAIRRARFYHGQGKESCLTSKIKCPYCHSNYHRKKINGISKWSCATSNRKGKSMCPKSKDIREDVLLAILAHQLGYKDFDEKLFAEQVDYIECFDDHIITHFYDGSIKNSKWSNPSRKDSWTDDMKEKARQRGLNQYGK

SEQ ID NO: 26735 - protein, 597 aa, synthetic construct
MANKVVKVIPARPQGIIIDQAGVIKRKRVAAYARVSTEKDEQTNSYEAQVNYYTNYIQANPEWVFVGIYSDAGITGTSTKKREGFKRMIDDAMNGKIDLILTKSVSRFARNTVDSLVNVRKLREKGVEVYFEKENIYTLDTKGELLLTILSSLAESESVSISQNTTWGQRKRFADGKVSFAYSNFLGYDMGQDGKLHINEEQAKVVKRIYEEYLLGYTPSYIAKRLTADNIPTPQRKKVWYQGVIDSILTNEKYIGDSILQKTFSTDVLTKKRKKNEGELPQYYIENNHPAIITDEIFEMVKEEMARRKSAGLMTNVSCFSGRILCGDCGGYFGRKVWHSNQPNRTIVWQCNKKFSNPDACGTTSIKEKAIEEAFVRAFNEMFSRKDEIIENYKLCIDVICDDSKFQERKNELDKALEEKTIVIKDFLLKCSKTEENIEESNTRYDVLIKEFEALNAERQKCLDMISSLAAKRVKINSFLNILNSTEGVINSFNEVLFQKSVNHMVINHDLTIDVIWRDESKTTTYIERGVKEVKKSAPRIKPEKVLSDHTCLCCGKQLYITPGKVQRIFCNKKCGETYRRAKAKEARLENNMISHA

SEQ ID NO: 26736 - protein, 520 aa, synthetic construct
MPTSKNTARKYAAGGSSDNSCGVEPLRAVIYARYSSSGQREESIEGQLRDCYEFAKKHGIIVIGEYIDKAMTGRVDRRPDFQRMMKDSEKGRFNCVLLWKMDRFARNRYDSAMYKYKLKKNGIRIFYAKETIPDGPEGIILESVMEGYAEYYSENLAQNVKRGNYDSALELKTLGKTCLGLKTGPDGRYMIDQAEAAIVRRIFEEYAEGERAKDIYERLNSEGYRTSRGGKFNKNSLRRILSNKKYIGVYEYEDIYVENGIPAIITDRDLFERVQKMLKINHDAPARGKVQNFLLTTKLFCGLCGSPMIGDGGTSHTGKAYAYYSCTKRKRGRSCKKESVPKDWIEDLVVGELVKIVHNDELIEQIADRVMEYQKREKDQSGLHALEIRQKENEKAISNMLAAIEAGIITPSTKNRLMELEADRADIEKGIAHELLAEPEFERDQIIYFLERFRSGDINDEAYRIMLVDTFLNSVYLYDDDHLVLVMNYSGENCKVDLKLVEGAVSGDGCKGSAFAPSSA

SEQ ID NO: 26737 - protein, 569 aa, synthetic construct
MTNQKEKIVALYVRVSTGYQVDKDSLPFQKKELKAYCEHVLHVDKKRIEVFEDAGKSGKNTKRPAFERMMEKVKAGKVSHVVVYKIDRITRNLVDFSLMYDDFKYNNVTFISLNEQFDTSSAIGEAILKIILVFAELERKLTSERVTDVMIGRAQSGQWNGARVPYGWDWDAENKCPVHSKKEAPYAKAMYQMYLDGGSSVTIRDYNNSHNIPTKRGGEWTSKTVADFLRNPINKGDYRYNYRESARGKRKADEEVIYMEGVFPPLIDPEIWNEVNRRMDANHTRKNTSAMHPIRKNCNVFAGLIVCGKCGSNYQVTAKDRRRGNGFRPSSYACTGKYQKKHCDNLNVSDVKIGPFMINYIAAIIDASKSRRFIKDTESLERVILSHINFTDVAGISESSLQDTIDLLYGRSGTETLSGKPVSKDGKNTDTTEKKKELQEKLQKTDRALERLKKAYLFDDDAMDEKEFLEMKTKLEVDKVKLGNSIKSLDSSSISENVDQAAFIKSASQFLISHKINSGGNIEYSELAMMDEEAMKTLMNSIIDHITVMDRHITEIVFKNGLTHTLLYR

SEQ ID NO: 26738 - protein, 513 aa, synthetic construct
MKKQPTGGKRLVAYYRYSGGSHQTEQSIEGQRRDCETYARIHGMVILHEYIDRHISGKTDDRPEFQQMISDAGKGMFDYVICWKTDRIARSRYDSIVYKKKLRDNGVELLYAAEANVEGSGGIIVEGLMEALAEYYSAELAEKVRRGMRESALKGKAIGSSRPLGLTVDKDKKYIIDPAGAAAVRYIFEQYAAGAASSSIVAHLNEQGLCTSRGNPFNKSSVVRIIQNEVYRGVYVSPKFDVRIEGAVPAIIDDDLWERAQKMFIRNRQSRSPRNDRADYILSGKLFCGECGTAMKGVSGHSSNGEVYFYYNCPCKDCHRRNIPKDELEGLVIRTVCNDVLQPDVMDRIADSVIEAQTAELNQPNPEKEALQHELADVQRKAKNLLSALENGTAGAMLTNRLAELEQQANTLSYQLSSLESEPKFPVFSKEEVLYLLEQFLIAPSEKTKAYRRRLIDTFVSKIEVSNTELTIYFNIAEEDCGKMKKAPQSNQPEGCSTEKQMVRVARIELTAS

SEQ ID NO: 26739 - protein, 563 aa, synthetic construct
MDEKIVALYVRVSTGYQVDKDSLPFQKKELRAYCEHVLHINKKRIEVFEDAGRSGKNTKRPAFERMLEKVKAGLVSHVIVYKIDRITRNLVDFSLMYDDFKYNNVTFISLNEQFDTSSAIGEAILKIILVFAELERKLTSERVKDVMIGRAQNKQWNGARVPYGWDWDAKKKCPVHSKKEAPYAKAMYRMYLDGGSSVTICDYNNSHNIPTKRGGEWTSKTVADFLRNPINKGDYRYNYRESARGKKKSDDEVVYIKNVFPPLIDPKIWDEVNRRMDANSQNRNTSVFHPIRKRCNVFAGLMICGKCGSGYQVKGKDSRKGDGFRPSSYACTGKYQKKNCDNLNVSDVKIGPFVLNYIAAMVDASKSRRFIKDCESLEQVILSHISFSDVVGISASSLQDTLDLLFGRSGSELLSGKPVSNEAADGSKTEELKEKLQRTDRALERLKKAYLFDDDGMDEKEFLEMKSKLEVDRIKLENSIKDLNSSSISENIDQAAFLKSASQFLISHKINSGDYIDYSRLAALDEESMKAFVNSIIDHIVVLDKRITEIVFKNGLTHTLLYR

SEQ ID NO: 26740 - protein, 524 aa, synthetic construct
MPKKEALFMPKTEEKQAAKAVIYARYSSDRQREESIEGQLRVCEDYARRNNITILHTYADRAMTGRSDQRPEFQMMIRDAATMAFNVILVYKLNRFARNRYDSAKYKHKLKKYGVKVVSAMENIADDPSGILLESVIEGMAEYYSAELSENVLRGMTQNALEGKWPGGVIPLGYKLDKGGRLIINEEKAPIVRMIYQMFLDGMSVARIERKLNDKKYTTDAGKVFSRSRVYYILHNERYIGTFQWKDIKKEGIIPPIISKEAFHAVQERINAMKSSSYRTNNNYLLAGKAFCASCGAKVSGTSGKSQNGNKYCYYGCSHHHRSARYEYCETKNIRADVLEKLVCDKTHEILSSKKAIKEIARQAVKLRPRDESELEIRAIKNHISSCQKKIDNCIKAIENGVVSNALVESLNENERTLDVLKEKLAKASLMQGSGLLTEEKIQFFFETIREKAKETEKYNDILLTSLVRAVYICNEYVEIQYNYAEQLPILTNPVRIESCSYKCTNGGTIWIRTKDLFDVNEAL

SEQ ID NO: 26741 - protein, 488 aa, synthetic construct
MEKTRAVAYIRVSTERDAQLHSYEFQEHYWQSAFEDDPNTDLIGIYADKGISGHSVQKRPKFLVMMQDAREHKFDKIYTKSVSRFARNTTQLLEAVRELRDLGIEVVFENENIHTFQPTSEIFLTIAATIAENDLEVDSARQRWSIQHRCENGWISVGSGLFGLKLTADNELEIVPEEAAVIRYIYESYVDGGIGSKKIADALNAAGVQSRNGYPWDAKHIIGLLRNEKYKGDVIMGKSVRHFGEYHKNPNAEYAPRYYMEGTHEAIVDRDTWEAAQRILEDRSRNHCRTRIAHSFTGMIECGCCGKNYLHKVNNSQCKWQTDIWACRTYLRDGKKACGNSRIKDTVLKEKFISAYNEFIERRPQGDSMVALQEVLEDLRQQEQELAELMMQRLIPKAAYEEERKSVKMQITDISEKISERRAKRVPESEYVPITEFSEEKAKRFLSKVVVTMFTVTFVFYNGAKITRSYDNGQPGNKVGWNKKKEES

SEQ ID NO: 26742 - protein, 456 aa, synthetic construct
MRNKEIAPALVRVALYIRVSGEEQKIKGLSLEAQQERLEAYARERGWVIVGIYIDAAKTARKNIHKRTEFQRMMDSVKRDEVDILLFARLDRWFRSVADYYKVMEILQAHNCDWKTTDEEYDTTTANGRLYINVKLSIAQNEADIDGERIDVVFDSKIAHGTVVSGSAPFGFRVNEEKRLEVVPEDAAIVQDAFNYFENTVSQRATVRYVRETYGVNWCDATFRRMLKEKLYTGVYDRGGRYNDQFCPAIIDRQQFDRVQVLLTRNVRSAPSGKVYIFTSILTCAECGHKLVGYKSSDYYYYRCNQHFQRGRCSHNHSAREDVVEQWLFEHLGEELERCQLEWGVEAAKKKVSIARTDKAALKRKLTKLKELYVNDLIDIEDYKKDYQIYVSALNQIPEPAQEAPPDFAAVRRLLDNSFRTIYDTLTREEKRTLWRSVIKEIRIDNDQNITGVVFG

SEQ ID NO: 26743 - protein, 518 aa, synthetic construct
MVAIYVRQSLDKKDSLSIESQINDCITLCKRNGWDDYQVYKDKGWSAKNLDRPEFQKMNNDVEAGKIKAVVCYKIDRISRSIRDLVNLIEDYHELGVHFVSFADNINTAAPGGLMMATLFGSLAQMEREAIIARVTDNYYYRCELGYWGGGPAPYGFNLKKIVENGQKHTVLEINEREAAVVKQFFKWYLEPEGTIYEILKKADKAGIRTRKGGAWTSRVVSELLSKPMYAPNSMDIYNFYAAQGVRVRVTPEQCDGKLSLNVFGRRDRGSKHPKRSRPVNEMTLAICKNPPIIDSDTFLKTQFKKKTKLQVSPRTGTAKTTMLSGLVKCALCGRAMSPSGSSRGVRYFTCSGKRNYAAGTCTSKSIKVSALEKIVIDDILRYATNPKVIDMFHAMQGSKLTAEQSHEVNLLQQEAAKLDIEIDNLLDACSAGNTTAIEYLNKRIERIDTRKHEILTRINEIKRDTENVINLFSGIEIENVPYILAHGSIAEKKNVCQFLLSSVLFTNADDVKVYYKM

SEQ ID NO: 26744 - protein, 485 aa, synthetic construct
MPTSDLKIAAAYIRVSTDDQEEYSPDSQVRLIREYARKNGYLLPEEYVFQDDGISAATARKRPAFNRMIALAKEKERPFDAILVLMFSRFARNREESVLYKSLLRKQGISVISVKEPAVDGPFGTLIESIIEWFDEYYLINLSAEVKRGMSEKFLRGEAMGTAPFGYRIDSANKTFTVDPERAEIVCDVFRSYADGAGLRDIAVQLGDAGITTRRGNRPDSRFVEYMLRNPVYIGKIRWTPGHKTRYSRVHIADGVEVVDGKHPPIVSMDLWEAVQRRMDQRKAAYGRYQRQTPAAWMMRGLVRCSACGATLIMAGRSSSCPFLQCHSYAKGACHTSHSLSLRRANAAVLTGLRRSVGTLTFHMVPHLTSAPSRTADYGRLLEQERRRLARCKDAYQAGVDTLEEYRDNKARLEERIRRIEEQAASAAAAPESFDKAAYGKKAADILRFLETSADEGAKNEVLRSVVDHITYEKASRHLAIYFYT

SEQ ID NO: 26745 - protein, 502 aa, synthetic construct
MEIQIREGNSRQKQKLKVCAYCRVSTDADEQENSLENQIRHYKEVITSNPDYEYAGVYSDFAISGFKEKRPGLQKMLADARKGKIDLILTKSVSRFARNTSIVLEATRKLKELNVGVFFELQNINTLSGEGELMLTILAAFAQAESESGSVVAKMVYQRKYEAGIPVQYLERSFGFKKDERGVYIADEEEAVWVRKIYDMAAQGYTLAAIKRYLNENNVKTVGGAKWLDSTVLRILENEIYKGDYIMHKYFVNEERKLVRNRGEVDAWYIEDDHEAIVSPKLWQRAQDALEAKRDYLAEGSVIEEFTEENYPYMNRIYCARCGHPLYKRIYSNGNRLNWGCSGTKRYGKSFCEGINIPDGVLRGAWHFDENMYIGEKQTDKGKKEFTYLKEASWKRRHKKKEPEPIPENTETEYPYREKIFCGLCGSRLVRHVNTKNHKVIWVCNGRKRKGKDFCDGTRVPDTIIKGWGEIKKDIYIQRKDDKNGKKRYSYTSKKPKGADRA

SEQ ID NO: 26746 - protein, 464 aa, synthetic construct
MARSVTVIPARSQKVRTGHKAVQEKKIRVAAYCRVSTDQEDQLHSFEAQVEYYTKYINEHENYEMAGIYADEGISGTNTKKREQFKKMIADCEGGKIDLVITKSISRFARNTQDCLAYSRKLKNLGIGIIFEKENINTLDSTGELLFTILSSLAQDESRNISENCKWGIRTKFKNGEMHLNTFKFLGYDKDENGKLVINKEQAKTVRRIYRDFLIGINPAQIAKELTEEKVPGCLGQTKWYPSTVIGILKQEKHMGDALLQKTYTADFLTKRQVRNNGEIAQVYVKDSHKGIIDKQTWNAVQEEFDRREKFMESHGTDRYSYGADCMPFCEKVFCGECKSLFTRHSWRSRGIVQWQCKNHRKDGKVACTNAYVDNADLEKGFVKAFNRLVMDRDKHMERWQQMKSDGTPLEKIRAGQMMEAVGNEPLTRFVPEIAQLVLCEVTVLGAKKYEFFFLEGSRVKVSV

SEQ ID NO: 26747 - protein, 492 aa, synthetic construct
MAAIDFNNVVDLYIRVSTSEQAEEGYSVAEQEERLRSYCAAFNYIINAIHIDPGFSGASLDRPGIKKVMYDVEHGRCKKVIVWKLDRLSRSQKDTLILLEDVFLANDCNFISLMESFDTSTPFGRCIVGILAAFAQMERENIKIRTMMGRQARIRDGHFHGSRCPLGYKFQYAPDGTLLSNDLVVDPYTSKLVQEVFRLFLSGSSLSSISAHMASTHGCSMYDWSNSTAIRRILSNPIYMGKVRVGNELYPGIHEPLVSETDWYMVAAMLKHNKEQQKRTYAYQISGGAYADNLLTGLLFCGDCGARMYARRVSQNKKKYICHSVAKTSPAMIRSDHCTNRLHPFTVHQLDEMVINEILKLSLDRPGFDMLCDQPDESSKSEDKEIYEERLAEVNRQLDRLVKLYQTGLIDLDNISARLGDLNQEKNFLEGNLATINEVTPAEIRETAWKSIQSLQSVLNNGDMDEVHRIIHTLIDKVVVLNTDVTIYWSFC

SEQ ID NO: 26748 - protein, 513 aa, synthetic construct
MYLVAYARYSSDNQREESITAQLRAIHNWADANGHIIVKEYIDEALSARTDKRPNFLKMIEDSKVENWNGVVVHKLDRFSRNRYNSAVYKKELKDNGKKLFSVLEKLDDSPESIIMESMLEGLSEYYSANLAREVKKGLNENALDCKHNGGTPPLGYSVLNSHYVINEQEAVIIKLIFDMYRTNHSYVEICSELNLRGYKTKRNKNFSKNSIHDILVNEKYIGNYTFGYGNRAKKRGQPNPDMIKIEGGMPAIIDKNVFFEVQEKMKGRKHMGGTYKAKQVYILSGILKCGICGEKYVGAKKNKFWSAYECSGHKKGVCDNKAIKKEEIEKIVVDELKTKLKKLFNNTELLEKVNSTYKDLYDNAENNLKVEEEKLINVKAQINNINKAVMDGFYSPEMKDQMNSLQTKKELIEHSIYLIKNISKKDEITSNDLNKIINTDLLKLESDNLEDIKEIVQKYVKEVLITPENINIKIVLDDTNITGDRDVCNSPPPKFEKRTAIILNLAVLFFFI

SEQ ID NO: 26749 - protein, 466 aa, synthetic construct
MTPYNVLNKNKILRAGLFERVSTEEQSKFGYSIATQIEALEEHAEKHRMKIVDHYCDAGVSAGISYKKRPEMMRLLQDVENGKIDIIIFTRLDRWFRNITEYFKVQEILEKHNVEWRAIWEDYDTTTANGRMAITIFLAIAQNEREKTSERIQVVFENKRKNKESFFGKSSTPFGYTEQRDENGIMRLVKDPELEPALQMFWDIAVKYENVNKAAKMVNLEYGIKKNKNKWMELSKKEIYTGDYRGVEGYCPAYVSKEDWLKLQNRKIIKQTKSDRVYLFTGLIECPECGHNLASTYCVHKQPDGSKREYHNYRCQFKEAYVCKYNHTFSELKIEKWLLKNIRNLMHDEIARVEIEKTKPRPKPKTNVSALKEQLRRLEVVYMTGNKPDEEYIKEQRELNNAIKKAESENPKTDADKDLTMLHEILSTDFESVYKTLSAEDRRRFWRGIIRRIYLDGNKISHVDFN

SEQ ID NO: 26750 - protein, 616 aa, synthetic construct
MSTGTELRAVFYARVSTEEEKQLNALEKQIQENKDVIRDHGWRLVGEYIDEGKTGTTTKRRNDYKRLLKDMTENKFDIVVCKDQDRLQRNTLDWYLFVDNLVTNNLKLFMYLDNKFFKPSEDALITGVKAIIAEEYSRNLSKKLNNSNKRRIERALNGEEVSAMGNGKSLAFKIVNGKWVKDEEEAKLGKKIFELYLEYDSIRKVRDWVNEHGYTNSVGKPFTSESISRILKNEKAKGVIVMGKYHHDFDKKKIVRRSEEELVRIPAPELAYVSEEVFDKVQERLRAKTGNGRGVNAYSDPLSGKIYCGSCGRKLWKHASNGYVNWMCASQVAKGDVECNGTRITTVAIRNIYKKITDNLEVNKGVVKQDIVKWLNELKATLSDTSVNEKIQKDLDKLERKRTKLLEAYLEDFISKDDYKVKYEAIEGQIEEKKKLLVPVEENEDIKVIESVLQNIDDEIDAYVKTLDMEESKVDFLIEHTKRITVLENRDIIIELDLVAGAIIAGKDFLLYVHDTMPFHHGAVRFPAPCQRTAPHRSVPHRLPCHKHGGDRQPATPRYCPQAARGRHSGAAAPRYADHLAGLSGGRLYYRHGRMEYEKSPSHAEGRPGRQGVQAA

SEQ ID NO: 26751 - protein, 455 aa, synthetic construct
MKTVACYCRVSTEEQVKYGFSIQAQKDALIKYCKENDYKYDFYIDEGISASSMKKRKALQEMLEKSTVYDMILFTKLDRLSRNVLDANNINKILQDNNCTMKAIDEDDVDTSTADGMFMFNLKVSLAQREIGKTSERIKFVFKNKREKGEVTSGTTKYGYKIKDKKFVVDPYEAENIRNLYKYFISVNGDHKKTYSYFVKHFPGKGQDALFNYLRETAYIGKYKLYRKNVYIDNYIPAIMNQELFNNVQNLLPRVEKVFTKENVPTIFAGMLYCYYCKSRLVRKIDYRSKNKNVNYYCDKQYKYKVGINEKQCQNSRVISDKSVEEYLINNLKDLCKQYISKSRIKTKPKPQKNNIKINSLKNKLSKLKDLYLDDLISKEDYKQDYIRINKEILKLEEEQKEEPQKDFTYLNELINKDIPDIYNTFNIEEKRKFWLKIIDKIYIKEGKIKEVTFL

SEQ ID NO: 26752 - protein, 520 aa, synthetic construct
MNVAIYARKSKATKKGESISNQIELCKKYFLNTTNEDVNFLIYEDEGWSGGNINRPQFTKMINDAKLNRFSTLICYRLDRIARNVADFSSTYKILEENNIAFISITEQFDTSTIMGRAMINISATFAQIERETIAERIKDNMLELSRTGRWLGGISPLGFKSVQITENNKKLYKLEVVNDELEIVKLIFNLYPQYKSTVPVARYLVSNHIKGKNGGDFSKNTVLQILKNPVYCCSDTEAIKYFKGKDSTLNCIDNKELGLMVYNKKKSGKKENPIDEWVVATGKHQGIIPGAEWVNCQKILEEISRKASPRKATGNKFLLSGMLKCARCGSSMCSWSRTSRGIYYRSYRCELKNRAATRCDSKMVNADDLESFVIELCKNINLEEIINIKKTKNNNSTLKRELTSLNKTLVENDKLLQGLVKKLALIDDIDILTIIQAEIKKIKSENENINKRINEINLSMFDSEDEYKNQQILLESHKLFKDTIDLVKDVEAKRNLIMSFIEYFTYDSQTNEIGYKLRL

SEQ ID NO: 26753 - protein, 512 aa, synthetic construct
MNAVIYARYSSHNQTEQSIEGQLRDCYEYAKRNDLAIIGEYIDRAISGKTDERPDFQRMIKDASKRQFERILVWKLDRFARNRYDSATYKHKLKQYGVKVISAMENVGEGDESVLLEALLEASAEYYSLDLKKKIARGMRESALRGKFVGGTLPWWCRVDDEQKLTVIDERAAIVREAFMRYDSGEGSKSIVSDFAKRGLRSNRGVPVTLSWLLSILKNRKTIGEYTYNGIEIPGGLPAVVDKPLFDRVQDRIARNRRTGGGEARAKTEYLLQGKLFCGLCGSPITAECGQNHKGVVYNYYACSLKKKKHQCKKANERKDFLEWYVVEQTLDYVLTPARTEYIASAIVAEYEREFDKSGIRVLEQKIALTEGEIQKTMDLCIQATTDAMRDRFMKRCEELDAKKADMEIDLSKLRVAASIVYTKDEVCAWLRQFCTGDCFDPAFRRRIIDVFINTVYLYDEKLIIYYNLRDSRQVSYIEAIGASSEIENLLPVPDNKKSAAECSTADGDGGA

SEQ ID NO: 26754 - protein, 544 aa, synthetic construct
MSMENCANTKPKITIIPAKTRVERLDPMSVAMGQKPKIRVAAYARVSTDHEEQESSYEAQVDHFTKLIASHDDWTMVDIYADPGLSGKNTKRVQFKRMIKDCEDGKIDLIITKSVSRFARNTLDCVQTARKLKADGIGIIFEKENLDTLQERSEFVLTIMASLAEEESRSISNNIRWSVKKKFQEGKVILNTKHFLGYTRDKKGTVLKIVPEEAITVRRIYAEFLDGKSLKEIAEGLERDGIASPSGRETWHPSTVKSILQNEKYKGDCHLQKTYLPDFLSPRRIKNEGFAQSWYVEDSHAAIISKETFDMVQQEFQNRQSLRSTGETGCGKFSGKYPFSGMIVCSECGETYRRHQQYNKYKKYYIWVCKRHENNGAEYCKSRPIKEETLEKAFVRALNELIGDKEQILEKLQSATVSEITDSCASAMNEVNVEIEKLQEQMMELLMKRNNGEVTDKEYEQQSQQVGMKIDQLLMRKEEILSEQGKVQLASYRIEEVTKLLQTGKILEEFDRVMFKSLVRKITVLSNKEIEIEFECGITVRETL

SEQ ID NO: 26755 - protein, 492 aa, synthetic construct
MNIQEIPTKKVEKPRVCAYVRVSTDSDAQEDSFAFQSNYWQRRFESDESVEYIGLFSDEGIGGAFMKKRDGLKRMFQKVRNGEIDRIYTKSVSRFARNKVELMEVVREFRDIGVEIIFESENIHTLDPKCGLILTVMASLAEEELLSMSQNQKWAARKRFANGSVELARILGYDMVDGKLVINEKEAVIVRRIFELYLQGNSFRTICHILENEGYTPMHGGRWSKSTITGMLRNEKYCGDSIMQKSYSTMKVQKYNYGELPKYYVQDNHEPIVSREDYQKAQEMMVARSNKYRPMGSPTALYPLSGKLICGECGTSFKRKTSAHGTPYMCIKWTCRKKDVYGVKECTSHDIKDEVVTRLLIEAYNESLDANNDVNGITEQEEVLRKLIANEQELRQLRAKGYISESKCREETDKILIKIKEQETLIKNLQTRDMVKGKYKKSDKLTEQMAEFLVKATVKDWKITFEFQNGYKTTKEYTNGRAGNVNGKLCKH

SEQ ID NO: 26756 - protein, 498 aa, synthetic construct
MEIQIMEGSREQKRKLKVCAYCRVSTDADEQENSLENQVRHYETVIKANPDYEYAGVYSDFAISGFKEKRPGLQKMLADAEKGKIDLILTKSVSRFARNTSIVLEATRKLKELNVGVFFELQNINTLSGEGELMLTILAAFAQAESESGSVGAKMVYQRKYEAGIPVQYLERSFGFKKDERGVYIADEEEAVWVRKIYEMAADGYTPAAIKRYLNENGVKTVGGTKWIDSTVFRLIENEIYKGDYIMHKHFVNEERKLVRNRGEVDAWYIEDDHEAIVSPELWQKAQDAIEAKRDYLAEGSVIEEFTEDNYPYMNRIFCAKCGHPLYKRIYSNGNRLNWGCSGTKRYGKSFCEGINIPDGVLRKAWHFDGNMYIDEKPSVKGTKEFTYLKESSWKRRHKKKVPEAIPENTEEAYPYRKKIFCGRCGSRLVRHVNPKSHKVIWICNGAKRKGVAFCRGTRIPDSVIRGWGEIKKDIYIQRKDDKNGKKRYSYTSKKPTA

SEQ ID NO: 26757 - protein, 464 aa, synthetic construct
MARSVTVIPARNRQRETGHRAVQEKKIRVAAYCRVSTDQEDQLHSFEAQVDYYTKYINDHENYEMAGIYADEGISGTNTKKREQFKRMIADCEGGKIDLVITKSISRFARNTQDCLAYSRKLKNLGIGIIFEKENINTLDSTGELLFTILSSLAQDESRNISENCKWGIRTKFKNGEMHLNTFKFLGYDKDENGKLVINKEQAKTVRRIYRDFLIGINPAQIAKELTEEKVPGCNGQTKWYPSTIVGILKQEKHMGDALLQKTYTADFLTKRQVKNNGEIAQVYVKDSHKGIIDKETWNAVQEEFERRERFMKDHGTDRYSYGADCIPFCEKVFCGECKSLFTRHSWKSRGIVQWQCKNHRTDGRVTCSNAYVDNSDLEKGFVKAFNKLVADREKFMERWNQMKTDGSSLEKIRAEQMMEATGNDPLGRFVPEIAQLVLAEVTVLGAKKYEFFFLEGSRIKVSV

SEQ ID NO: 26758 - protein, 522 aa, synthetic construct
MKRVYCLYRVSTKGQVDKDDIPMQKTSCREFAERNGWTILKEFQEKGVSGFKVSASNRDAIQDLKAAAEKKEFDVLLVFMFDRIGRIDDETPFVVEWFIKHGIEIWSVNEGEQRMDNHVDKLMNYIRFWQANGESQKTSARVKTRLNQMTLDGKFTGGVAPFGYKLIKSGEINKKGKELMDIVIDDDEAPIVKKIFEMTVKEGYGSYRMADYLNSHGIRTHNNSKFQCNTVNRILKNRLYCGYLVSGGVESPYIERLHIIDENIFDQAQFILKQRSSKNEEKQQIARTTKGSTLLSGNIYCAHCGQKMVSTSYIDRYDRADGSQYRVSRQRYICTNKAMKRGACDGQSAYVAHRIDGAVLATLRDYLAKIKSTPKDIALEKRYKSEISEYRRKQTKLEKEIEKLKRQVVELSAEIGRSLLGESRFTPDILSTSIDNTNDLLHKKEIELSDIKYKLANQQNAMGRLDFYYSQFRTWADEFDNSTMEQKKMISCQLIREVKVARGYEIEIVFDLNYEQFLNTSK

SEQ ID NO: 26759 - protein, 529 aa, synthetic construct
MAKVTIIPSTINPITKLPNNGLQKRKVAGYARVSTILDEQCSSYQAQVDYYTNLIKRNPEWEFVEVYADEGISGTNTKRRGGFNQMMQDALDGKIDLILTKSVSRFARNTVDSLTFIRKLKEKGVEVFFEKENIYTFDSKGELLITIMASLAQEESRSISENVTWGKRKAFSDGKVSMPYKHFLGYKKGEDGRPTIDEKESLIVKEIYSLFLKCGYSTTKIAKEFNERGICTPSGKGKWTLTTVESILSNEKYKGDALLQKKYVVDFLTHRSKPNEGEIPQYYVENSHPAIIDKVEWDLVQIELERRKKLCKTYSSKNIFASKLVCEDCDSFFGRKIWHSNDEYKAIVYQCNGKFKNKDKRCNTPTLREEEIKSMFLEAYNKFVLDKTALEGDCKLMIETIADVSLLDEQISKQIEKLEELAKKVKELVSSNASTPELQIDYINDYDKLCTMHSIEETRYKLLLKEKSGRLAKAKSMELFIESIKDKPDVIDSWNSDLWILLVDKAIVHHDKSITFVFKNMKEITIAAK

SEQ ID NO: 26760 - protein, 436 aa, synthetic construct
MQITKILATKKLEKKKLVCAYARVSSDKDAMLHSLSAQVQYYKDYITSNNDWLFVKVYYDEGISGTKQDRPAFQQMLQDAKDGKIDLIITKSISRFARNTVTLLEAVRELKSYDVDVYFEEQRIHSISSDGELMLTILASYAQEEARSVSENMKWRVKRNFEEGKPWGRAPYGYTIENSKFVIVPKEAEAVKLIFKLYLDGIGSYRIKDIMNKSEYPTRNNCLWTETTIRGMLKNYIYTGNAVFQTTYVKNYITKKKAKNNGEKPMYHVEECHDAIISIEDYNKVQKIIKERNEKIHKSITPKDNPFKGKLRCAHCGCTFRMKKNYKKYVWRCGTYIRLGSKGCLSKQIPNDALQSLSKEILGVDELTSEIIDERIEKIIVGDDRLLTFYLKDGSKIDAHWMQKSRSESWTEEMKENARRKAVEIHGKSNNNPIND

SEQ ID NO: 26761 - protein, 582 aa, synthetic construct
MSDVQVIKANRNENRIRGRKVEILRVAAYCRVSTDSEDQLNSYKSQVMYYTDLIKKKPEWSLADIYADEAITGTQVTKRENFQRMINDCMNGEIDMVITKSISRFARNTLDTLKYVRMLKEKGIAVFFEDENINTLTMDGELLLVVLSSVAQQEVENISSNVKKGLKMKMQRGELVGFQGCLGYDYNKETKSISVNEKEAEIVRYIFNRYIEGAGCTVIANELENLGYKTKYGSSRWVQSTVIGIIKNEKYKGDLLLGKTFTVDPISKRRLENFGEEDKFYIRDHHQPIISEEIFEEAQKILAKRNVNRGVHQEGQKRNKFSRKYAFSCMIKCGFCGGTLTRRNWHSSSVYTKTIWQCVTATKNGKKHCPYCKGIPEEVIENAFVKSYQLLCSDQQEVVNEFLQKVEDVLEDDACKKRAPKIEKEMADLRRRKEKLLDLRLDNNIDREIYEKKNQKLSEQLEKLQNEQSQLTELNKNRESTKTRLREFRKKLSSGEILESFDRVVFESVIEKIIIGGYNEEGVEEPLKITFVYKTGIHSNFNAKDFKPKRRNAAAVHSGAELYSYTSDEGNKLYLYGSSDTH

SEQ ID NO: 26762 - protein, 521 aa, synthetic construct
MGNVMIIPAKRQVGNTSRRQEDKPKLRVAAYCRVSTDSDEQASSYETQVEHYTEYIKKNPEWEFAGIYADDGISGTNTKKREEFNRMIEACKAGEIDMIITKSISRFARNTLDCLKYIRMLKDKNIPVFFEKESINTMDAKGEVLLTIMASLAQQESQSLSQNVKMGLQFRYQNGQVQVNHNHFLGYTKDREGNLVIDPEQAEVVKRIYREYLEGSSMDKIAKGLEKDGILTGAGKKKWWTSTINKILRNEKYIGDALLQKTYTTDFLNKTRVKNNGIVPQYYVENNHEAIIPKDIFLRVQEELVRRRVVKTSANGKKRSYSCNHCFAQLVICGECGEMFRRIHWNNRGCKSIVWRCLSRLEATGMECHARTVNETVLENVVVQAINTLLGDKSTYQAQLQQNIAKVIREAQKNTADGIDEQLLELQKELLKKANNKESYDEIAQQIFKLREQRQQCTVDTATRDAQIARITELQDFIKQQRTDLAEFDETLVKRWLKQITVWEDHFTVELKSGLKIDIEG

SEQ ID NO: 26763 - protein, 519 aa, synthetic construct
MKKVTKIDKIQPAKNAEDKLRVAAYCRVSTATDAQLESLEAQKSHYENYINSRDDWCFAGVYYDEGITGTKASKRPELMRLLADCKAKKIDFVITKSISRFSRNTMDCLEIVRTLLNLNIPVYFEKENINTGSMESELFLSVLSTMAEGESASISSNNRWSIKKRFENGTYRLSSAPYGYKLESGGLQVVSEQADIVKQIFRELLSGKGMYSIAKKLNAEQVPTQKGGRWTSTSVHNILTNEKYTGDCIFQKTYADSNFNRHTNNGELNRYLIQNHHEAIISHEDFKAATALIKQRAAEKGIESGSDKYQQRYAFSEKLICGECGNTFRRRIHKGKYNSYVAWVCNTHLSDTNRCSMLFVRDDALKLAFATMLNKLIFSYRLLLKPYLAVMQSNTADEALLRIQYLENQLDQNAEQRSTLHKLMAQGYIDQILYTQESNELLLQARDFRSEIEVLNNTVAGDTTKVYETERLINYCKRGKMLTDFNESLFELFVDHILIYSRQKIGFVLRCGLTFEEMI

SEQ ID NO: 26764 - protein, 609 aa, synthetic construct
MYEINRVPKRVVIYARVSTEHEAQINALENQLDWYKPILEMHKEWQVVNWYVDKGITGTSAEKRPQFMQMIFDAKCGKFDMIITREVSRFARNTVDTLNYTRLLKTHKVDVYFINDNIKTSDGDGEFRLTIMASLSQDESRKTSVRVKAGQQTSMDNGVFYGSGNILGYMRKETIDDNNKKHVDFLVEPKQAETVKMIFGMYLDGHGLMQIKNELERQGRLTAMGKTNWHCTVISHVLKNSFYCGIITYHKEYVPDFLVQKKVKNYGEIELTQVKGRHEPIITVEQYERVQAIMKSKTKEPKITPNGRNCTGKTLPKDIWGRLLVCSCGHGVNRVHWSGSGKTMKIAYRCRSVTQNGTPENRKKKGLPYEGYCNSPMVPRWKLEMMAMYIFREFLNNRDEVLALATSMLESHIDDVPESDSMTRYALESKQAELDKMQKRIDRLMDMRMDGEITADVFMKQSTETQMKIDSLKDEIEALMPKKEDTVTNYSEKMEMLRFALSQYNAPEYFENGIPESVIDAYVEKIVVFEDHFEWYLRFGGNDPLKCRVNGKKDANPEVIFGDSPSSLTELEKHRLLLLRCNSVIFVLILYSVIFWAVPFWDSPFALLK

SEQ ID NO: 26765 - protein, 591 aa, synthetic construct
MAKITRVEQAVPTIKTKKKVAAYARISMESERMNHSLSAQISYYSSLIQKNPDWQYAGVFADDGISGTGIAKRDEFKRMIEAADNGEIDIILTKSIQRFARNTVDLLETVRHLKDIGVEVRFEKEHINSMSGDGELMLTILASFAQEESRSLSENCKWGIRKRFEKGIPNGHFRVYGYRWEGDELVIVPEEAEVVRRIFQNFLDGKSRLETEREFATEGITTREGCRWVDSNIKVVLTNVTYTGNLLLQKEFISDPISKQRKKNKGQLPQYYVEDTHPAIIDKATFDYVQEEIARRKELGPRANKSLNLTCFSGMLKCPHCGQSYMHNKRTDRGFMEFWVCGSRKKKGGRCPVGGSINHENLKKACAAVLGLDEFDEDAFHDRVNFINVPERGMLEFHLKNGEVITKDCPNTGHKDCWTAEYRAKTSEKRRKRPNCKGSSVMTGKIKCVGCGCNFRRATQPSSTSESGKAYYWRCAERDGCETVGLREDVLKPFIAETLGIAEYDDGEFEKRIDHIDVLSATEMVFHFKDGRTVSRTWEQPKRVGRPWTDEQRAKFKESIKGRYTPEVRQQMSEHMKQLRKERGKAWRKEK

SEQ ID NO: 26766 - protein, 569 aa, synthetic construct
MAKKKKPAGGNAIIYARYSSHNQRDVSIEQQIEACRKHAAELGLTITDTYEDRAISGRTDNRPAFQRMMRDAEDGKFQYVLAWKSNRMGRNMMQAMVNESRLMDCGVKVFYAEEDFDDSAAGRFALRSMMNVNQFYSDNLAEDVRRGLMDNASKCMANGRQPLGYKRGEGGKVVVDEPAAAIVREIYTRIASGEMFMDIARDLNRRGIKTQSGSEWNKSSFKVLCRNERYRGIYIYGDTRIEGGIPPIVDDVLWYKVQEVLKVKKSKNRHHCPSDEDYLLTGKLRCGKCGGYMIGMSGRSKTGDVHHYYACQNRRVGHTCDKKNIRRDVVEPAVAQAIKQYCLTDDAIEWITDQTIAYWEDEDRKLQIDSIENDLSAVQSSISNVMKAIEMGVITETTRDRLIELERQQTDLKSKLALAKEEIVHVDRKDLISSLLAFRHGNVHDRAYQEKLFNAFLIAVYVYDDDHLKLVFNSFGKDDTVNIALDLGENDDNSGLSDVSKSSPILSNGQPEQSHLRKLRWLFCLYHSELQPQGRDSSKLEESQLYYYFGFLKSDEKEAYLCLKAHSSR

SEQ ID NO: 26767 - protein, 521 aa, synthetic construct
MKGVIYARYSPGPNQTDQSIEGQLRECKQFAEENNITIVNTYADKKQTGRNDNRVQFQKMLQDSKKKQFDYVIVWKIDRFGRNREEIAKNKAILRMSGVKVLFAKEHIPDGPEGIILESVLEGLAEYYSANLSQNIIRGMRESAMKCKCNGSGLPLGYNVDKEHNYIRNDEEATLIKMIFKMYDDGSKINDICKYLNAHNYKTKRNSKFTHTGVSRILHNRQYIGEYRWKDIITPNGMPRIIDDELFERVAKRLERTKRAPSASRGDVKFLLTGKLFCGYCKSTMIGDSGTGKSGRKFYYYNCRIKKNKHTCKKKTVRKDWLEYEVARITANIVLQDKIIDYVSDKVVEIQKKEHEDKSNLNYYTVKLKETNSAIKNIMKVIESGIFTESMRERLLKLEDERSTYETEIAKEEIMRPTITKEQVVFFLKQFKNGNIEDKDYQAKLIDIFVNKVILYDDKIIITYNYSGEHNETSAKIIEEAAEELINEQEKCSDKLLSSPPNRYWTNTYFFSGGFAVKVML

SEQ ID NO: 26768 - protein, 521 aa, synthetic construct
MARITKIEVARDFTEKKKTRVAAYARVSTKSDEQLLSLETQKEHYDNFISSNPEWEYAGLYYDEGISGTKVEKRDGLLALLKDCEDGKIDRVITKSISRFSRNTADCLEMVRRLAKLNIYLYFEKENIDTEHMSSELMLSILSSIAESESRSISQNSKWSVKYRYEEGTFIIGYPPYGYENKDGKMVIVPDEAEIVRDIFTMTINGMGTYVIAKELNRRGIPSKKGGKWCSTSVRGILQNEKYTGDVIFQKTYTDDNFNRHHNYGEKNMYLCKNHHEPIVSHEIFDKAAAVMEQRGKEKSIETGIGKYQHLYAFSGKIICGECGAKFKRRQHYKPSGKYVSWTCNTHITDKNACSMMFIRDEDIKLAFLRMIRKLQTAQTQVLKPFISDLKGTNNRGRLHQILDLEEQIEQNAEQIMVLTNLMASGYIAPEIFHAEKNRLTLEADRLAKEKEVLSKSISGDLTHLYEAQKLMRFVSKKTEIKAFEDTLFLEYVDTITARSRDEITFNLKCGLNLTERLVRA

SEQ ID NO: 26769 - protein, 525 aa, synthetic construct
METTRTVTMIPARRRVGNTVREEERPKLRVAAYCRVSTDSDEQATSYETQVEHYTSYIKKNPEWEFAGIFSDDGISGTYTKKREGFNKMIDECMDGKIDMIITKSISRFARNTLDCLKFIRQLKEKNIPVFFEKENINTMDAKGEVLLTIMASLAQQESQSLSQNVKLGLQYRYQNGQMSINHNRFLGFTKDEDGHLIVEPTEAEVVKRIYREYLEGASLQQIGKGLEADGILTGAGKKKWRPETLHKILKNEKYIGDALLQKTYTVDFLNKKRVKNKGIVPQYYVENSHEAIIPREIFMRVQEEMVRRSNLHSGENRKKRVYSSKYALSSIVCCSKCGDIYRRIAWNNRGKHSTVWRCCTRVDFGPDKCDAPTISEAELQDAAVKAINKALGGREDMIKGLQENIEKILSESTDNAVREIDSRLLELQKELLKKANARQNYDDLADEIEALREQKHGVMVESAEREGIKKRVAEMQQFLAEQKSEITEYDERLVRQLLEKITVHEDRFEVLFKSQTTVEIKRIF

SEQ ID NO: 26770 - protein, 550 aa, synthetic construct
MADGQQWLSAVFFSLYAKKRKVKGNLRKHLLLLAFRVIYRLPKRKEVRLVEIQIREGSREQKRKLKVCAYCRVSTDADEQENSLENQIRHYETVIKANPDYEYAGVYSDFAISGFKEKRPGLQKMLADAEKGKIDLILTKSVSRFARNTSIVLEATRKLKELNVGVFFELQNINTLSGEGELMLTILAAFAQAESESGSAGAKMVYQRKYEAGIPVQYLERSFGYTKDERGVFVADEAESVWVRKIYEMAADGYTPASIKRYLNENGVKTVGGVQWVDSTVFRLLENEIYKGDYIMHKHFVNEERKLVRNRGEVDAWYIEDDHEAIVSPELWQKAQDALAVKRDYLAEGSVIEEFTEENYPYMNKIYCAKCGYPLYKRIYSKGNRLNWGCSGTKRYGKSFCDGINIPDGVLRSAWHFEENTYIDEKASDKGVKEFTYLKERSWKRRHKKKQPSAIPENTETEYPYREKIFCALCGSRLVRYVNPQNHKVTWVCNRRKRKGKEACDGTRVPDTVIKGWGEIKNDIYIQRKDDKNGKKRYSYTSKKPSGIRV

SEQ ID NO: 26771 - protein, 626 aa, synthetic construct
MLKNKITPLYERLSRDDELNGESNSISNQKQMLEDYARRNGFPNPTHFTDDGISGTRFDRPGFTAMMEEVEAGRVEAIIIKDMSRLGRDYLKVGQIMEILRIKGVRLIAINDGVDSINGDDDFTPFRNIMNEYYARDTSKKIKSVFKAKGMSGKHLTGTVIYGYLWDEKRENWIVDEEAAAVVRQIFRWTMEGFGPYQISQLLKQQKVEIPSVHLARYGEGVNKNKTVKDIYGWGSSAVVQVLKKREYLGHTVNFKTRKHFKDKKSHYVDESEWTIFENTHEAIIDQETFDNVQRIRANVKRYPDGWGEAAPLTGLLYCADCGAKMYVHRTNNGKRISQYTCSNYSKTPVGVLCPTQHRINESAVLTLVSDMLRAIADYSKNNRTEFVRTVQETQAAQQASDISKKKKRLAAAQKRAGELEKLICKIYEDNVLGKLPDARYAALDAQYAKEQSELDTEIAQLEKAVSSYEQTRKSAEKFIALIDKYENFDNLTTAMLNEFVEKILVHERDRKGSIETTQEIEIYFNFVGKYMPPHFGEVNLSPEELEALRKKEERKDRLHQNYLKRKASGAQKRYEDKIREKKKAEMDAKKAALRAEDMAKGVFIPVSQLPKQEPKKAPAQTRAAV

SEQ ID NO: 26772 - protein, 523 aa, synthetic construct
MRFFSYGRKSVFSDKSDSIDNQFRMNREYCESKFSGQVDSWQQFSDEDFTGANTSRPDLQRMLSFIKGGFCDVLVVYQLDRLSRDVRDFANIYALLEEHGVMFISIKENIDTTTPIGRAMMYVTVVFAQMERETIAARVTDNMLGLAKKGYWTGGNPPVGYVRKHIVVNGKKHCSIEVDPDGARYVTQIFDTFLAYNCSLQGMETRFKNQGIRTQSGKFFSTTQLHKMLTMPYCVEATPEVYDFYAAKGCIMDPGSPREMWDGSVGVIIYGRSTEKNKKHQAQPPEKWTVCLGKHKPFMPAEKWLAVQSRFTQNKCIKDAKWPVPLLKGVLRCKCGNLMQVSRKKKVDGTCSSWYYCRKRMRQGVDACDMGQIKCDLLDEKVLELFRGITADPALIQKFVKAEAPADVPDLKAAQARVSACERKIGRLAASLALAEDSAASKYIIAEMERLDVELGALKREASLAEMESHQAAASAKDAKATAAEIAKLIHGLEGFDDKEKNAIARAVIQECTWDGERLFITL

SEQ ID NO: 26773 - protein, 492 aa, synthetic construct
MSDIAVIYARVSSKEQETGGYSLPAQLDFLKEYAKSKGLEVVKVFTESMTAKEAGRIEFNNMLKFAKKQRYGCHVIVEKNDRLLRNEDDEALIINLTVRQGLIDLHLVKDHLILNRYSTPHEIFMFHMMCGMSSMYPRNLSGEIKKGLDKKADLGDYPAKAPIGYKNVRSSKKRSTIEIDPTNAGYVSKIFELYATGMYSYKTLAERISLDGFYPKNKPCSPKLVEKIIINPFYMGEFEFNGKRYHEANHTPIITKELFYTCKKIRERHDNPRKITHDFLYSGLITCSHCGCQLTAEIKKGKYIYYHCTGNKGGTCKRNKYLKEEYIDEHIRTLLEKIQPSKEDAKAIVEKFKEIVNANFDYDKKSIEEIGKKISLLKNRLNKLYIDRLDGMITDEFYREKKNEFQGELDELELKHDNFLAETDTLVDMATQIIELCKNAYNHYLRSDNENKRLLLKILCSNFLYDGSNLVIKLKSTVEPMLLGANFNNGGG

SEQ ID NO: 26774 - protein, 581 aa, synthetic construct
MPEKIINCAIYTRKSTEEGLEQDFNSLDNQYEFCTNYLKSLNDPALQLLPARYDDGGYSGGSLNRPALQRLLADIQCGLVNRVIIYKIDRLTREIRDFFKLLDVFEKYNVEFVSVKENQYYNTTTAIGRLMVNMFLVFAQFERENAGDRIRDKIATSKAKGMWMGGCPPYGYDIGDRCLVINETEAQNVRFIYQTFCNTHSLADTTDALNSGGIRTKRYTTRQGRTFGGRKFSVKTVQRILQNPLYKGMVTHRDKQYPGQHAAIIDAAQFDLVQAVFAAHKEKRETRRPKMPSSGGERETAALTGLIFCGCCGSAMTPSYCCKGDIRYHYYRCYRRASKLEDKCPINQIRTSEIDRVVMEQVLAILKSRDFFVQYISHHHEFDVSTAFALFNSLDDVWNSLFETEKRRILRELLAKVTIYKDKIVLDVKKAGLAGVFAELSQNNRLAEVEYKENETFQISVAYRATRLANGAKIIVPATAKEESRFNGSLRLARQIAKGFAWRKMIESGLSLQELTASAKTNERDIRFAMRLSMIDPAIVESVLSGKSPEFLTYAFMKKHPIPLLWSDQRKLYGFEERKQQ

SEQ ID NO: 26775 - protein, 514 aa, synthetic construct
MQMEYAMYLRKSRADLEAEAHGEGDTLARHEHILMELAKSRALPIGAIYREIVSGERIANRPVMQQLLSEVEDGRWKGVLVTETSRLARGDTIDQGIVAQAFKFSGTLIVTPAKTYDPTQEADEEWMEFGLFMSRQEYRMIRRRQLAGTRASKKEGHYVPGRPPYGYERYKLDGRGWSLRPVEPQAGVIRTIYDMYLSGKGFSEIANELNAMKIRTPLDKKWVPATTRAILQNPHYAGFIPSAMKVNTKIVQKGKLITKRPVNKNCELYEGIHEAIIPRDVWYSVQQRMKDTVTPRVPRKYQQMNPLAGLVYCDQCGKLMSRHPYRREDKVRFGCENPSCSTVSSLFEDVESLVLQSLREFLHKIELSSPALLDTKSEEIALQNIEKQLTDINRRLQRTYELLEDGVYSKETFLQRQSAISQDQTALLNTKHEIERKLHNKQTDIEAQKNSAPLIRHVLDVYPTLEDPKEQNLLLKQVIRRIDYHKTVRVYGKAKSDLHLTIHPKIAIPQTSNI

SEQ ID NO: 26776 - protein, 499 aa, synthetic construct
MNVVLYMRYSSDRQTEQSIEGQKRVCMDFCERQGYNVVGEYIDRATSAYKETAKRTNFCRMIRDSSNGLWQGVVVYKLDRFARNRYDSATYKVRLKKNGVKVISATENISDSPEGVILESVLEGMAEFYSKELSQKVSRGLNESAHKCNSTGGAIPLGYKTVDKKLTVDEPSAQIVKEAFDLYAGGATISEICEKFNSQGYRTKKGTEFNKNSFKSMFRNEKYIGTYTYKDIRIEGGIPAIIDKETFETVQKRLSANAQAPARGKARVNYLLSQKLFCGHCGANMIGDSGRSKTGETYYYYSCSTRKRFHSCKKRTIRKDLIERIVAENAMRLITPEMINTIADMAIKCNREDIESDAIIPALTADLKEINTSIKNLLKMVERGVESETLDSRLKELEKRKKDTESRLDAAKSEYLTLDKTVIVGWLSQFLSGDIEDEDFRRHLIDTLINSVTVWDEPDGGYKITTVYNLKGNTQTYRVNADGSSDMKRNSPPKKRQFS

SEQ ID NO: 26777 - protein, 514 aa, synthetic construct
MRRKKVKGGNRLVAYYRYSGGSGQTEQSIEGQRRDCENYAKLHGLTILHEYIDRHISGKTDDRAAFQQMMNDGDKGAFDMVICWKTDRFARNRYDSAVYKKRLRDNGIEIFYAAESNVDGAEGIIIEGLMEALAEYYSAELAEKMRRGMRESALKGQAINRCRSLGLTTDENKKYVIDEKTAPTVRFIFEHYAAGESSASIVEQLNAKGLRTSQGNPFNKCSIPRIIQNEMYRGVYTSKAYNVRIEGAIPAIIDDDLWKRAQAMMKTNRQLKAKYEPKAEYLLSGKLFCAKCGCTMKGVSGHSGGNDEVYRYYACSNPQCHKRNIPKDDLEGKVIRAICDHLLQPETMELLAETMVDVQKADMEKPNAERDVLEQELRDVRRRSKNIMDAIETGSANHQLVARLDDLTQQENTLTYQLSTMEAEKPLLFTKEQYLFLLQQFYAQPTEQDDAYKRRLINTFVTNIEVSDSELLIYFNISEETENKNKNAPQLNFDKSSSTEKRLVRVARIELTAS

SEQ ID NO: 26778 - protein, 523 aa, synthetic construct
MRFFSYGRKSVFSDKSDSIDNQFRMNREYCESKFSSQVDSWQQFSDEDFTGANTSRPDLQRMLSFIKGGFCDVLVVYQLDRLSRDVRDFANIYALLEEHGVMFISIKENIDTTTPIGRAMMYVTVVFAQMERETIAARVTDNMLGLAKKGYWTGGNPPVGYVRKHIVVNGKKHCSIEVDPDGARYVTQIFDTFLAYNCSLQGMETRFKNQGIRTQSGKFFSTTQLHKMLTMPYCVEATPEVYDFYAAKGCIMDPGSPREMWDGSVGVIIYGRSTEKNKKHQAQPPEKWTVCLGKHKPFMPAEKWLAVQSRFTQNKCIKDAKWPVPLLKGVLRCKCGNLMQVSRKKKVDGTCSSWYYCRKRMRQGVDACDMGQIKCDLLDEKVLELFRGITADPALIQKFVKAEAPADVPDLKAAQARVSACERKIGRLAASLALAEDSAASKYIIAEMERLDVELGALKREASLAEMESHRAAASAKDAKATAAEIAKLIHGLDGFDDKEKNAIARAVIQECTWDGERLFITL

SEQ ID NO: 26779 - protein, 498 aa, synthetic construct
MQIEVRKADMGKEKKRLKVCAYARVSTEASEQENSLENQVSHYTEMIQSNPAYEFAGVYADFGISGFKESRPQFQKMMQDAKNGKIDLIITKSVSRFARNTAIVLKASRELKERNVGIFFELQNINTLTEAGELLLTILAAFAQAESESASESSKMAYLHRIENGEVVAYLERSYGYEKDENGEYRAKEPEASVIREIYDLVIQGVNCTNIARVLNARNIQTVQGAEWTASTVFRIVENEIYKGDVLMQKTFIDGKRHQVQNRGEKAMYYAKDNHPPIVSEKTWEKAQRKLEDMRAERAEHSVIQEFTEENYPYMNHIFCAKCGWPLKPRVYSHGHRLSWDCSGQKRGTKKFCTGIHVLDNDLRKMKIEGNRYFSEIVDKYGEVHLKHVGERTWKNKHKKKKFNHKDLYPELNEENYPYYKRLYCARCGSRLGRYISHGTVRWICSSYKRKGQAKCPGVRIPDEIIKGWNLPDGKIYIMGKEDKNGEKHYSYTSESAL

SEQ ID NO: 26780 - protein, 465 aa, synthetic construct
MARSITVIPASQPYRVGGRTQQKTRNLRVAAYCRVSTDQEEQLNSFENQVEYYTKYIHDNPLYHMAGIYADEGISGTNTKKREEFKRMIRDCEEGKIDLVITKSISRFARNTQDCLEYSRRLKNLGIGIFFEKEHINTLDASGELLFTILSSLAQDESRNISENCKWGIRSKFKKGIPQVDCTKFLGYDKGDDGKLIVNKEQAKIVKRIYREFLNGYNPAAIAKMLMEDHIKTGTGREEWRSASVRAILKNEKYMGDALLQKTYTSDFLTKKVKKNHGEVEQFYVKESHEAIIPKEQWEAAQLELERRDSYMQELGLTFYGYGSEVNPFSCRVVCGKCGAVCGKKSWKSRGVEFWQCNNRSKNHGVKGCASENLPHENLLKGFITAWNQIVAKREQYLPKWEKNKKDGNPLERLRAEQMIGLTLQPPLTKMLPELGQMVLERVIVQGKEIMVIRFLDGTEIKVRI

SEQ ID NO: 26781 - protein, 504 aa, synthetic construct
MNYNDSKGIYLMYLRKSRADEYNQDVENILKRHEEELQSLAKREFGDLIPEKYIFREVVSGGTIKDRPLMKEILKMMESGIIAGVLVVDPQRLSRGDLLDQGHIINAFKYTNTLIITPYKTYDLNDTTGTDVKLLKMELNHGADYLDYYKMVQARGKLASVRAGNFIQPIPPFGYRKVRYGKVTTLEPIEDEARIVRIIFQKYAEGKTICGVTNELNAEGYIPPSKQIWTKGSVKRILSNPVYDGKIRWGFTPNKTVMEDGKLKKYRPERHDYLLFDGKHDAIVKHGLFMSVQERLSKNKSFTNDRSLKNPLYGIMYCKRCGRKISRQNITESRGGHRYACPNKLCDVQSSRYDLVIEAVIDAVQCAIDDFDITFHNCNSSGSDEKIRELRQELTRLNNKEDTLFELLETKVYSTSVFTQRHAELEKKRQEIIGKINTLSLIPPPESCNDKKMRFKDALLALKDESMPPKEKNHLLKKCIERIDYDIEGVRYHSKVKLDVYFKF

SEQ ID NO: 26782 - protein, 518 aa, synthetic construct
MQENETYVIYLRKSRADSEKFSLEEVFAKHESELQSLAERTLGNRILEDKIFREVVSGETITDRPVISQILKVMESKKIKGVFVVDPQRLTRGDLLDKGHLINVFKYTNTKIITPYKTFDLNNDFDLKLFKMELDKGSDYLEYYKMIQARGRIASVRSGQYIGSTAPYGYDKYSYKENKHTVNTLKPNSDEATVVQLIYHLYVNESLSYAAIANKLNTMNIKPRKSTSWSPYSLKEILHNPVYIGKVRWNRRKTVMKYKNESLLKTRPIALNDSIISDGIHEAIIDEALFDSAQECNGKTPRNHSSSKLINPLAGLIFCGNCGRAMSYKTYKNNAGSEKQSPRYLCNNQSNCHTKSAKATDVINQIISALECYIEDFKVKLENDDGNSFNVRSQIISVLNKQLQDLEVREETQYEMLENKIYTPELFKKRRQKLLEEREVLLDKLQEAKVQEPVKIDYQEKIISFTDTVEALKNPDIDILQKNMLLKKCIKKITYTTDKEKGNRWRESTFEIDITPLI

SEQ ID NO: 26783 - protein, 421 aa, synthetic construct
MKLRKIKPLKPKQKKLRVCAYARVSTDSLKQGESFENQVSTYERVIKSNPEYEFVSVYADQGMTGRSENRPEFQRMIADCKAGKIDLIITKSISRFARNTTTVLKYTRELKEIGVGVLFEENNINTLSSEGELMMTVLASFAQEESRSISENNKWTLKKKFERGEGMVNTARFMGYDKDETGDLVINKEEAKVVRQIFKMYLSGMGCHRIAKALNEEGVPTIAGSSWHASTIKGMLANEKYKGDFHIQKTYIPEGTHQSVKNNGQVQSYYVTEDHPAIISAEEWQQVQELMEYHRKQRNIGKGEKYQKRYPMSGMLVCPYCGKSLRRRYVYNRKVEWLCATYIHKGKEACKGIRIRDTELAGLSFSEPMVVEEVMIDGEKHYGYTSKRAYDAGERAADRIEKESRSVLPRINRPRRTVIKL

SEQ ID NO: 26784 - protein, 458 aa, synthetic construct
MKKAKSETTLVRAALYIRVSGEEQKIKGLSLEAQEERLRDFCKERGWLICGVFIDAAKTARKNIRKRVEFQHMIDGVKKDQYDILVFCRLDRWFRSVADYYKIMDILNAHNCGWVTSDEDYDTTTANGRLYINVKLSIAQNESDICSERISVVFDSKIQHGTVLSGFSPFWLDVKDKKLVVNEERAAIVRDAIDYFEKDMTQNGTVRYIRNKYGINWDINMLKRVFKNKLLIGVYDSNGRYNDHFCDPVISVDQFNRVQSIFDKRIKVVPTKRVYVFTSILKCPVCGCRLSGQAAGTNTRYYYRCNRHFIRKDCSYGKITNERLIEKWLLENLKSKLSECEVAWSVKQAKKKLEPSAKQKASLKRKLSKLKDLYLNELIDLEDYKRDYIMYSSALSELSTLQKEETPPDFAAVHRILDNDFLSTYNTMNRTEKRTFWQSIIKEMVLDDNGHVTSLSFV

SEQ ID NO: 26785 - protein, 498 aa, synthetic construct
MEIQIRKGNSIQKRKLKVCAYCRVSTDADEQENSLENQIRHYKEVITSNPDYEYAGVYSDFAISGFKEKRPGLQKMLADARKGKIDLILTKSVSRFARNTSIVLEATRKLKELNVGVFFELQNINTLSGEGELMLTILAAFAQAESESGSVGAKMVYQRKYEAGIPVQYLERSFGFKKDERGVYIADEEEAAWVRKIYEMAADGYTPAVIKRYLNENGVKTVGGAEWIDSTVFRLIENEIYKGDYIMHKHFVNEERKLVRNRGEVDAWYIEDDHEAIVSSELWQRAQDALEAKRDYLAEGSVIEEFTEENYPYMNRIYCARCGHPLYKRIYSNGNRLNWGCSGTKRYGKSFCEGINIPDGVLRGAWHFDENMYIGEKQTDKGKKEFTYLKEASWKRRHKKKVPEAIPKNTEEAYPYRKNIFCGLCGSRLVRHVNPKSHKVIWICNGAKRKGVAFCRGTRIPDSVIRGWGEIKKDIYIQGKDDKNGKKRYSYTSKKPTA

SEQ ID NO: 26786 - protein, 464 aa, synthetic construct
MARSVTVIPARNRQRETGRRAVQEKKIRVAAYCRVSTDQEDQIHSFEAQVDYYTKYINDHENYEMAGIYADEGISGTNTKKREQFKRMIADCEGGKIDLVITKSISRFARNTQDCLEYSRKLKNLGIGIIFEKENINTLDSTGELLFTILSSLAQDESRNISENCKWGIRTKFKNGEMHLNTFKFLGYDKDENGKLVINKEQAKTVRRIYRDFLIGINPAQIAKELTEEKVPGCLGQTKWYPSTVTGILKQEKHMGDALLQKTYTADFLTKRQVRNNGEIAQVYVKDSHKGIIDKQTWNAVQEEFDRREKFMESHGTDRYSYGADCMPFCEKVFCGECKSLFTRHSWRSRGIVQWQCKNHRKDGKVACTNAYVDNADLEKGFVKAFNRLVTDRDKHMERWQQMKSDGTPLEKIRAGQMMEAVENEPLTRFVPEIAQLVLCEVTVLGAKKYEFFFLEGSRVKVSV

SEQ ID NO: 26787 - protein, 521 aa, synthetic construct
MKKVQVIPATLRSYTKKLMDSQKKRRVAGYARVSTDHDEQLTSYEAQVDYYTRYIQSRNDWEFVGMYTDEGISATNTKHRKGFKRMIDDAMDGKIDLIITKSVSRFARNTVDSLTTVRKLKDKGIEIYFEKENIWTLDAKGELLITIMSSLAQEESRSISENVTWGHRKRFADGKVSLAFSHFLGYDRGMDGNLIVNKKQAEIVKLIYRLYLSGYTFHSIAKELTERKIPTPAGCKIWRANTIRSILMNEKYKGDALLQKKITVDFLTKETKKNEGEVPQYYVEHNHEAIISPQVFDWVQEEIKRRRKGKKRYSGVSIFSSKIKCGQCGGWYGAKVWHSTDKYRRTIYRCNDKFKIKSHCKTPHLTENEIKGAFIRAVNQLIENKEDILSNITMLKKRLTDIASLEKERDALELDLNMLNDQVQQLIAENARVAQNQDDYDRNYNELVSRYEAAKTQYDKTCEAIQYRKARSRQMDSFIKELREQELIKEFDARLWGSLVDFITVYSKDDIRVTFKNGIEY

SEQ ID NO: 26788 - protein, 545 aa, synthetic construct
MRTIRKIEQKISGLKQRKKVAAYARVSMESERMHHSLSAQVSYYSKLIQKNPNWEYAGIYADYGISGTGIKKRQEFLRMLEDAEAGKIDIILTKSIQRFARNTVDLLQTVRHLKELGIEVWFEKENIHTMSGDGELMLTILASFAQEESRSISDNIKWRFRKKFEQGIPHAKFFVYGYCWEKDNLVIQPEEAAIVREIFDAYLQGRTRKDILRELKRREIRTMYGNYFKDASIRQILTNRIYTGVLEIQKTFVTDPITKRQAVNHGERNRYVVEWHHEAIISSDMFERVQQELKNRKEMGMQRGGYARDFLNTSCFTGIIKCGICGKSYVHVVRKYKGRIREYWTCDSHKGKGTNCGAYGSIPQPALKKACAAVLGTDEFDEELFVQRVKKIVVPSYHTLVFHFKDGNVITQEWKSTALKDMWTDEQKKKQRQWMETYHQRDTSGRYTAFSERIVCPACQTKFIRCLEKRKNGKVAYWRCRGEHRCIHVRNIKEEWLQRMAAETMGKLEFDDTAFRAQVQRIEVQDNETLLFQFNDGHTKEVKLS

SEQ ID NO: 26789 - protein, 616 aa, synthetic construct
MPRKPAKHPAKPKRGKKLEIEEPGVLYGRYSSHNQKDISVEQQFEKGYELAAEYGIRIIDTYADRAVSGRTDKRRDFQRMMTDAAKGKFRYVIAWKSNRMGRNMLEALINEARLQDLGVRVLYVEEDFDDTAAGRFAARSMMNVNQFYSENMAEDIKRGLYDNAANCMVANGHLPYGYKADETLHYAIDEPKAAVIREIFTRVSCGEAFVDIMASLNARGIKTSYGRPWGRSSFQKILSNERYRGIYIYGDVRKEGGIPRIISDELYFKVQEVITTKKNPQGRHRVNGDYLLTGKLFCGHCKSPMTGISGTSRSGNLHYYYVCQKRRTEKTCEKKNLRRDDIELQVAKAIKRRTLDDDTINWIADSVVEYSQHQESASGIGLLEDQLKDTQRSIKNLMAAIEQGIITPTTKARLMELEKEQSDIDRKITMAKADVIPVNRDQLVGWLKKLQAGDVHDKKYQAELFDTFLIAVYVYDNPDGQDYMKVVFNYAGSKNTVEIPLDPSVIDNVENIETGAVRLSSAQVHQTNPSRFYGLGGFLLYFFGFPGNSELIAISYLQSFCSVGNSKGGSVKSYAQICFWPLVEIYYRGRLNRPLVTFQQAGRNGSRAAVRRLPCP

SEQ ID NO: 26790 - protein, 558 aa, synthetic construct
MTNAVIYARYSPGPNQTDQSIEGQIHECTRFCEDNDLRIVGTYIDRKQTGRNDNRADFQKMLRDSSRHGFSTVVVWKIDRFGRNREEIAKNKAVLRMNGVRVLSAKEHIPDGPEGIILESVLEGLAEYYSANLSQNIKRGMRESALKCQFNGSGLSTGYTVDADHKYRIDPDGAAVVRTIFEMYDGGKKIADILRYLQQSNIKTMRGKEYTHYGISRILRNRVYIGEYHWHDIVVPGGVPQIIDNDLFDRVQKRLEVNKHAPAARRGDVDFLLTSKLICGNCKSTMIGDCGTGKNGARWYYYTCRAKKTKSSKCRKKSVPKEALEREVTALTAAYVLRDDVIDYIANKVVEIQKSEHDDKSMLRYFESQLKDTNKAIANIMRAIEAGIITETTRSRLEELEDTKRDLETEIIKEKVARPTIEREQVIFFLEKFRGGNVDDKEYQRKIIDTFVHKVILYDDKITITYNYSTDSTKNAENTVESIESAASAAECKCSNKPSSSPPVTRILLLRCSCYFFRRGSNRTVLQSRIPSVRWTVGKSACVSAHDSAPSDPLRLHQ

SEQ ID NO: 26791 - protein, 577 aa, synthetic construct
MSINRNNTSETPKKAALYVRVSTNYQIDRDSLPMQRQELITYAQLMFGINDYVVFEDAGYSGKNTDRPEFQNMMRRIRAGEFTHLLCWKIDRISRNLLDFASMYQELKDLGVTFVSKNEQFDTSTAIGEAMLKIILVFAELERNMTSERVTATMLSRAQNGLWNGGRVPYGYDYDKDSKTFSINQEEAFLVRKMYDLYSEHRSLVMVSRALNEDGYASRAGNDWSPVSIFIILTNPFYTGIYRYNHYKVPGLKIEKDPSEWIEVPDHHPRIISDEQFGNVNRILQSNSRSKRLPGQQHTSKGTHIFGGLLYCGTCGSQYVSTPSRLLASGYRPSKYACPNLRKKKTCNTKSISDPVIGEFVLNYVLNMMHARAAFSSIHDTSELQDALLNGGTFQNVDHIGKDGLDSCFHMFYSTPLDGKRFRKPKKATTIDPELKRLRAEKRKTERALDRLMNLYLYADNPISEKDFVIRKQALDDYLKEINENLGMIDRGRGIETISDENFIKRASYFIMSKELAGKDYIYFKKLAMDMDAEILRDFFQEIIDSIVMEGSNVKEIVFRNGLAHTFFYEGEEKPEA

SEQ ID NO: 26792 - protein, 516 aa, synthetic construct
MPKTEEKQAAKAVIYARYSSDRQREESIEGQLRVCEDYARRNNITILHTYADRAMTGRSDQRPEFQMMIRDAATMAFNVILVYKLNRFARNRYDSAKYKHKLKKYGVKVVSAMENIADDPSGILLESVIEGMAEYYSAELSENVLRGMTQNALEGKWPGGVIPLGYKLDKGGRLIINEEKAPIVRMIYQMFLDGMSVARIERKLNDKKYTTDAGKVFSRSRVYYILHNERYIGTFQWKDIKKEGIIPPIISKEAFHAVQERINAMRSSSYRTNNNYLLAGKAFCASCGAKVSGTSGKSQNGNKYCYYGCSHHHRSARYEYCETKNIRADVLEKLVCDKTHEILSSKKAIKEIARQAVKLRPRDESELEIRAIKNHISSCQKKIDNCIKAIENGVMSNALVESLNENERTLDVLKEKLAKASLMQGSGLLTEEKIQFFFETIREKAKETEKYNDILLTSLVRAVYICNEYVEIQYNYAEQLPILTNPVRIESCSYKCTNGGTIWIRTKDLFDVNEAL

SEQ ID NO: 26793 - protein, 521 aa, synthetic construct
MGNVMVIPAKRQVGNTARQQDAKPKLRVAAYCRVSTDSDEQATSYDAQVEHYTEFIQKNPEWEFAGIYADDGISGTNTKKREDFNRMIDDCEAGNIDMIITKSISRFARNTLDCLKYIRQLKDKNIPVFFEKEAINTMDAKGEVLITIMASLAQQESQSLSQNVKLGLQFRYQNGQVQVNHNHFLGYTKDVDGNLIIDPEQAEVVKRIYREYLEGYSMDRIAKGLEADGILTGAGKTKWWTSTINKILRNEKYIGDALLQKTYTTDFLNKTRVKNNGIVPQYYVEGNHEAIIPKDIFLRVQEELVRRRVVKTSTNGKKRSYSCNHCFAQIVICGECGEMFRRIHWNNRGCKSVVWRCISRLEPTGQECRARTVNETVLENVVVQAINMLLGDKSTYQAQLQQNIAKVIRSAQQNTADGIDEKLQSLQKELLKKANNKEAYDEIADEIFKLREQREKCTVDTAARDAQITRINELQDFIKQQPAHLEAFDEALVKRWLERIIVWEDHFTVELKSGLKIEIEG

SEQ ID NO: 26794 - protein, 581 aa, synthetic construct
MAYAMKVPAASADDRIIAIYVRVSTGYQVDKDSLPFQKKELKAYCKHILHVDMSRVEIFEDAGRSGKNTKRPAYERMMQKVRAGLVSHVLVYKIDRISRNLVDFSLMYDDFKYNRVTFVSLNEQFDTSSAIGEAVLKIILVFAELERKLTSERVKDIMIGRANEGKWNGARVPYGWDWDSSAMWPVHSEKEAPFGRAMYEMYLKVKSTGKIRDYNNAHGIPTKRGGEWTSKTVGDFLRNPMNKGDYRYNYRESARGRKKPIDEVVYLEGVFDPLIDPEIWEKVNKIMDINRDKRNIGGSHPVEKNCNVFAGLIQCGSCGSGYLVGKKDKRRKNGFTPSMYYCSAKTRAIHCQNLNVSDVKIGPFVINYISAMVRVSNERRKIKTPEDLEEILLSDKAVFADIMGLSSDSLNNTFELLTGKSATGGALWRADLVDQEGAAADPVEIESLKDQIRKYERAKERLEDAYYFSDDGMSEKEYLEKKNRFDSGRVAAENKLKELTETHIASGVDESAFMKSASAFLLTHKIRAGSHIVYSDLAGMVEEESIKEFFNLVLDHITVKDRRVTEIVFANGLSHKFIYRD

SEQ ID NO: 26795 - protein, 587 aa, synthetic construct
MTSQKSSIERKLSEQRAALYIRVSTHWQIDKDSLPVQREDLINYAKYALGIDKYEIFEDAGYSAKNTDRPAFQQMMSRLRTGEFSHLLVWKIDRISRNLLDFAEMYSEIKKLGITFVSKNEQFDTSNAMGEAMLKIILVFAELERNMTSERVTAVMLSRASNGQWNGGKVPFGYNYDKQTHEFTINESEASVINLIYDTYEANNSLTLVARTLNEKGIYPRSGTPWNPTTVSTMLKNPFYTGAYRYNYHDESKSGGNTSSKHIKDRSEWVYIENHHPAIIDAERQSRILAILESNRRSNHRSSKTYIRKNVHIFAGLLYCGYCGSQMQSTIDRERADGYRPSIYACSRKRRFNDCPNKYVSDVTLAPFVLNYIANIIKAQNNFGKSTPLDTFERKLLRGEIFADVDHIEPVGLTEMYNMLKRGNLSDAVFSSARIQDAETDQMAADERDLLASERRKKERALDRLKSLYLYNDEAISERDYLVEKKSLTDSIDKIDKRLEEIERNSSHHFTLTDEEFMAKASVFIVTNQLQGKRFIDAEKLLRQIDTHVVKEFLNSVAQKIVIKDGRVLSIRFKNGLEHKFLYKDAE

SEQ ID NO: 26796 - protein, 453 aa, synthetic construct
MECVAYMRVSTEKQAVEGNGLDSQKRDIENYCRKNELVITDWYIDDGYTGTNMDRPELQRLVNDCSRKRVSCVVAFKLDRLSRNMIDGIYLIEKVFQKYNVVFKCVHDSVNYDSPMEQAYTQMMAVFAQLDKNTMMLRMRGGMLERIKQGYWMGGGNLPYCYSYSKEQGILIPIPERAEQARKGLELFISGYSDAKIKEICGFKSELVTRSILTGVVNIGMIPYKGKIYQGKHEPVFDKDRFNLGLELRKSRCSAKTYCITEPNLLTGLCYCGICGCKMRYQKWGSEKHKIYCCSRNKSLSYLPNYNASCNNSLEWADEIEKQVEEEILKISLDLSSYKPKEKATKLEIMQSQLEKEQIKLKRLYNLYADGNDTVLEMIKELEAQIKEMKLNITAESKNAINTQKKEFVYENIKKLADIWDKVDKKQKNLILKTIIDKIVIVNGNIEIQLKNF

SEQ ID NO: 26797 - protein, 565 aa, synthetic construct
MEKNLKCALYIRVSTFHQIDKDSLPLQREDLINYAKYILGIDDYVIFEDAGYSGKDTDRPSYQNMMTRIRMGEFSHLLVWKIDRISRNLRDFSDMYDELKKYNVTFISKNEQFDTSTAMGEAMLKIILVFAELERKLTAERVFAVMMSRAEKGLWNGATVPLGFIWDEEIKFPKIYEPEAKIVQYIFDLYEKKRSTTKVAEQLNQENVKTKRDGTWTPRTVGAILTNPFYIGTYRYNTKTQKTRRWKDKSEWIVIEDHHPAIISKEQFERVAKILKDNYRGDYNRQRASKNVHILSSIIKCFKCGSNMNAGNDRARKNGFTPSRYTCYQIHKTYTCNNYASDLTVLPFIINYIGNYMTLQDRITKNHSYRDMESILLRGKYFTDIEHINKDDIKCTYKLLVNNLPVINYKLQENQEDKKTTFKDRYDIYKNEKEKQENALKRLDDLFLYAEDSMPKKDFILKRQEITNKIEEINSKIQELRAEENNFVDNKEFSLNAKASFYLITQLIGNSKNIDVRYLLENVDKSIIKDFLSTILNEVSVDHQKVQYITFKNGLTHHFEYKENQ

SEQ ID NO: 26798 - protein, 502 aa, synthetic construct
MEIQIREGNREQKRKLRVCAYCRVSTDADEQENSLENQIRHYETVIKANPSYEYAGVYSDFAISGFKEKRPGLQKMLADAQKGKIDLILTKSVSRFARNTSIVLEATRKLKELNVGVFFELQNINTLSGEGELMLTILAAFAQAESESGSVGAKMVYQRKYEAGIPVQYLERSFGFKKDERGVYIADEEEAVWVRKIYDMAAQGYTLAAIKRYLNENNVKTVGGAKWLDSTVLRILENEIYKGDYIMHKYFVNEERKLVRNRGEVDAWYIEDDHEAIVSPELWQKAQDALEAKRDYLAEGSVIEEFTEENYPYMNKIFCARCGHPLYKRIYSNGNRLNWGCSGTKRYGKSFCEGINIPDGVLRGAWHFDENMYIGEKQTDKGKKEFTYLKEASWKRRHKKKEPEPIPENTETEHPYREKIFCGLCGSRLVRHVNTKNHKVIWVCNGRKRKGKDFCDGTRVPDTIIKGWGEIKKDIYIQRKDDKNGKKRYSYTSKKPKGADRA

SEQ ID NO: 26799 - protein, 464 aa, synthetic construct
MARSVTVIPARSQKVRTGHKAVQEKKIRVAAYCRVSTDQEDQLHSFEAQVEYYTKYINEHENYEMAGIYADEGISGTNTKKREQFKKMIADCEDGKIDLVITKSISRFARNTQDCLAYSRKLKNFGIGIIFEKENINTLDSTGELLFTILSSLAQDESRNISENCKWGIRTKFKNGEMHLNTFKFLGYDKDENGKLVINKKQAKTVRRIYRDFLIGINPAQIAKELTEEKVPGCNGQTKWYPSTIVGILKQEKHMGDALLQKTYTADFLTKRQVKNNGEIAQVYVKDSHKGIIDKETWNAVQEEFERRERFMKDHGTDRYSYGADCMPFCEKVFCGECKSLFTRHSWKSRGIVQWQCKNHRTDGRVTCSNAYVDNSDIEKGFVKAFNKLVADREKFMERWNQMKTDGSSLEKIRAEQMMEATGNEPLGRFVPEIAQLVLAEVTVLGAKKYEFFFLEGSRIKVSV

SEQ ID NO: 26800 - protein, 585 aa, synthetic construct
MKQSKNVSDKLSNQKCALYVRVSTHWQIDKDSLPVQREDLINYAKYALNIDKYEIFEDAGYSAKNTDRPAFQQMMARLRTGEFSHLVVWKIDRISRNLLDFAEMYAEIKKLGITFVSKNEQFDTSNAMGEAMLKIILVFAELERNMTSERVTAVMLSRASNGQWNGGRVPYGYNYDKETGLFSINEAEASVINMIYDTYERVHSLLVVARTLNEKGILPRSGTPWSPTTISTILKNPFYTGAYRYNYHDESKSGGNTSSKFLKPKADWISVQEHHPAIVSAERQERVCAILEDNRRSNKRSSKTYVRKNIHIFAGILYCGYCGNQMQSTIDRERADGYRPSIYACSRKRRFDDCENKYISDVVVAPFVLNYIANVIKAQNNFGKSTSIETFERKLLRGPTFSEVEHIEKIGLQEMYDMLRSGVSDAVYTSRTLSDIAGAEELADERDLLLAEHRKKERALARLKSLYLYNDEAISESDYLIERKNLSDSIDTIDKRLEEIEKHSSRQFTLSDDEFLAKASMFIMTHHLQDKRYVDFEKLIRKVEPIIIKEFINSVTQKIVIKQGKIISIRFKNGIEHKFLYKTQE

SEQ ID NO: 26801 - protein, 436 aa, synthetic construct
MQITKILATKKLDKKKLVCAYARVSSDKDAMLHSLSAQVQYYKDYITSNNDWLFVKVYYDEGISGTKQDRPAFQQMLQDAKDGKIDLIITKSISRFARNTVTLLETVRKLKKYDVDVYFEEQKIHSISSDGELMLTILASYAQEEARSVSENMKWRVKRNFEEGKPWGRAPYGYTIENSKFVIVPKEAEAVKLIFKLYLDGIGSYRIKDIMNKSEYPTRNNCLWTETTIRGMLKNYIYTGNAVFQTTYVKNYITKKKAKNNGEKPMYHVEECHDAIISIEDYNKVQKIIKERTEKIHKGITPKDNPFKGKLICAHCGCTFRMKKNYKKYVWRCGTYIRLGSKKCLSKQIPNDALKNIAKEILGVDELTSEIIDERIEKVIVGDDRLLTFYLKDGNKIDAHWMQKSRSESWTEEMKENARRKAVERNGKSNSNPIND

SEQ ID NO: 26802 - protein, 474 aa, synthetic construct
MKKTITEISSKDTKSKKVTTKSKLNVAAYCRVSTESDEQMNSLANQKEYFEKLIKSHEDWNFVDIYYDEGISGTSLKKRDGFNKMIADALAGKIDMIVVKSISRFSRNTVDALQTIRNLRNHDIRIFFEKESIDSNDIKSEFMLTIMSSLAQEESQSLSENVKWGKRKIAQKGFVQIPYSNVLGFQQKGKYGIEIDREQAKTVVLIYDMYLHGKTTGEIIKKLIEDGTPTPTGLEASHWCNTAVLSILRNEKYCGDAILQKTYTKDFLNHKKCINYDAFPKYYVKNNHEEIIPRATWEYTQELLEKYSKRSVNVRYGDLIFCLACGSKYRRFHWYHKYYEETILSYRCLGKYDKSVNCSNIKLFEKQLDELYHETVLQLLSYYKKELVEYFKLTIPKVIKGKRKSNRIIKLLDNMISFIQSDYEYYSLHILIKKISVHPDRTLEFTILNGNIIKTSIPKYRLVDHYGRKKTSGN

SEQ ID NO: 26803 - protein, 503 aa, synthetic construct
MYNDSKGIYLMYLRKSRADEYNQDVENILKRHEKELQSLAKREFGELIPEKYIFREVVSGGTIKDRPLMKEILKMMESGIIAGVLVVDPQRLSRGDLLDQGHIINAFKYTNTLIITPYKTYDLNDTTGTDMKLLKMELNHGADYLDYYKMVQARGKLASVRAGNFIQPIPPFGYRKVRYGKVTTLEPIEDEARIVRIIFQKYAEGKTICGVTNELNAEGYIPPSKQIWTKGSVKRILSNPVYDGKIRWGFTPNKTVMEDGKLKKYRPERHDYLLFDGKHDAIVNHVLFMSVQERLSKNKSFTNDRSLKNPLYGIMYCKRCGRKISRLNVAESRGGHRYACPNKLCDVQSSRYDLVIEAVIDTIQCAIDDFDITFHDCNSSGSDEKIRELRQELTRLNNKEDTLFELLETKVYSTSVFTQRHAELEKKRQEIIGKINTLSLIPPPESCNNKKMRFKDALLALKDESMPPKEKNHLLKKCIERIDYDIEGVRYHSKVKLDVYFKF

SEQ ID NO: 26804 - protein, 558 aa, synthetic construct
MAYRKITDIKDTIGMRAVFYARVSTAEEEQLNAIELQIEENRGCIKDHGWKLVGEYIDRSKSGTMVKGRDDYQRLYEDLYEDLFDIVVIKDQERLQRNTLDWYLFINRVVQTGKLLFMYMDGKFYSPDDALITGVRAIIAEEFSRNLSKKLHNYHDHRIEKARQGQEIALQGSGNVYGWDKKDGKYYINSEQAKVRRLMCEGIMARKGSTLIAKELNDAGYRNTVGKPWKPMDIPKFVYDCKNVGTMIINKERHDFESKQTIKLPKEEWVYVENALPPIVTQEEWDLICKIHEERVIATGSDRRGKKTSGYSFSGKLVCGICGAPYWRKQRVSKDEYWVCSTKQTKGRRTRKRDSTMGKAGEINPLGCDNENISYNSLMEIMGVVSERLQANTDTIKHDMINWLTKLRKQLLEANGGHTEADLQRELSRKSKLLDAYLDGILNKQEYQKKAEELDERIIQLKAETEKNKANSGDIAEIDKVLANIDEEVSRYVDGNEKLKVEYLLEHLEQVQIFPDKVIVIVPILSEGIVVEKTQYVSREKWIWKNHVVSGIIGSDED

SEQ ID NO: 26805 - protein, 502 aa, synthetic construct
MEIQIREGSREQKRKLKVCAYCRVSTDADEQENSLENQVRHYEMVIKANPDYEYAGVYSDFAISGFKEKRPGLQKMLADAEKGKIDLILTKSVSRFARNTSIVLEATRKLKELNVGVFFELQNINTLSGEGELMLTILAAFAQAESESGSAGAKMVYQRKYEAGIPVQYLERSFGYTKDERGVFVADEAEAVWVRKIYEMAAEGYTPASIKRYLNENGIKTVGGVQWVDSTVFRLLENEIYKGDYIMHKHFVNEERKLVRNRGEVDAWYIEDDHEAIVSPELWQKAQDALAAKRDYLAEGSVIEEFTEENYPYMNKIYCAKCGYPLYKRIYSKGNRLNWGCSGTKRYGKTFCDGINIPDGVLRSAWHFKENTYIAEKASDKGVKEFTYLKEQSWKRRHKKKQPPAIPENTEAEYPYREKIFCALCGSRLVRYVNPQSHKVTWVCSRRKRKGKDACDGTRVPDTIIKGWGEIKKDIYIQRKDDKNGKKRYSYTSKKPEGADRA

SEQ ID NO: 26806 - protein, 464 aa, synthetic construct
MARSVTVIPARSQKVRTGHKAVQEKKIRVAAYCRVSTDQEDQLHSFEAQVEYYTKYINEHENYEMAGIYADEGISGTNTKKREQFKKMIADCEGGKIDLVITKSISRFARNTQDCLAYSRKLKNLGIGIIFEKENINTLDSTGELLFTILSSLAQDESRNISENCKWGIRTKFKNGEMHLNTFKFLGYDKDENGKLVINKEQAKTVRRIYRDFLIGINPAQIAKELTEEKVPGCLGQTKWYPSTVIGILKQEKHMGDALLQKTYTADFLTKRQVKNNGEIAQVYVKDSHKGIIDKETWNAVQEEFERREKFMQKHGTDRYSYGSECYPFCEKIFCGECGSLFTRHSWKSRGIIQWQCKNHRKDGKVACTNAYVGNADLEKGFVKAFNRLVGEREKHIERWNSMKLDGTPLEKIRAGQMMEATESGQLQQYVPEAAQLVLEEITIFGAKKYEFAFLEGSRVKVSV

SEQ ID NO: 26807 - protein, 512 aa, synthetic construct
MQTAVIYARYSSDKQTEQSIEGQLYDCYNYAKQHDITVVREYIDRAMTGKNDDRPAFQQMLHESAMHKWDSVIVWKLDRFARNTIDSAVNRQILAKNGVKLLSVMESFGDDASGQMMTHIIEAINEYYSADLQEKTIRGMRQSAMKAQTTGHIPLGYKVVDKKLVIDDDTRIIPETVFRMYAEGERLTDIAEHLNSQGYRNRRGRPFTTNSFYNMLANEKYIGIYKYDDIVIEGGIPQMIPNEVFEAVREKLIINRKRAAKNTAKADYYLSGKLYCGHCGEPMSGLSGTGRNGVKHYYYRCNGVQKKSGCHKKLENKYLIEDEVCRAARSAFEQMDKAETAETICQMYLQTVRNEYAPDELEKELTECTKQAENVVNAIAQTGGNQLLYDKVRELEERKEQLSSALRLSQAMTDNVPSVEQITVFIDDILATDINTTEGKKSIADIMISKVYVYDDKLTVIFKDKDGKSVDIPLSAVSDSSSADCAPSALGTRTDSNPLAFRDFIMAAVVSG

SEQ ID NO: 26808 - protein, 468 aa, synthetic construct
MLYGKPQNYAWYRARVVLYIRVSTDEQARHGYSLGAQREALREFCDTFQCQIVAEYSDDGVSARKEIRRRPGLLRVLEAVKAGGVDYVLFIKLDRWFRSVREYYRVQDVLEAAGTNWKAILEDYDTSTTNGRLNLNIRLSVAQDESDRTADRIKFVFAERVKNGGAIFGSKSLPYGLEVADHRVQIVESQADAVRGMFDHYEATNSTRETHAWLRDQYGVDLPYNTIRNMLRNSLYCGEYRGNVNYCPAIISREQFQNIQKIVSRQGANRTRQSKYSYVFTGLLRCPVCGCTLKAFPQTDYKFHRVYLRYRCTQHWIDKRCTWKTTPWEPRLEDWLLDHIQPQLDAYIAQFDVQEAQRRRAVVDVGAIQRKLSRLQDLYVDGMIDRAAYDEKYQALIRQQEAAQTAQQSQSAGRDLEPLRQLLAGDFRSIYATLSPQERHTLWASVIDHIVVKDGRYGHFDLDVIFLP

SEQ ID NO: 26809 - protein, 507 aa, synthetic construct
MKGWYFFMANGVIYARYSSNHQREESIEGQLRECNAFAKAQNIDIINTYIDRALSAKTDDRPGFLKMIADSSKQAFDYVIVYQLDRFARNRYDSAFYKMKLKKNGVKVLSAKENITNDPAGIILESVLEGMAEYYSVELAQKVKRGMTENALAARWASGRIPFGYKVDAQKHLIPDPVAGRAVTAIFIRFARGEKIKSIVDYLNSLNYKTSLRNKFNRSSFQRMIVNPVYIGTFRWNDIVLENAVPPLIDQLTFETCQRRIAAKKRDKNAVNRKSDMFLLTTKLKCAECGGNMVGISGTSRNSQKYYYYGCYNTRRHNTACKIGYINRDELEDAVFEAAMDVLSSDENIDIIAEQAFKISQQQEENSRIKELEMQKKETEKKLANCVKALESGLFSETLANAIKKNEDELKSINLALAHENLSSASFEITKQHIAFFLSQFRHMEPTKAREAVLNTLLREAVIKKESDSNYLVTVRFNYTATPTLSDTKEVSVRIMNDWWRQAGSNR

SEQ ID NO: 26810 - protein, 592 aa, synthetic construct
MPNLRKIEAAVPTIREKKKVAAYARVSMQSERMLHSLSAQVSYYSGLIQKNPDWEYAGVYADDFISGTNTVKRDEFKRMLADCEAGKIDIILTKSISRFARNTVDLLETVRHLKDLGIEVRFEKENIRSMDGDGELMLTILASFAQEESRSISDNVKWGTRKRFEKGIPNGRFQIYGYRWEGDHLVIQEDEAKIVRLIYDNYLNGLSAETTEKQLAKMGVKSYKGQHFGNSSIRQILGNITYTGNLLFQKEYVIDTISKRSKINRGELPQYFVENTHEAIIPMEVYQAVQEEKVRRRELGALANWSINTSCFTSRIKCPLCGKNYRRSGKRQRKNPDEVYYIWICRTKSEKGAKSCPAKAIPEKALKNACAEVLGTAEFDDAVFSAQIEQLYVVGDDTLEFHFYDGSVLEKKWKSTAKKDWWTEERRAAWGELHKHKATNPNRRRFYEFTGLIKCGQCGESFRCQSMTRKDGTRIRSWHCGRTCGNTNIRDEILKSMVCDGLGLDAFSEESMDAALEKITVNGTAVRFHLRDGSVAEREYTQPKRKGTKHTEEFKEHMRQLMKAKWKEGKMHGTKKSDNHSSHDQPVHGGAD

SEQ ID NO: 26811 - protein, 491 aa, synthetic construct
MPEKLLSGAAYIRVSTDKQEELSPDAQKRLILDYAKQHNILLSEKDIFIENGISGKKADKRPMFQQMIALAKSKEHPYDIILVWKFSRFARNQDESILYKSLLRKKNIDVVSISEPIIDGPFGSLIERIIEWMDEYYSINLSSEVKRGMTEKALRGGYQATPPLGYDYHPGEVPTINEKEAKIVRKIFQEYNSGADFTTIARNLNEAGFRTRRGNLFELRVVRYILKNPFYIGKIRWNRAKHSSWIENDPEDIIIVDGQHPPIISEEEFNTANERINREFRPVRRKGVCYTKHWLCGILKCSYCGANLIYVNDKRNKCGTGNFQCYKYAKGLHKKSCSVSQRIAEESVMDALESILSTGYVDFKYSAPDNDSSNSKLLFLKKELESLAKKEQRIKAAYIDGIDTLDEYKANKNRISDERKQITDKINELSVPTNVDTSALQQQMLLRCHNIYDILKSEANDETKAAAIRSICESITFDRDTCTFKYVFYLG

SEQ ID NO: 26812 - protein, 497 aa, synthetic construct
MGNAIIYTRVSTKNQTEEGYSLAGQEKDCKIFAEMNNYSVSKVFVEKGESAKTQDRTELQNLMKFCVANKKNIDAIIIWKIDRLTRDIKDFYRLQEFFTKLNIRVLFARENNGDSATDRLTRNLMGVLAQYENDQKAERVTNGMKTAFLQGHWMWKAPIGYLMKNGNVEPDPKTAHHIKKIFKLFSTGLYQQTQIIKIMADDGLKINTNRLCRLLKNPIYSGYIYKKEWAEEPIRGIFEPLISEAEFKKVQEILNGKKPVITAYKRNNPEFPLRQFITCPNCNQPLTGSKSKGRKERYAYYHCHHKDCCINFRIRKEKLEKIFVDYLKFIKPERDLLNLFEATVKDVYNEKLSIRSNSQKQVQNKLIELKNRKSKLIDFRLDGTISEEDYKFKTEQLAEEIQEQEFRLREADAVSDDLTKCLKYACKAICNIDTIWENGDLYLKQRLQKLIFPKGLMYYSNDFRTAEISSLFIKKDASLASYNNMVPPSEFESLSTP

SEQ ID NO: 26813 - protein, 518 aa, synthetic construct
MAKRIPAAASDCDGMIGVIYARYSSHSQREESIEDQLRECHEFAARNNIKIIAEYTDSALTGRTDSRPDFQKMIRDSARGKFQVVVTYKVDRFARDRYDSAIYKAKLRKNGVRVLYAKETIPDGPEGIILESVLEGYAEYYSAALSQNILRGLEGNAMKCKTNGVQVLGYYTGEDGCYEIDPDYASVVLSIFQKYDAGVPQKEIIDDLNARGFRTTRGFAFNKNSVTRILRNRKYIGEYSWGDVTVSGGMPQIVPLPLFDSVQRKLDRGSRAPAHKWKVADYILTSKLFCGHCGELMVGRAGTGKSGKKYDYYACVNRTRRHGCDKKPVKKEWIEDIVVKYTKEVVLAEDMIEQIADGVMDFLEREKKSNGELDALEASLKNVESSIRNMMQAIEQGIITKSTKQRLMELEEQRDQISTAIAREKIATPDIERDQIVYFLEKFKEGSLDDPDYRTKLVEAFVSSVYLWDDGRIVINYNYTGENNQLTLRQIEQELVDIDGAEGSPLDSSAPLKKWLKY

SEQ ID NO: 26814 - protein, 521 aa, synthetic construct
MRVAIYCRLSREDDDKLHENDESESIQNQKSMLINYAIERSWDIYNIYCDEDYSGIDSERPEFNKLLEDAKNHKFDIVLCKTQSRFTRDMEIVERYLHNKFIEWNIRFVSLVDHVDTLDKGNKKSRQINGLVNEWYLEDLSENIRKTFDSKRKQGLHIGSFVCYGYKRNPENKNKLIIDEEVADVIRLIFNLYEQGNGVTKIAQILNDKGILTPTKYKQSQGINFKNQGKNIDYWCESTVSKILKNEVYIGNLVQGYNKKVSYKSKQMKNQPKSEWIIVENTHEPIITKEQFYKVQEIFKSKTRRCKNGEVHLFANKLVCLDCGTKLYKCKNDRGYIYFSCKSSKKLYGTCTPHSIGYENLKALVTEKIREKILAFYNFDNISDDLFVSNDNLNKAKLLQKKVELLSKEKEDINKAIKELYLNKVSGKVPEDVFEDLNTSFLTDKSAKQNELAKVQNDLSNLKEKELNSKFIKEQKEKIINHFKDFKELNYDIVNSFIDYIEIGEKDKKKKTQDVIIHWNF

SEQ ID NO: 26815 - protein, 502 aa, synthetic construct
MEIQIREGSREQKRKLKVCAYCRVSTDADEQENSLENQVRHYETVIKANPDYEYAGVYSDFAISGFKEKRPGLQKMLADAEKGKIDLILTKSVSRFARNTSIVLEATRKLKELNVGVFFELQNINTLSGEGELMLTILAAFAQAESESGSAGAKMVYQRKYEAGIPVQYLERSFGYTKDERGVFVADEAEAVWVRKIYKMAAEGYTPASIKRYLNENGIKTVGGVQWVDSTVFRLLENEIYKGDYIMHKHFVNEERKLVRNRGEVDAWYIEDDHEAIVSPELWQKAQDALAAKRDYLAEGSVIEEFTEENYPYMNKIYCAKCGYPLYKRIYSKGNRLNWGCSGTKRYGKTFCDGINIPDGVLRSAWHFKENTYIAEKASDKGVKKFTYLKEQSWKRRYKKKQPPAIPENTEAEYPYREKIFCALCGSRLVRYVNPQSHKVTWVCSRRKRKGKDACDGTRIPDTIIKGWGEIKKDIYIQRKDDKNGKKRYSYTSKKPEGADRA

SEQ ID NO: 26816 - protein, 404 aa, synthetic construct
MIIKKVMPKIPVAKKRVAAYCRVSTFRNEQDESFETQQKYYEELIQSHPDWELVKVYADRHSATRVKNRPGFQEMVAAAEAKKMDIIICKSISRFSRNMVDCQQYAKWFRTLGVTIIFEEQNIRTDDPTCDFVLSILAAVAQDESHSISENEKAAYASRFARGEYNLGNNRILGYDCVDGELVPNKDAWIVKEVFRRFIEGESYRQIAKELGELGAQSLHSKKGFGVETLRYMVSNETYVGDKRLQKKAPLDYLTKKPDPNQKVESNYLWDDHEAIIDRETWDKAQKILEKRKELAQVGIRKTNREHHFLYGKVFCGECGAPFLRRTLKAAGGSKTQSTYKAWNCRNRQKGKGKERCGNRFVKEKELIEAILQELEWPTMDQDRFEKEVSKVLVYPDHIEVEKN

SEQ ID NO: 26817 - protein, 503 aa, synthetic construct
MEITVEKVDTGVQKHGFQALSTLKTVRVAVYARVSTDQEIQLHSLEEQMKAFRAKIAQHPGWMLVDVYADEGISGTSVKKRKEFLRMMEDCEVGKVDYIMAKSISRFARNTVECLSYVRHLQSIGVQLYFEKEGLDTATSVSELILTVMAAFAQEESRSISENLKWGIRKRFESGESRWTKTYGYRKTKDGEIVIEPDEAAIVRMIFKMYQYGIPMTDILDELTFIQAPSARGKQTWNKTALKYLLENEKYIGDMRLQKWVSVDHISHRSVRNDSTVIPVYNVRNHHVPIIDRHTYQQVQHIMELKSPHGEYSRYPYFDTNIVCPLCGKKMIPRVMKVNSHKRILGCFDVDGCRGYAVKGYLVDAALLKAYNTLEIKEKKRTVAMQRMLEIKAENPKLDTVQYYWLDDLVGHIEFKQDTMRVFWKCGLESEVALNASKVEEPTHVAELYRNSLDRAQRSENKPVSVVRADKKSVNTREAQRNAAMQTAKNLRAKENGVAANDY

SEQ ID NO: 26818 - protein, 522 aa, synthetic construct
MSSVDKTAVIYARYSSHGQTEQSIDGQIAAAQKYAEGKGYTIIHIYADRAMTGRNDDREQFQKMLSDTATHQFGVILLWKIDRFGRNREEIAFNRYRCKKNGVRVERVAEDVPDGPEGVILDSVLEGMAEYYSLQLAQNVRRGQRESAKKSQSNGGTRMIGYKVNPDTKRYEVDPDTAPFITEVFRRYAGGQTMAEIAAWLNAQGLRATRGGMFTVNSLHRLLKNEKYTGVYIFRDIRNEGGMPALIDRATFDKVQEMLKVNRRAPSRVWSRAEYLLTDKLFCGHCGAPMAGVSGHGHTGVKHNYYTCLNRKRKKSCTKKSVRQDVLEPLVLKSIRNLLQDDATLKYIADRVWAEYERSDTSGDTIRALDRQIADVDRALSNVMKAIEMGIINEMTKARMDELTEQKQALSAARADAGLARGFKLTRNMVLYFLRKMAAMDISDRDSQKRLIKTFVNAIYLYDDHFDIAFNYTENGKVIVKMQEIDDASTGGAFGCCAQCPTKIKAPAVPRRVFLFWCYVSC

SEQ ID NO: 26819 - protein, 510 aa, synthetic construct
MSYFIYARKSRKDADLEALGIDVLERHITTLLELAKTLSLPIGAIYREVVSGDSIDSRPVMSQVMAEVESCMWDGCLVMDVDRLARGDTIDQGRVQRAFFYSNTKIVTPNKTYDPANEYDNEYFEFSLFMSRREYATIKRRMQRGRERSSSDGYYVGNIPPYGWRRVIAPDGKHFSLAPDPTESPVLDLMYDLCGNKQYGYQKACTHMAEMGILSRSGRPFTPSTLKGIISNPANIGKVRWGHRKTVRTVKDGKISRSRPHSSDYILADAVWPPRISADLFQRANQPKGSCSAPVRDDRPIQNIFAGLVRCSQCGRLMVRKKAHTKTPYDILICQYTECPTVGIRIDELELALLEWLRNYIDKYELTDALPEDVENVAAKEAIVKNFEKEHETLLKQRESLFDFLEQGIYTKEIFIERSNALERRVKECMEHIISAQNDLHATLALQANRKNFVPRCKNLLGEWGRLTIPEKNSALKVLIEKIMFTKTKRNKKGQDRSDFEIDVFPKVPK

SEQ ID NO: 26820 - protein, 498 aa, synthetic construct
MQIEVRKAEMGKEKKRLKVCAYARVSTEASEQENSLENQVSHYTEMIQANPAYEFAGVYADFGISGFKESRPQFLKMMQDAKNGKIDLIITKSVSRFARNTAIVLKASRELKERNVGIFFELQNINTLTEAGELLLTILAAFAQAESESASESSKMAYLHRIENGEVVAYLERSYGYEKDENGEYRAKEPEASVIREIYDLVIQGVNCTNIAKVLNARNIQTVQGAEWTASTVFRIVENEIYKGDVLMQKTFIDGKRHQVQNRGEKAMYYAKDNHPPIVSEKIWEKAQRKLEDMRAERAEHSVIQEFTEENYPYMNHIFCAKCGWPLKPRVYSHGHRLSWDCSGQKRGTKKFCTGIHILDNDLQKMKIEGNRYFSETVDKYGEVHLKHVGERTWKNKHKKKKFNHKDLYPELNEENYPYYKRLYCARCGSRLGRYISHGTVRWICSSYKRKGQAKCPGVRIPDEIIKGWNLPDGKIYIMGKEDKNGEKHYSYTSESAL

SEQ ID NO: 26821 - protein, 465 aa, synthetic construct
MARSITVIPASQPYRVGGRTQQKTRNLRVAAYCRVSTDQEEQLNSFENQVEYYTKYIQDNPLYQMAGIYADEGISGTNTKKREEFKRMIRDCEEGKIDLVITKSISRFARNTQDCLEYSRRLKNLGIGIFFEKEHINTLDASGELLFTILSSLAQDESRNISENCKWGIRSKFKKGIPQVDCTKFLGYDKGDDGKLIVNKEQAKIVKRIYREFLNGYNPAAIAKMLMEDHIKTGTGREEWRSASVRAILKNEKYMGDALLQKTYTADFLTKKVKKNHGEVEQFYVKESHEAIIPKEQWEAAQLELERRDSYMQKLGLTFYGYGSEINPFSCRVVCGKCGAVCGKKSWKSRGVEFWQCNNRSKNHGVKGCASENLPHENLLKGFITAWNQIVVEREQYLPKWEKKKKEGNPLEKLRAEQMIELTLQPPLTKMLPELGQMVLERVIVQGKEIMVIRFLDGTEIKVRI

SEQ ID NO: 26822 - protein, 523 aa, synthetic construct
MNICCYGRKSIYSDHSDSIDNQFRMCRDYVEMKFSGQVDSFLEYQDEAFTGANTKRPDLQRLLTDISAGNCDVLIVYQLDRLSRDVRDFANIYAILEEHRVKFISIKENIDTSTPIGRAMMYVTVVFAQMERETIAARVADNMIGLAKKGYWTGGNPPEGYVRTRIEVNGKKHCSIVPDPEGVKYVNWIFDTFLQNDYSLQSMETAFKNQGIRTRRGAFFSTAQLHKILTMPYCVQATPEVYDYYVARGCQMDPESPRESWDGTCGVMIYGRTTQKNKKHQMQPPEKWLVCLGAHEPFMPADKWLAVQARFCRNKFDKTMKYDVPLLKGVLRCSCGSIMCVARKKKKEGVSSWYYCLKRMRQGKEVCDSHQIKCELLDQKVLELLQSIKRDPGVIQKFAEQNTEVLSGPDPKVLASKINTCQTRIDRLVSSLSLAADSSAQKYILAELERLDLEIQALRREHNLALAVERKRSLQQQDTLSKVSEINRLVSDLDSFSAAEKNAIVKDVIKKCVWDGESLSIML

SEQ ID NO: 26823 - protein, 519 aa, synthetic construct
MKRITKIGTTATVETKKTRVAAYCRVSTSSDEQLISLDAQKLHYEDYIQSNDDWEYAGLYYDEGITGTKAEVRDGLQALLRDCEDGKIDLIITKSISRFSRNTTDCLEMVRRLVELGVFIFFEKENINTGSMESELMLSILSSLAESESVSISENSKWSIRRRYQNGTFIISYPPYGYANIDGEMRIVPEEAEVVKRIFAECLAGTGTYTIAKRLNADHIPTQKNGKWHGGTVNGILTNEKYTGDVLFQKTYTDDSFNRHTNYGEVDQFFCENHHEAIISHEDFERVQGVLAQRAAEKGNGANTSRYQNRYTLSGKIRCGECGTTFKRRSHYKPSGNYIAWTCGKHIENRHACSMLYVEETAIHDVFVTMINKLVFGHQKILKPLLGSLKNTDDKDKLNKIRRIDQEIENTAMQKQTLVCLAAQGILEPAIYNEECSALAIEEERLLAEKKSLISDIGGDRTKLQELEKLMQFTAKGHMIEHFEDEMFSDFVDKIVIESRECAVFHLKCGLQLKERLVR

SEQ ID NO: 26824 - protein, 523 aa, synthetic construct
MRFFSYGRKSVFSDKSDSIDNQFRMNREYCESKFSGQVDSWQQFSDEDFTGANTSRPDLQRMLSFIKGGFCDVLVVYQLDRLSRDVRDFANIYALLEEHGVMFISIKENIDTTTPIGRAMMYVTVVFAQMERETIAARVTDNMLGLAKKGYWTGGNPPVGYVRKHIVVNGKKHCSIEVDPDGARYVTQIFDTFLAYNCSLQGMETRFKNQGIRTQNGKFFSTAQLHKMLTMPYCVEATPEVYDFYAAKGCIMDPGSPREMWDGSVGVIIYGRSTEKNKKHQAQPPEKWTVCLGKHKPFMPAEKWLAVQSRFTQNKCIKDAKWPVPLLKGVLRCKCGNLMQVSRKKKVDGTCSSWYYCRKRMRQGVNACDMGQIKCDLLDEEVLELFRGITADPALIQKFVKAEAPADVPDLKAAQARVSACERKIGRLAASLALAEDSAASKYIIAEMERLDVELGALKREASLAEMESHRAAASAKDAKATAAEIAKLIHGLDGFDDKEKNAIARAVIQECTWDGERLFIKL

SEQ ID NO: 26825 - protein, 448 aa, synthetic construct
MERMIQKVTPPARKKAPKLKRVAAYARVSSGREAPLHSLSAQISQYSGMIQKTPGWQYAGVYADEALTGTKDSRGEFQRLLADCRAGKIDMIITKSVSRFARNTVTTLRTIRELRLMGVDVFFEEQNIHTMGEDGELLLTLLAAYAEEEARSVSENQKWRIKSNYEQGLPWSITMYGYRQVNGRLEVVPEEAEIIRLAADLYLEGYGRYKLEDAFAAVNIKGRHGANMGGNSIVDLICNEKIVGDMLLQKTFVVDPITKELRKNNGEKPQYFVEGSHEGILDRETYEKVLAERARRAAAYKPRSGSYERNRFPFSGKIHCGKCGKSFTRKVLNGNTPYEKRGWLCRTFNQKGKAHCDAKQIPEEILKWVSAEAMGLPEFDEAAFAAKVEEIQVPENGVLVFVFYDGHTVTKTWDNPSRRHSWNPENRQRARELALRQAAERRLAKCQQ

SEQ ID NO: 26826 - protein, 537 aa, synthetic construct
MPAVTAAQVTVIPAKKDRLPINVLSNEARKLRVAAYARVSTNNEEQLTSYEAQVDYYTRYIQSKDEWQFVEVYTDEGISATNTKKRDGFNRMVADALSGKIDLIITKSISRFARNTVDTLTTVRKLKEKGIEVFFEKENIRTLDGKGELLITIMSSLAQEESRSISENVTWGQRKRFADGKVSLPYRRFLGYEKGPDGLPVIVESEAVIIRLIYRLFLYGKSPSAIATYLTDEGIPTPGGKKVWRAKVVESILTNEKYKGDALLQKKFTVDFLTKKQKVNEGEVPQYYVTNSHPAIIEPELFDLVQYELKTRKTDGRFTSCLHPFSGRIICGECGGIYGSKVWHSNTENRSLVWQCNEKYRGQHCSTPHLTEGEIKAAFLAAFNIVLGNRDEIIEAYEEVIAALTDTADLDAEQETLENESEVVLGLIQKIISENAQTAMDQEEYNRRYDAYSERFEAARKRLAEIAELRQERNAKKTRIRLFMENMNNHQELVQSFDEELWYSTVDYVTVYEDKRLVFTFHDGRQVEITAELWRAA

SEQ ID NO: 26827 - protein, 573 aa, synthetic construct
MAYNAQNKTGARVAIYVRVSTLHQIDRDSLPMQKQDLLAYAKLMLNTDDCVIFEDAGYSGKNTDRPKFQEMMSQMRAGAFTHLLVWKIDRISRNLLDFATMYNELKALGVTFVSKNEQFDTSTAMGEAMLKIILVFAELERNMTSERVTATMISRANNGLWNGGRIPFGYDYDYETHEFSVNEEESKVVILMHDMYEQERSLVRVVRELNERGYRSRAGNLWSPVSLLIILRNVFYCGDYRYNMLKEGDRQKVKDESEWVTVENHHVAIIPKDQKERIMATLDSNSKLCKQRNIYKSSKHTHVFGGLIYCGSCGKPLGSTPGNLTRDGWHYSKYTCPTRRKSVTLCTGKSTSDPIIGEFVFNYILNMLNAQNDFEKISSPEELEKLLLIGDTFAYIDHIEPNGLNDLFNVLSSGAVKGAVFGKGACLPTKKATVEPEIARLRNEKQKTERALDRLRSLYLYADEAMSEAEYMIQKNKLEETLEDINDQIGMMNTDSWQQSVSDEEFIQRASEFIIAQKLSGRKYVNYKRLAMSVDSEVLKNFVVSIIDSITIQDGLVSNIVFKNGLCHTFIFR

SEQ ID NO: 26828 - protein, 536 aa, synthetic construct
MQTGKITALYVRFSYDDGIDAESGSIEHQKSLLRSYAESNGFTDLSYYADDGYTGTNFNRPDFQRMLGDIHKGFVSTVIVKDMSRLGRNYLMVGQYVEIEFPKHNVRFIAISDNVDSAKGMNDLLPIHNLMNEWYSRDISKKVRAMIRQKGNSGQSIASKLPYGYYNTPEDKQTWLIDESAANVVHRIFDLYLNQSFGMYQIARILKAEGIPRPTYHRRMAKGIKVEADDLCVWSASVVRDILQHREYIGDTVNFRTEITSYKNKKVIHNSDDKLKIFPNTHPAIIDKETFQKVQDKISKEIRHTRNVHSYLFADYLYCMDCHSRMHGRQCYLKGGRTLSAYECSTYRKSKGCCFHGVPEMYLQAEVLAKIQNVLAFAKSNSAEFRQNISKALEEQSDGSKAVIQEELDKAQARTAEIDKYIQGLFEAKVRGEIDGSLFASLKKTYDEEKEQLNKLIIDLITKLSRENETDEKIQLLYAAIRKYDAVWELTPEVLTDFIEKIEVGQVSAENKKISFELRDNQISVFFWGVGIIDFM

SEQ ID NO: 26829 - protein, 486 aa, synthetic construct
MIIAAAYVRVSTDEQTDYSPAAQLADIKEYATHNGYHIPEEFIFMDEGISGKRADKRPAFQAMIRQARKKSNHIQYIIVHKFDRFARNKEDSVLYKALLKKDGVKVISVKEPIPQDDKFAVIYESMLEAMAEYYSLNLAEEVNKTMIKKAQAGEWQATAPFGYKNENKSLTIVPEEAKMIRYIFEQYIAGTSMFALSRQMNQMGYRTHRGNVFEHRTIQYILNNPVYKGYLRWTPGKKINRNFNDSASIVAKGDWEPIVSKEIWDAVAARFKSEKRTYYKHKRPETEGIHWLSGMVKCSSCGRSLVVGAKYKSGAVQFQCGGYCHGQCHDSHAVSSNRLIPAILSELEKIATHPDTEGCRYTIRRELPASDELDIYVPLLAKAQQRLKKAKDAYLNDIDTLEEYRSNKMNIEKEIAELKEHIAEIEEQQNMPFDQAAFSTKIASVIEILRDDSRQMEDKRKAFKSICDKIIFHKHDSSLELFLIDQ

SEQ ID NO: 26830 - protein, 430 aa, synthetic construct
MKKIVKDITPELRANDTIKRVAVYARVSCEKDTMVHSLKAQIDYYRKFIMKNPGWKFAGIYADEGKTGTKEAREQFQALLTECRNGNVDMIITKSISRFARNTVTLLSITRELKELGINVYFEDQKMDSMSSDGQLMLTLMAGIAQAESKDCSDAVKWRIRHGYEQGRASSFKILGYRWDDGNVVMVPEEAPLVKRIFDLYLSGKGANAISKILNSEGVTAAGITKWAPTTIRNVLLNEKYYGDLLLQKSFVEDHINKRKVINNGELPQYFIEDDHEAIIDRQAMSDVKNEIAIRRARFYHGQGKESCLTSKIKCPYCHSNYHRKKINGISKWSCATSNRKGKSMCPKSKDIREDVLLAILAHQLGYKDFDEKLFAEQVDYIECFDDHIITHFYDGSIKNSKWSNPSRKDSWTDDMKEKARQRGLNQYGK

SEQ ID NO: 26831 - protein, 684 aa, synthetic construct
MSILQTIKTIIRVVLYLRLSDEDKNKLSKEELSQSIKNQEIMLRDYAEEQGWEVVGVYNDDDWSGSDATRPDFNRMIEECKNGNVDIVLCKTQARFARDMELVEKYVHNLFHEWNVRFITVVDRIDNARKETKKTSQILGLTDEWYLEDTSLNIRETLKSKRKDGQLTSSFATYGYMKDPENKNHLIIDPISAEVIKRIYDEYLSGTGLDKIARRLNEDKILSPYEYKLLNGSKLKIPVIKDYVNYGYIEKTGTYMLDVSFTNKEEYILKDLVSFNYITTDMKNFNNKCDIVLKKYTNNRTKIYYSENDNIDINNFNIDDCILLNENDVIPKTAKVIISHTKELDRTHTINYQFEITLKENRDRVDYYINICGKGADEIKKSDFIHNIRKKFKWSSSTIRTLLTDEVYIGNMVQFKSTTVSYKNHTVVWNDDETRIRKDNTHEPIIVKDIWYTVQERLENTARSCKGGTVHPLCNKVYCSNCNQIFTKTGTRRSDGTGYLCCKDKKTNWSNCDNKASIREDQLHQFILEKMNEMLKKFYEEDDLKEMQNEVIEQDLYKDKLNSLEKELQSINKELQGKSTYFQKLYEDRTNGILPEKEFLILMNKYKDDNEKLEERQKIVKKEISSTLAKKETVKTKKNIFKKYRHIEELSIEIVEDFIDKILIGNYDETTNSRDIKIIWNFTI

SEQ ID NO: 26832 - protein, 541 aa, synthetic construct
MGTTKNAVIYARYSSHSQREESIEGQLRICHEYAKAEGLAIVGEYIDRAISGTTDARPDFQRMIDDAKKKQFSYVIVYRLDRFARNRYDSVLYKHELKQCGVKVVSATEGIGTGDESILLEALIEASAEYYSMELSRKIKRGRQDSAMKGNFLGGAVPLGYKVVDSKFIIDDETAPIVRYIFERYAAGIGKKQIIDELTAKGYMRRTGKPFTYRAFDSVLRNRKYTGEFTQTGITVEGGCPAIVDTEMFEKVQARLEINRRAPAKAKAKTEYLLSGKMFCGYCGEPMIGISGTGRHGKTFYYYSCVGRRGKSGCKKQHEKKDFIEWYVCEQTVQYMQDPERLSHVAKRIIEINDAEFDGGKVKELERAVENCDSDIRKLVDALTTIPDAGRAALYDKIERIGAAKADMEIDLAKLRVLSEVRYKQEDVEAWIRSMCRGDLMDFEFRRQLIDVFINSVYLFDDRVVIVYNIKNGKQVSAIDVLNAVEELDGVELFPDSAEDSSAGGNGSFLVADAPPYMKNPNLFPIGNGFGFLIFIKDIID

SEQ ID NO: 26833 - protein, 523 aa, synthetic construct
MAKVTTIPATISRFTATPINEKKKRRTAAYARVSTDSEEQLTSYSAQVDYYTNYIKSRDDWEFVSVYTDEGITGTNTKHREGFKRMVADALAGKIDLIVTKSVSRFARNTVDSLTTVRQLKEKGVEIYFEKENIWTLDSKGELLITIMSSLAQEESRSISENCTWGQRKRFADGKVTVPFKRFLGYDRGPDGNLVLNKDEAVIIRRIYSMFLQGMTPHGIAARLTADGIKSPGGKDKWNAGAVRSILTNEKYKGDALLQKSYTVDFLTKKKKVNEGEIPQYYVEGNHEAIIQPEVFELVQQELERRKSSRGRHSGVHLFSGKIRCGQCGEWYGSKVWHSNSKYRRIIWQCNHKYDGEEKCSTPHLTEDEIKAMFVSAANKLIGKKAAIISPLRASLDVAFDISALEAESAELQDEIMVVSDLIEKCIYENAHVALDQTEYQKRYDSLTARFDTAKTRLEEIEAAIADKKSRRAAIEAFLDTLTKADLMEKFDPALWCGLVDFVTVYAKDDVRFTFKDGQEIKA

SEQ ID NO: 26834 - protein, 588 aa, synthetic construct
MRIVNKIEAKTPQMPRRKRVAAYARVSMESERLQHSLSAQVSFYSSLIQSNPAWEYVGVYADNGITGTKAEAREEFNRMIADCEAGKIDIVLTKSISRFARNTVDLLNTVRRLKELGVSVQFEKERIDSLTEDGELMLTLLASFAQEEIRSLSDNVKWGTRKRFEKGIPNGRFQIYGYRWDGDHLVIHEEEAKIVRLIYDNYMNGLSAETTEKQLAEMGVKSYKGQHFGNTSIRQILGNITYTGNLLFQKEYVVDPISKKSRINRGELPQYFVENTHEAIIPMEVYQAVQAEKARRRELGALANWSINTSCFTSKIKCGRCGKSYQRSNRKGRKDPNANYTIWVCGTRRKTGNAHCQNKDIPEQMLKDACAEVMGLDMFDEIIFSEQIDHIEIPAPNEMIFYFKDGRIVPHHWESTMRKDCWTDERRAAKGRYVQEHQLGPNTSCFTSRIRCDSCGENYRRQRSRHKDGSFDSVWRCASGGKCQSPSIKEEALKNLCADAMGLEEFSEAVFREQIVCIHITAPYQLSIRFFDGHTFETAWENKRKMPLHTEERKQHMREVMIQRWREKRGESNDNTGDDKPIHGNADQ

SEQ ID NO: 26835 - protein, 594 aa, synthetic construct
MNITQRMYFGQSPLDKDRNRRIAFYGRVSTQHEAQVDALGNQMQWYDDQLRYHPNWQVVDRYIDEGITGTSAKKRPSFMKMLSDAKCGKFDLIVTREVCRFARNTVDTLQLTRELRNFGVEVFFVSDNIWTMDGDGELRLSIMATMAQEESRKISERVLAGQKISRQNGVLYGSGNIIGYDRDKVNRTYVINEEQAATIRTIFTLYSQGYGEKAIVNELSRLGCKDGRGNVSWSCTKISRILRNATYMGYICYNKSKVNNYLEKKRVKNLDESTFIYVKGDFEPIVSEALWHECEHIRKSRISSLRLPDGETRRKGARTTKNLWVAKLRCRCGSSYRIFNWRKLKDGTPVFGYQCNMRTVNPTRSFVMEHNLTDQLSCDAISIPEWKLELMAKKIFEKVWGDQNKAILRACQMLESCQNSHSTAAMSAVPIQSKIEKIKKRKLNYGAMRADGELEREEYQALCKQADDEIARLEKELQALTPAPETQSVSTNMKAIRDFLEQKVDVHGACLAPELIDQFVEVVTPIGDYTYRWKLNTGRKKSKDERTDLMAVTDSPILAFTIDFETAKRYREANKMPHQFRRAAWTDLTVEVYL

SEQ ID NO: 26836 - protein, 684 aa, synthetic construct
MSILQTIKTIIRVVLYLRLSDEDKNKLSKEELSQSIKNQEIMLRDYAEEQGWEVVGVYNDDDWSGSDATRPDFNRMIEECKNGNVDIVLCKTQARFARDMELVEKYVHNLFHEWNVRFITVVDRIDNARKETKKTSQILGLTDQWYLEDTSLNIRETLKSKRKDGQLTSSFATYGYMKDPKNKNHLIIDPISAEVIKRIYDEYLSGTGLDKIARRLNEDKILSPYEYKLLNGSKLKIPVIKDYVNYGYIEKTGTYMLDVSFTNKEEYILKDLVSFNYITTDMKSFNNKCDIVLKKYTNNRTKIYYSENDNIDINNFNIDDCILLNENDVIPKTAKVIISYTKELDRTHTINYQFEITLKENREHEDYYISICGKAKDEIKKSDFIHNIRKKFKWSSSTIRTLLTDEVYIGNMVQFKSTTVSYKNHTVVWNDDETRIRKDNTHEPIIAKDIWYTVQERLENTARSCKGGTVHPLCNKVYCSNCNQIFTKTGNRRSDGTGYLCCKDKKTNWSNCDNKASIREDQLHQFILEKMNEMLKKFYEEDDLKEMQNEVIEQDLYKDKLNSLEKELQSINKELQGKSTYFQKLYEDRTNGILPEKEFLILMNKYKDDNEKLEERQKIVKKEISSTLAKKETVKTKKNIFKKYRHIEELSIEIVEDFIDKILIGSYDETTNSRDIKIIWNFTI

SEQ ID NO: 26837 - protein, 684 aa, synthetic construct
MSILQTIKTIIRVVLYLRLSDEDKNKLSKEELSQSIKNQEIMLRDYAEEQGWEVVGVYNDDDWSGSDATRPDFNRMIEECKNGNVDIVLCKTQARFARDMELVEKYVHNLFHEWNVRFITVVDRIDNARKETKKTSQILGLTDQWYLEDTSLNIRETLKSKRKDGQLTSSFTTYGYMKDPENKNHLIIDPISAEVIKRIYDEYLSGTGLDKIARRLNEDKILSPYEYKLLNGSKLKIPVIKDYVNYGYIEKTGTYMLDVSFTNKEEYILKDLVSFNYITTDMKSFNNKCDIVLKKYTNNRTKIYYSENDNIDINNFNIDDCILLNENDVIPKTAKVIISYTKELDRTHTINYQFEITLKENREHEDYYINICGKATDEIKKSDFIHNIRKKFKWSSSTIRTLLTDEVYIGNMVQFKSTTVSYKNHTVVWNDDERRIRKDNTHEPIIAKDIWYTVQERLENTARSCKGGTVHPLCNKVYCSNCNQIFTKTGARRSDGTGYLCCKDKKTNWSNCDNKASIREDGLHQFILEKMNEMLKKFYKEDDLKEMQNEVIEQDLYKDKLNSLEKELQSINKELQGKSTYFQKLYEDRTNGILPEKEFLILMNKYKDDNEKLEERQKIVKKEISSTLAKKETVKTKKNIFKKYRHIEELSIEIVEDFIDKILIGSYDETTNSRDIKIIWNFTI

SEQ ID NO: 26838 - protein, 520 aa, synthetic construct
MTEKNIMVIPARKRVGSTAAKEQIKKLRVAAYCRVSTETEEQNSSYEVQVAHYTEFIKKNNEWEFAGIFADDGISGTNTKKRDEFNRMIAECMDGNIDMIITKSISRFARNTLDCLQYIRQLKDKNISVYFEKENINTMDAKGEVLLTIMASLAQQESQSLSQNVKLGLQYRYQQGKVQVNHKRFMGYTKDEDGNLIIVPEEAEIIKRIYREYLEGQSLVGIGRALEKDGILTAAGKPRWRPESVKKILQNEKYIGDALLQKTVTVDFLTKKRVKNEGHLPQYYVENSHEAIIPKELYLQVQEEIHRRRNIYTGADKNKRIYSSKYALSAITFCGDCGDIYRRTYWNIHGRKEFVWRCVTRIEQGPEVCKNRTVKEDELYGAVMTAINRLLAGGNNMIKTLEENIHAVIGETTEYQISEINNLLEEKQKELIKQANKGQDYEHLADEIDGLRDKRQTLLVEDASLSGENERINELIAFIRINKYRTLRYDDTLVRKIIQNVTVYDDHFVICFKSGIEIEV

SEQ ID NO: 26839 - protein, 523 aa, synthetic construct
MAKSVTTIPATLSRFTAAPINSTKKRRVAAYARVSTDNEEQLTSYEAQIDYYTNYINGRDDWEFVGVYPDEGITGTNTKKREQFRQMVADALDGKIDLIITKSVSRFARNTVDSLTTIRKLKEHNVEVYFEKENIWTFDSKGELLLTIMSSLAQEESRSISENCTWGQRKRFADGKVTVPFKRFLGYDMGPDHNLVVNPEQAKLVKRIYGMFLQGQSPFQISRTLTEEGIPSPGGKDHWNPSNIKSILTNEKYKGDALLQKSFTVDFLTKKKKTNEGEIPQYYVKDNHEAIIDPETFEMVQMLMTTRTKGRNRKSSVSIFSSKVKCGDCGSWYGPKVWHSNDAYRKVIWQCNHKFDGQKCATPTLTEDEIKELFLRAANQVIDQKEQFIAIYDQVLSRSLNTTALESELSDLEAEINIAAELIEDCIKENAHVALDQDEYQKRYDALVARFDKAKARHTEVTDLITERMARKHQIEAYLKNLRSREPLTEFRETDWLAMVDYITVHSKKDIRVTFKDGTEIKA

SEQ ID NO: 26840 - protein, 578 aa, synthetic construct
MRKVSKIEPISPSLPPRKKVAAYARVSMETERLNHSLSAQVSYYSNLIQSNPEWEYAGVYADNAVTGTKSSSREEFQRMLEDCEAGKIDIILTKSISRFARNTVDLLEAVRHLKELGIEVRFEKEHINSLSGDGEVMLTLLASFAQEEVRSLSENVKWGTRKRFEQGIPNGRFLIYGYRWEGDHLVVEPEEAKIVRLIYDNFLKGLSTEATEKQLEEMGVKSMKGMHFPNSSIRAILKNITYTGNLLFQKEYTLDPISKKTRKNHGELPQYFVENTHEAIIPMETYQAVQAEIARRQELGALANWSINTSCFTSKIKCGLCGASFVRNTRKNRAKTSQLGERYTFYGCGTNKRKGAHCFSGTIREDVLKEECAKALGLPEFDEDTFSGRVAKVTIPATGTMVFELTDGTSFEHHWSRNAKKESWTAERRKAVSEYRRSRETGWKCYHTFTHFIKCGRCGANYRCQTHKRVDGTVVRSWYCSSPTAVDCSKVGIREDTLKALIADVMGLPEFDEELFNQQLAYATVPADNEIAFHFRDGHEVSRTFAQKRQMPRHTEERKKHMSEVMKAKWRERHAEND

SEQ ID NO: 26841 - protein, 564 aa, synthetic construct
MTQHGAYILARYSTDRQNPDSIEVQVQKCTDWCQKEGLPILGIYADYAVSGMKDTRPQQSRMMDDLRMGGADTVVIYDQSRMFRKMTAWFEFRAELETMGATVVSVTQPQIGGDLRDPTNFLTEGSMALFNQIWALQTRQKVMAKMEFMARQGLHTGGVPPLGYHVRDGRLEIQEAEAATVRRIFKEYASGKTYKSIIDGLNADGIRTRGGKQFGSNSLHDLLKNERYIGTLTYGRAPRRPDGRRNSHGAVPDGIIRLEHAIPAIINQETWAAVQAKLMRNQQIKAGRPGSARDYPLRGKVYCELCKKAMIISTSTNASRTKYYYYACSGKQRLHNCDLQPIRADDLEQHVATAVRSILGNPHNMGRLMQILRDERDKLTDSAATKLQALVDRKTEVSRQLDAATDAVLQGLVSSTLRAKIQGLEAEKAKLDMDMRQLKQDVTASRVPEEQLQKILDTIINAGTSDDTILLSVVSRVEVGPEFITIWTILDTDQKGELNPTGETVPVSLGDTPPAPRWSKLYVACSDFFQKSERAHAAAPPFQIEPTSLGFDLVLGTGLKERHL

SEQ ID NO: 26842 - protein, 523 aa, synthetic construct
MELSRNITVIPARRRVGNTAAAEQRPKLKVAAYCRVSTDSEEQASSYEVQVAHYTQFIQKNPEWELAGIYADDGITGTNTKKREEFNRMIQDCMDGNIDMIITKSISRFARNTLDCLKYIRELKEKNIPVFFEKENINTMDSKGEVLLTIMASLAQQESQSLSQNIKLGLQYRFQNGEVRVNHSRFLGYTKDEEGNLVIEPSEAEVVKRIYREYLEGASLLQIGRGLEADGILTGAGKTKWRPETLKKILQNEKYIGDALLQKTYTVDFLNKKRVQNKGIVPQYYVENSHEPIIPRDLYMQVQEEMIRRANLHSGVNRKKRVYSSKYALSSIVYCSKCGEIYRRIAWNNRGKHSTVWRCCTRVEHGPTVCDAPTIQESDLQAAVVQAINLALGNRESMLATLQENVEAVIRQEDETSSEGIEEKLLELQKELLKLANSKKDYNSVADEIDRLRKLKQNALVESAEREGQKQRIREMREFLERQSTEITEYDELLVRRLIEKVTVYDERFEVEFKSGTKVDVVR

SEQ ID NO: 26843 - protein, 520 aa, synthetic construct
MKRITKIAENASLGKKKIRVAAYCRVSTASEEQLVSLAAQKAHYENYIKSNDEWEFAGLYYDEGISGTKKEKRDGLLSMVAACERGTIDMIITKSISRFARNTTDCLELVRKLLDLNIYIYFEKENLNTGSMESELMLSILSGLAESESVSISENEKWGIKRRFQNGTFIISYPPYGYANVDGEMVIVPEQAEIVRQIFEDTLAGKSTHAIADELNKRGVATKRGGHWTPGTVNGIIGNEKYTGDVLFQKTYTDSSFNRHQNRGEADQYLMQDHHEAIITREEYELANAVLKQRGREKGNGHDTGRYQNRYGFSGRIYCGECGSKYKRRLHYKPSGQYAAWSCVTHLADKEGCSQKYITDDALKLAFVTMMNKLVFGQQTVLRPLLQSLRGLNDQSRLLKIEELETAIEKNREQKQVMTNLMASGYLEPALFNKESNELAAEAEALQQEKERLMRSVNGDMVKVEELQRLLRFTSKGTMMTEFDDEIFLSFVERITVLSRKEVAFELKCGLSLRERLVES

SEQ ID NO: 26844 - protein, 464 aa, synthetic construct
MARSVTVIPARSQKVRTGHKAVQEKKIRVAAYCRVSTDQEDQLHSFEAQVEYYTKYINEHENYEMAGIYADEGISGTNTKKREQFKKMIADCEGGKIDLVITKSISRFARNTQDCLAYSRKLKNLGIGIIFEKENINTLDSTGELLFTILSSLAQDESRNISENCKWGIRTKFKNGEMHLNTFKFLGYDKDENGKLVINKEQAKTVRRIYRDFLIGINPAQIAKELTEEKVPGCLGQTKWYPSTVTGILKQEKHMGDALLQKTYTADFLTKRQVRNNGEIAQVYVKDSHKGIIDKQTWNAVQEEFDRRERFMESHGTDRYSYGADCMPFCEKVFCGECKSLFTRHSWRSRGIVQWQCKNHRKDGKVACTNAYVDNADLEKGFVKAFNRLVTDRDKHMERWQQMKSDGTPLEKIRAGQMMEAVENEPLTRFVPEIAQLVLCEVTVLGAKKYEFFFLEGSRVKVSV

SEQ ID NO: 26845 - protein, 523 aa, synthetic construct
MNICCYGRKSIYSDHSDSIDNQFRMCRDYVEMKFSGQVDSFLEYQDEAFTGANIKRPDLQRLLVDIAAGNCDILIVYQLDRLSRDVRDFANIYAILEEHHVKFISIKENIDTSTPIGRAMMYVTVVFAQMERETIAARVADNMIGLAKKGYWTGGNPPEGYVRTRIEANGKKHCSIVPDPEGVKYVTWIFDTFLQNGYSLQSMETAFKKQGIRTRTGAFFSTTQLHKILTMPYCAQATQEVYDYYAAKGCQMDIESPREQWDGTCGVMIYGRTTQKNKKHQMQPPEKWLVCLGAHEPFMPADKWLAVQARFAQNKFDKTMKYDVPLLKGVLRCSCGSIMCVARKKKKEGVSSWYYCLKRMRQGKEVCDSHHIKCELLDQKVLELLQSIKRDPGVIQKFAEQNTEVLSGPDPKVLASKINTCQTRIDRLVSSLSLAADSSAQKYILAELERLDLEIQALRREHNLALAVERKRSLQQQDTLSKVSEINRLVSDLDSFSAAEKNAIVKDVIKKCVWDGESLSIML

SEQ ID NO: 26846 - protein, 513 aa, synthetic construct
MATKKKPNFINKAADNLAVIYARFSPGPRQTEQSIEGQVRDCKAYAEQMGLKIVGIYADHHISGSDFENRDEFNRLIADAEKGQFHYIIVWKIDRFGRDREEIALNKVRVKKYGVKLLYAKENIPEGPEGIILEGLLESLAEYYVADLRQKVKRGQRESAIKGFAPGGGRAYGYDIVDKCFVVNEVEAAVVLKIFQLYDTGCTAPQIVASFDKLGIKRRDGKSFTYSGIYHILRNEKYIGICMYDDISIPVPRIVPQELWDSVHAKFHTRVGQAASYKADEKYLLSLKCRCSLCGDMLVGESGYGKHGVRYSYYKCATRKRRGSKCSLRTFRKDYLESIVMEHTIKDVLQDDVIEYIADRVMEIQAKNTVNYTLQGLKKQYAEADKARGNIMKAIEMGIITDSTKSRLVELEAQVEELKLLIAREEIKKPALTREHVLFWLQSFRDGDLSDPRFQEKLCDVFINQVIAYDEKVVIIYNFSDANNNHSINFTSVLRGSDEHPIMRHGGFEPPTT

SEQ ID NO: 26847 - protein, 506 aa, synthetic construct
MTKIITAGIYVRVSTSEQAEQGYSIQTQIKACKDKAYELGAIDILEYADEGFSGAKLDRPAMTRLRDDIRKDKLDIIICYDPDRLARNLAHQLLITDEIEKYCREGLIFVSVSFENSPEGRLFYSMRGAFSAYEREKILERIIRGKKGKLQAGRLGNNHLYGYDFDKDTQMYVINENEAKIIRQIFEWYISGISSEQITDKLNANNIPKIWQGKRYKWSGSTVRTIIKNEKYTGIFHGWQYLQVINKCGGYSIKKKDKSQWIDIEIPAIISNEIFEKAQKQIIKNRTYNTRKEKEVHLLTGLAYCGSCGNKIYNHHNIRRKYYVCSILYDKRITDKKICKPKFLHIPEVDELVWNALTKICSSPKLIKEYMTDINNHENTFLNYKEKLCMLNKKLTKLKNSQNDILEWFSDGLIDKETTQKKLENNKQKIEQLNSNKKELLINISNLKEKHTPEDIYNIFKKSTKISIDDKRNILRSILDKIYLTKLDKSKGCKSKLSLKIVFVFK

SEQ ID NO: 26848 - protein, 537 aa, synthetic construct
MQEKLRVAAYARVSTDKDDQTNSLENQKTYFKNYILDHEDWQLAEVYYDEGISGTQTKKRQGFRHMIEDAENKEIDLIVTKEVSRFARNTVDTLSYTRKLKDFGVGVIFTLDNIDTRDSDGEFRLTIMASIAQEESRKISERVKWGQKRQMEKGVVFGRDLLGYTVHHGVLAINQEEAPIIKAIFHMYTNEGKGTHVIARELSENGMRPKRVHQWSNTVILKILRNEKYVGDLCQKKTFTPNYLTHTKKYNHGEEDTVYLKDHHEAIIDRDLWERTQNELERRSPSADQKSKHSNRYWCSGKLFCAECGNRFVSRTKRLKNGEQYKAWRCHATAAHGTLKEDADGNSIGCNNNSINDKALQACMSYCISLIQSEKDSLREEILSEIALVQKNTVKKTDTKRIKKKIEQLEIKKRKAIDLMLDELISKEDLQAQTDWYNTEIKKLNIQLSDSLHEAKEEFRQKNKLEKYIAALDNIMSADSNNELLYKEVLDHIDIHKDNILTIWLKCIPFGIQLKIKTSGRQSCFKTDILETTFIQI

SEQ ID NO: 26849 - protein, 579 aa, synthetic construct
MRNKSLAGRANNRAERPRKVAIYIRVSTTHQIDKDSLPMQRKDLIAYCELILGIEDYEIFEDAGYSGKNTDRPAFQEMMQKIRSGSFSHLLVWKIDRISRNLLDFAVMYEELQSLRVTFVSKNEQFDTSNAMGEAMLKIILVFAELERNMTSERVTATMISRANQGLWNGGRVPYGYSYDAETSVFSIIQDEADVCQLMKTDYFEHKSIIHTAKLLNDRKVPTRSGALWSPTAVWKILSSPFYAGIYRYNHYKGTENRTINPEEEWVLVPDHHPAIFTLEEHEKICDIMDTNKRMSNLPGQKHRAKNVYAFSGILYCGKCGSKLVSTPGRLQADGFRTTTYSCPKKRKTHECDNPSINDLIVGEFVINYILNMLNAKSSFSSISSPAELEEHLLYGGSFKDVQHISEDGLNEFYNLLSRYGSDSSYVFAVKRPRKKKAAVNPEVEALRKDKEKQERALKRLQDLYLYSERAMAEKDFIIQKNEISSRIQDINTRLGMVTHDANSTLSDEDFVRQASHLLITKKLIGREYIYYKSLAQTVSPDVLKIYMETILDSVYVIDGRVSSIIFKNGLTHTFIDKK

SEQ ID NO: 26850 - protein, 506 aa, synthetic construct
MKNAMYLRKSRQDEGGLEETLRKHKEILLDFAVKNNIQISDDDIYEETISGESLYARPEMLKLLQNIDNGMYNAVLCVDVDRLGRGGMSDQGIIFETFKNNDTKIITPRKVYDLNDEFDEDNIEFESFMARRELKIIKRRLKRGTKKSIEEGCYLANAPYGYKNTVVNKKHTLEIVEDEARIVRTIFDLYVNKGMGCQSIAYAINAMGAKPRRTEQFGRTTVMFILKNNVYIGKIVWDKKTHIRKNTRGNSKHIVIYNDKDKWTVCEGLHPPIIDMETWNKAQQIIAERTHPPTNKGEIKNVLSHLIYCGNCGGLMTRTISRGSKNDTKNKKYYYSCKSKGCIKATQCHYVDDIVINTLRYRFKDMVLDIAEQNNVHYIDYSSQIKGIKSELKKLDTQLNSLHDLLEQGIYDIPTFMDRQKTINMRKSELNNQLGIIDKKTSENKMIDEISMMNRIQSVLDVFDRTTPQEKNQLLRTIVDKITYYKKPSDSTDKCRLVITLKPVFF

SEQ ID NO: 26851 - protein, 517 aa, synthetic construct
MEQFDVNEIIMYLRKSRADAENETVEEVLARHENLLQDYALQTFGHIIPAANIYKEVASGETIESRPEIKKILSLAANNRNYKALLVVEPQRITRGDMLDCGTIIRVFKYNNIKIITPSKSFDLQDTYDLKYFQMTLQQGNEYLEYIKFILNRGRISSVKEGCFIGQKPPYGYEKAKKGKQFTLKPSDCADIVKLIFDLYVNKNMGCNQIASELDRRGIKPRYNEYWSAASIREMLKNPVYIGKIRWNYKRTVIHTDEHGNTKKMRIRDNDNAMIVDGLHEAIIDEELFNKAQEKTGKNSRSRTVGELRNPFATLLKCGNCGYAMSYRTYKNKDGTPKGEPRMLCNHQAHCHTPSVGYNEFEKAFISALRLQLADFQIKISGESGGVVAIQESILKNLNKELETLEKQQTKLYDFLERGIYTEDVFLKRNGALSVRRAELNKAIEMQSSAIPETVYYEDKIYKISQAIEMLQNPDLSVAEKNAFLKTFIDHIEYFSELPGKGNRFLENKFNIEIFFL

SEQ ID NO: 26852 - protein, 499 aa, synthetic construct
MIAIYARQSVEKEDSISIESQIEMCTYEARGEAFLVYKDKGFSGKNTNRPEFQRMMQDIKTGQKGITKVIVYKLDRISRSILDFSNMMDIFGKLGVEFSSATEKFDTSTPMGRAMLNICITFAQLERETTQQRVKDNYISRSQKGFYMGGPVPVGFKKADLTIDGIKTSMYEQIPDEVRLVKKVFEMYADVNYSNEDIAKAVRDMPPECRRNRTVTRARVQDFIKNPVYVKADINVYNFFKSKGVKIINPPEDFIGTNGCYLYTGDKKTRKQTDLSNAVLVLAPHEGFIDSDLWIRCRERALDQQQIKRNPKAKNTWLAGLVKCSNCGYALVRKNYLKKNYSYFLCSHKMNDNLCCGCGTIHADEFEKFILQKIKEKLADFKEFKLEGVTANNPKIEELKARQIAIDNEIGEMVKNVAGASETVMAYINENVERLHSEKMQIQAEIQRLGENRYSANEKIICDFDRFDELPFERKRELANAVIKKIYATSDKINIIWNI

SEQ ID NO: 26853 - protein, 519 aa, synthetic construct
MKKVTKIEENKSPKAAGKKLRVAAYCRVSTGSDAQAESLEAQITHYENYINSRSDWEYAGVYYDEGITGTKKEKRPELKRMLADCKAGKIDFIVSKSISRFSRNTTDCLELVRKLLTLNIPVYFEKENINTGSMESELFLSILSSMAADESLSISENSKWSIQNRFEKGTFKISYPPYGYDWDGEQMVVNPEQAEIVKQIFASALAGQGTSAIARKLNEDQVPTKKGGHWNATTVKGILRNEKYTGDCLFQKTYTDSRFNRHANHGEKNMYLAKDHHEAIISHEDFEAAEKMLKQHAREKNISSDSEKYQQRYTFSGKIICGECGGTFKRRTHYTAGTSYIAWCCNTHLSDKDSCSMQFIRDDDLKLAFTTMMNKLVFSSKVILKPYVEGIRDGSSDDSFHRIQELTTQLAKNTEQREELQKLTAQGFIDKILFNTETNKLLSQADEYRKEIEALNNSVSSDVSKVTAATDLLHFAEKGEMLGAYDGELFEKYVRRIIIKSRTEFVFELKCGLALTERI

SEQ ID NO: 26854 - protein, 526 aa, synthetic construct
MQYCLYLRKSRADSEAEARGEGETLARHEKALLDLAKKLNLNITAIYREIVSGETIAARPVMQQLLQEVEQGIWDGVLVMEVERLARGDTIDQGIVAQTFKFSDTKIITPIKTYNPNNEFDEEYFEFGLFMSRREYKTINRRLQRGRMASVKDGKYVANKAPYGYNRIRIENDKGWTLEINKEEADVVRLIFELYTVGEKQSDNTFNRLGTGFIAKRLNTMKVSPKRGKVWVVASIRDILINPVYIGMIRWNWRPQQKKMIDGQLHISRPRATDYMLCKGLHPPIISKETFDIAQDLMRHNPARPIGEKNTVKNSLSGIVVCGDCGRHMVRRPHTKYPDMLICSEPTCNNVGSQLRVVEERILQSLKEWLGEYKISWDITSPPVERISQVSIKKKALQKEQHELDTLNKQISKTHDLLEQGIYTTDVFLERSRALSLRMDEVKEHIAILDKELKTEITREDSAVNIIPKVEKLLEVYHDLPSPKAKNDMLKDVLEKVVYTKKERSKKGNLDNFNITIYPKIPKYIT

SEQ ID NO: 26855 - protein, 527 aa, synthetic construct
MLNVAAYCRVSTDKSDQKNSFEGQKSYFESYIKSHKDWKLTNIYADEGITGTSTKKRKEFNSMIADAKNGKINMIITKEVSRFARNTVDTLQYTRELKAAGVSVFFINDNINTMDNDGELRLTIMASIAQEESRKTSERVKWGQKRRMEQGVVFGRNILGYHLKNGVLTVNEEEAELVRHIFHKYLEGKGLHIIARELQAEGHKTKNGNSEWTNKAIRTILQNEKYVGDLLQKKTITPDFLTHAKKYNNGEEEMVYIKDHHEPIIDRETFDFVQAEFKRKSEVYKNDNSKHSNRYAFSGKLKCGCCGRRYIAHFRKRSNGSTRKIWYCYNSVKNGLEHEVNGEMIGCNNKAVGNELLESAVIQALNDVSFDREAIVKKLTKIINEVVQSHTPTQYNFTKAEQAVKKLEEKKLKNIDAYYDDKISEQDFKMLSEKYQAEIDTLNKEIDEESKKLSVSEDKGDLLQNITDTVTTLANFKEFDESVTREVLEQIMIYSKAKIDVYSRGLDGTQNFFSQSGYILDNKYLYP

SEQ ID NO: 26856 - protein, 502 aa, synthetic construct
MEIQIREGSREQKRKLKVCAYCRVSTDADEQENSLENQVRHYETVIKANPDYEYAGVYSDFAISGFKEKRPGLQKMLADAEKGKIDLILTKSVSRFARNTSIVLEATRKLKELNVGVFFELQNINTLSGEGELMLTILAAFAQAESESGSAGAKMVYQRKYEAGIPVQYLERSFGYTKDERGVFVADEVEAVWVRKIYKMAAEGYTPASIKRYLNENGIKTVGGVQWADSTVFRLLENEIYKGDYIMHKHFVNEERKLVRNRGEVDAWYIEDDHEAIVSPELWQKAQDALAAKRDYLAEGSVIEEFTEENYPYMNKIYCAKCGYPLYKRVYSKGNRLNWGCSGTKRYGKTFCDGINIPDGVLRSAWHFKENTYIAEKASDKGVKEFTYLKEQSWKRRHKKKQPPAIPENTEAEYPYREKIFCALCGSRLVRYVNPQSHKVTWVCSRRKRKGKDACDGTRVPDTIIKGWGEIKKDIYIQRKDDKNGKKRYSYTSKKPEGADRA

SEQ ID NO: 26857 - protein, 420 aa, synthetic construct
MARSVTVIPARSQKVRTGHKAVQEKKIRVAAYCRVSTDQEDQLHSFEAQVEYYTKYINEHENYEMAGIYADEGISGTNTKKREQFKKMIADCEEGKIDLVITKSISRFARNTQDCLAYSRKLKNLGIGIIFEKENINTLDSTGELLFTILSSLAQDESRNISENCKWGIRTKFKNGEMHLNTFKFLGYDKDENGKLVINKEQAKTVRRIYRDFLIGINPAQIAKELTEEKVPGCLGQTKWYPSTVIGILKQEKHMGDALLQKTYTADFLTKRQVKNNGEIAQVYVKDSHKGIIDKETWNAVQEEFERREKFMQKHGTDRYSYGSEYYPFCEKIFCGECGSLFTRHSWKSRGIIQWQCKNHRKDGKVACTNAYVDNADLEKGFVKAFNRLVGEREKHIERWNSMKLDGTPLEKIRAGQMME

SEQ ID NO: 26858 - protein, 526 aa, synthetic construct
MGKKQKTNGGDAVIYARYSSHNQRDVSIEQQVEACRKHAAELGLTVTATYEDRAISGKTDKRPSFQRMMRDAEQHKFAYVLAWKSNRIGRNMMQALVNESRLVDCGVKVFYAEEDFDDNAAGRFALRSMMNVNQFYIENMAEDVKRGLYDNAKKGLVNGSLPLGYKRGADGKPEIDEPKAAIVREIYTRVAAGELFASIADDLNARGIKTARGREWNKGSFHVLCHNDRYRGIYMYGDIRIPGGMPRIISDELFYDAQEAYSMKKDNRYGRARHGAENYLLTGKLYCGHCGGYMVGISGTSKTGEMHYYYACQKHRLEHTCEKKATRRDVIENAVARAIMMYCLDDETIDFIVDSTIAYFKQKDHELHIEAMENELAAVQQAISNLMKAIEAGIITPTTRTRLLDLEEQQAKLSAKINTAKAERVEIDRDDLIAGLQLFRTGDIKNKKFLAKLFNTFLIAVYLYDDNRLKIVFSFTGNHNSVEIPLELDNDCPDSEIVSDETEVRMSHLECRRRGSNPYSVSRKGF

SEQ ID NO: 26859 - protein, 668 aa, synthetic construct
MAYAKKKKILNFWTKKKAALYVRVSTRYQVDKDSLPFQRKKLKEYCKFLGLEDYVIFEDDGYSAKNTERPHFQEMMSRVRSGEFSHLIVWKVDRVSRNLLDFAAMYQELKDHKVTFISMNEQFDTSTAIGEAMLKIILIFAELERNMTSERVTGIMLDRAEQGLWNGARMPVGYRWNDEAKFPEPDPEEVKIVQLIFDKYEEWKSSIKIARYLNNNNFKSKRGGQWTSKLIHDIIRNPFYIGTYRYNLRESGRGPLKLESEWIVRENNHPAIIGKAQFDRCNKIMDQNGSSRDTSDLRARKYVHTFSGHLVCGKCGANMIASKDRARANGWRPSMYRCAQRSRMLDCDNSRTINESYIGPFIFNYIANLARVQKNFKNIATPEKLERELLKGETFDGVAGILPEGLNLTFQALAFRQVGNGTYIPDIDFLGDSDGASDRDQIELLKSEIEKSKNAVTRLTDVYLFDPDSMTKEEFATKKKELAKKIEGMERQLADLLDDSGNDDLADMSFIKKASAFLVAQRIVSKSFVDYVGMAQELDNEILKDFIDQIVDQIVVLDGRVQSITFINGLKHEFRYTAPAELPVCKKCGGRIGSTCGCRTRTFDFSGKRYRRIKVGDPRDMLHGKKDPICPECFAQEGRWHHWNCKIETCPICGGRLAECEHGPNGKK

SEQ ID NO: 26860 - protein, 579 aa, synthetic construct
MRNKSLAGRANNRAERPRKVAIYIRVSTTHQIDKDSLPMQRKDLIAYCELILGIEDYEIFEDAGYSGKNTDRPAFQEMMQKIRSGSFSHLLVWKIDRISRNLLDFAEMYEELQSLRVTFVSKNEQFDTSNAMGEAMLKIILVFAELERNMTSERVTATMISRANQGLWNGGRVPYGYSYDAETSVFSIIQDEADVCQLMKTDYFEHKSIIHTAKLLNDRKVPTRSGALWSPTAVWKILSSPFYAGIYRYNHYKGTENRTINPEEEWVLVPDHHPAIFTLEEHEKICDIMDTNKRMSNLPGQKHRAKNVYAFSGILYCGKCGSKLVSTPGRLQADGFRTTTYSCPKKRKTHECDNPSINDLIVGEFVINYILNMLNAKSSFSSISSPAELEEHLLYGGSFKDVQHISEDGLNEFYNLLSRYGSDSSYVFAVKRPRKKKAAVNPEVEALRKDKEKQERALKRLQDLYLYSERAMTEKDFIIQKNEISSRIQDINTRLGMVTHDANSTLSDEDFVRQASHLLITKKLIGREYIYYKSLAQTVSPDVLKIYMETILDSVYVIDGRVSSIIFKNGLTHTFIYKK

SEQ ID NO: 26861 - protein, 510 aa, synthetic construct
MKGAVIYARYSSERQNEQSIEGQLTVCNKFAEENDLTILDTYIDRAMTGTNDNRAAFQKMLSDAEKTDAWEIVLVYALDRFGRDSIEISVNKYKLKKANKILLSATQRTSLNIDGTKNLDGILLENVYIGLAEYYSAELSQKVKRGLHENRIKGLCTSGTPPYGYKIIDKKAVIYEEEANVIKYIFTEYYNGKVVPDIIADLTKHGILYKGKPFQNTSVYYMLRQEKYIGIARYSDGIYDNIFPAIVDKRIFDDIQLMLENNKKGSRSTDGNFLLRGKLICGYCGRNLQGESGTSRCGKICYYYTCRGRKSIKDCEKKRVKKNDIEDLIAKVTINLFSDKETLNKIADKILSVHEKRLEDNYVIKQLKNEESETQKQINNVMKAIEAGIITPTTKNRLEELETLLAELKDKIMVQEYNNRNKLTKEKIIDYLTKSLYKEPQILFNTLIHKVEVYDDKLIIYYRYTDKKNPDENQDFSFNNPNSGSNCYSVVEITRFELVTYALRTHRSTN

SEQ ID NO: 26862 - protein, 509 aa, synthetic construct
MYLVAYARYSSDNQREESITAQLRAIHNWANANGHVIVKEYVDEALSARTDKRPNFLKMIEDSKIEDWNGVVVHKLDRFSRNRYNSAVYKKTLKDNNKKLFSVLEKLDDSPESIIMEAMLEGLSEYYSANLAREVKKGLTENALDCKHNGGIPPLGYSVKDSHYVVDKRESEIIKLIFNMYKTNHSYVEICSELNLRGYKTKRNKNFSKNSIHDILVNEKYIGNYTFGYGNRAKKRGQPNPDMIKIEGGMPAIIDKDTFFIVQEKMKGRKHMGGSYKAKQVYLLSGLIKCGICNEKYVGARKNKYWSVYECSGHKKGMCENKAIKKEEIEKIVVDELKVKINGLFNNVELLEKVNTKYKELYNDTENNLKIEEEKLSNVQTQINNINNAILDGFYSPEMKDKMKLLQSEKEFIERSIYLIRNISEKDEITSADINNILNTDLLKLESDNLNSIKEIIQKYIKEIIITPENINIKVVLDNTNITGDRDVCGSPPPFYKNINLLFWGVNNE

SEQ ID NO: 26863 - protein, 529 aa, synthetic construct
MSKYCIYLRKSRADLEAEAHGEGETLSRHKTALLELARRMGITISATYEEIVSGETIAARPQMQRLLSEVGAGEWDGVLVMEIERLARGDTMDQGLVAQTFKYSGTKIITPLKTFDPQNEFDEEYFEFGLFMARREFTTTNRRLVRGREASAKEGKYVGSVPPYGYRKVKIPNDKGFTLEIVEEQAKVVRMIFEWYAEGAEVNDQKKRIGPYTIAVRLNELGIKSAGKKDYWTIYGVQNMLINPVYIGKIRWGYRKVKKTVTPEGMKKKSREFAQDGDYIVVDGLHEPILSEELFYKVQDLIAANPPTPIKYRHKNINPFAGLIFCAKCGHCMNYRRGYGRQPDYIGCYTAGCKNKASRFDLVEQRVLSILNSWVKDYSVDKAQIKHEADLNAELSNAISLAEKEIETLQDQLDKVYSFFERGTYTEKIFKQRSSAIEQQIMEIGEKIDRLKAEHQQVLERQNVQAEFVPSIKHLLEIYDTLEPVEKNKWLKQIIDRIVYEKNADGKYHNVDPGDFTIGILPRLPKRGS

SEQ ID NO: 26864 - protein, 581 aa, synthetic construct
MARKRTNLIGNTPSVRETKVAIYIRVSTIHQVDKDSIPMQKKDLIAYCQLILGTDNYEIFEDAGYSGKNTDRPAFQNMMGRIRKGEFTHVLVWKIDRVSRNLLDFAEMYEELRSLRVTFVSKNEQFDTSTAIGEAMLKIILVFAELERNMTSERVTATMISRANSGQWNGGRIPFGYSYDPKEKVFSIREDEASICRELKDLYLLNRSLAYVSRALNEKGYKTRAGVNWSPHSVWIIASSPFYAGIYRYNRYKGVESRTINPEEEWVMIQNHHPAIFTLEEHQAMRSIMKSNQRNMDNLPGRVHLSTKTHIFQGIMYCDKCGSKMVSTPGRLHVDGYRTSNYGCPLRRNTKKCNNPTVNDIVIGEFVINYILNMLNAKKTFSTINTPDELNAALLSGSVFSEVSSVEENGLNSFFNLLSRYGSDRSYIFSVKSPRKKKAAVDPELSKLRKEKEKQERALQRLQDLYLYSETSMSEKDFIIRKSEISSHLDNINRQLGLMTQDQASFLSDEEFIKQASHLLIQKELKNKKYIYFKKLVSTVDPDILKAYMETILDSIYTADGKITAITFKNGLTHRFIYKDK

SEQ ID NO: 26865 - protein, 503 aa, synthetic construct
MSKIHKIEAVIPKQIEKKKVAAYARVSALTEMTQYSFSSQVNYYSALIQKNPNWKYVGVYADKGITGRSIKKRIEFNRLIDDCDNGKIDLILTKSVSRFARDTVDTLNTIRHLKNIGVDVYFEKENIHSISQEGELLLTFLAAYAQAESENTSENIKWGIRKGFKVGKPNGYKAPYGYKWNGNSYSIVPEQGAIVKEIYKRYLDGEPAYSIAKTLKKRGIKGQTGIPMDDSTIRYIVSNISYTGTLLLQKWFFTQNHVRKENKGELPMYAVENMFEPLISKEDFQKALQIKKERAEAMPNKNPRLTAFSGIVKCGNCGCSVCRRTTRYGKKWVCNAKDRKGMAACDFRDIYEIELEAAATKALAVNEFKEDLVRREVKLITIDNAYIVFNLKDGKKKQILRTYTKGYSGFSCRLFCGNCRKMLEADSRTLSINGKKKRYKIWCCRKCPGQREFDDVIRKATQSLFNEPQCEGLFAQNIEKAIIYNDRIDFYFKEGKVITWEKE

SEQ ID NO: 26866 - protein, 524 aa, synthetic construct
MGKRVTTIPATLNLYDSVSLKNPQKRKVAGYARVSKDIEEQATSYAAQVDYYTAYIKKNPEWEFAGIYTDEGITATTTKKRNGFKQMIADALAGKIDLIITKSVSRFARNTVDSLTTVRELKENGIEIYFEKENIWTFDSKGELLITIMSSLAQEESRSISENVKWGKRRAFANGKGSLSFNTFLGYDRGPNGEFVINEEQAATVRYIYEKFLEGFSAYRIAKDLTEMGIKTPGGKEKWANSSVLKILKNEKYKGDLLFQKTYIKDFLSHKSVRNNGEIPQYYIEDHHEGIITAEQFDQVQLELYRRKKIKKYSGISIFSSILKCGNCGGWYGSKVWNSNTKYKKTIYQCNKKYKNRCKTPNLSEYEIKQLFVQVVNQLISEKEEIIKNTEEMKKTICDMNSLTMELKDKTAEINTVVEQINNIVIQNSKVSLNQDEYNKEYFRLKRKYDTIASEIDRLSKQIKEKDLQGKLFDNFISTFKKQNETISEFDEFLWSGLVYEIVVYTKQDVRFFLKNGLEIDTGL

SEQ ID NO: 26867 - protein, 579 aa, synthetic construct
MRNKSLAGRANNRAERPRKVAIYIRVSTTHQIDKDSLPMQRKDLIAYCELILGIEDYEIFEDAGYSGKNTDRPAFQEMMQKIRAGSFSHLLVWKIDRISRNLLDFAEMYEELQSLRVTFVSKNEQFDTSNAMGEAMLKIILVFAELERNMTSERVTATMISRANQGLWNGGRIPYGYSYDAETSAFSIIQDEADVCQLMKTDYFEHKSIIHTARLLNDKKIPTRSGALWSPTAVWKILSSPFYAGVYRYNHYKGTENRTLNPEEEWVLVPDHHPAIFTLEEHEKLCDILDANKRTANLPGQKHRAKNVYVFSGILYCGKCGNKLVSTPGRLQADNFRTTTYSCPKKRKTHECDNPSVNDLIVGEFVINYILNMLNAKSSFSSINSPAELEERLLYGGSFKDVQHISEDGLNEFYNLLSRYGSDSSYVFAVKHPRKKKAAVNPEVEALRKDKEKQERALKRLQDLYLYSERAMTEKDFIIQKNEISSRIQDINTRLGMVTHDANSTLSDEDFVRQASHLLITKKLIGRDYIYYKALAQTVSPDVLKIYMETILDSVYVIGGRVSSIVFRNGLTHTFIYQK

SEQ ID NO: 26868 - protein, 580 aa, synthetic construct
MARRKTALRGVSASTRITKVAIYIRVSTIHQVDKDSIPMQKKDLIAYCQLILGTDNYEIFEDAGYSGKNTDRPAFQDMMGRIRKGEFTHVLVWKIDRISRNLLDFAEMYEELQSLRVTFVSKNEQFDTSTAIGEAMLKIVLVFAELERNMTSERVTATMISRANNGQWNGGRVPFGYSYDSGTSTFSIREDEAVVCRRLKDLYLDNKSLVYTARALNEDGYKTRAGADWTPTAVWIIASSPFYAGIYRYNRYKGTENRTLNPEEEWVMIPDHHPAIFTLEEHEAMKSSLKTNARYVDNPVGKPHATANIHIFQGIAYCGKCGNKMVSTPGKKHADGYRPSNYSCPLHRRSKKCDNATVNDMIVGEFAINYILNMLNAKKTFSNIDAPEELQRHLLTGSTFSDISSIEENGLNDFFNLLSRYGSDNSYVFAIKTPRKKKASVNPELAALRKEKEKQERALQRLQDLYLYSDKSMSEKDFILRKSEISDRLKNINAQLGLITQNPDSLLSDEEFIKQASHLLIQKELKGRKYIYYKNLATSVDPEILRTYMETILDSVYITDGHVSSIVFKNGLTHKFIYKN

SEQ ID NO: 26869 - protein, 501 aa, synthetic construct
MEIQIREGSREQKRKLKVCAYCRVSTDADEQENSLENQIRHYETVIKANPDYEYAGVYSDFAISGFKEKRPGLQKMLADAEKGKIDLILTKSVSRFARNTSIVLEATRKLKELNVGVFFELQNINTLSGEGELMLTILAAFAQAESESGSAGAKMVYQRKYEAGIPVQYLERSFGYTKDERGVFVADEAEAVWVRKIYEMAADGYTPASIKRYLNENGVKTVGGVQWVDSTVFRLLENEIYKGDYIMHKHFVNEERKLVRNRGEVDAWYIEDDHEAIVSPELWQKAQDALAAKRDYLAEGSVIEEFTEENYPYMNKIYCAKCGYPLYKRIYSKGNRLNWGCSGTKRYGKSFCDGINIPDGVLRSAWHFEENTYIDEKASDKGVKEFTYLKERSWKRRHKKKQPSAIPENTETEYPYREKIFCALCGSRLVRYVNPQNYKVTWVCNRRKRKGKEACDGTRVPDTVIKGWGEIKKDIYIQRKDDKNGKKRYRYTSKKPSGIRV

SEQ ID NO: 26870 - protein, 581 aa, synthetic construct
MAYAMKVPAASADDRIVAIYVRVSTGYQVDKDSLPFQKKELKAYCKHILHVDMSRVEIFEDAGRSGKNTKRPAYERMMQKVRAGLVSHVLVYKIDRISRNLVDFSLMYDDFKYNRVTFVSLNEQFDTSSAIGEAVLKIILVFAELERKLTSERVKDIMIGRANEGKWNGARVPYGWDWDSSAGWPVHSEREAPFGRAMYEMYLEVKSTGKIRDYNNAHNIPTKRGGEWTSKTVGDFLRNPMNKGDYRYNYRESARGRKKPVDEVVYLEGVFDPLIDPEIWEKVNKIMDINRDQRNMGGSHPVEKNCNVFAGLIQCGSCGSGYLVGKKDKRRKNSFTPSMYYCSAKTRAIHCQNLNVSDVKIGPFVINYISAMVRVSNERRKVKTPEDLEEMLLSDKVVFADIMGLSSDSLNSTFELLTGKSATGGALWRADLVDQEGAAANPAEIESLKDQIRKYERAKERLEDAYYFSDDGMSEKEYLEKKNRFDSGRVAAENKLKELTETHIASGVDESAFMKSASAFLLTHKIRAGSHIVYSDLAGMVEEESIKEFFNLVLDHITVKDRRVTEIVFANGLSHKFIYRD

SEQ ID NO: 26871 - protein, 572 aa, synthetic construct
MTNSQNLGTIEATNPVLAVAPLKEETEMLRATEKITALYCRLSQEDANEGDSYSITNQKDILLRYAKEHRFPNPTFFVDDGYSGTNYDRPGFQQMLSEIEAGKVVVVLTKDLSRLGRNSSLTGLYINFTFPKYSVRYIAINDHFDTIDPNSTDNDVAGIKNWFNEFFAKDTSRKIRAVQKAKGERGVPLTTNVPFGYRKDPEDRTKWIVDEAAALVVKRIFKLCMEGRGPMQIAKLLQAEKVLNPTSYKRREGIKSPSPETADPYHWNTNTVVHILERREYTGCTVNFKTYTNSIWDKKQRETPIEKQAVFYNTHPAIIEQEVFDKVQQIRKQRHRRTKTGKSSLFSGMVYCADCGAKMRYCTTNYFEKRQDHFVCANYRSNTGSCSAHFIRAVVLEELVWMHMKAVIFYVTRYEKHFRTVMEQRLRMSSEEAIRGYKTQFAQAERRLAELDRLFIRIYEDNVSGRITDERFSMMSRTYEDEQTQLKVEIQSLQQEIEVQERQIENLEQFIQRVHKYEDLQELTPYALRELVKAIYIEAPDKSSGKRRQNIRISYDLVGFIPLNELVKEETA

SEQ ID NO: 26872 - protein, 520 aa, synthetic construct
MVKCMKSVAERAVPAVIYARYSSSHQREESIEGQVRECREYAEREGYSVLQVYADRAITGRTDERPEFQRMLADASKGVFQAILIYKYDRFSRNRYSFAVWETKLKKHGVKVISARENVAEGAAGIVLKSVLQGMAEWYSVDLSEKVTRGMKENALKAKWTSGTVPFGYTRDAEQRLIIDPERGEYVRQIFEKVLASEKYVDIASWLNMLGVRTARGAAWNKSSFTWMLKNVVYTGLFRWKDIEIKNAVPPIISKELFEAVQRKLKTYGRRGINVQKSDKYLLTPNIICGECGGPMHGMSGKSRSGELYYYYACANKRAKRTSCSISPLNRDELEQAVYDCAREVLLHEENIKLIAEQAEAVAEAQVDNELAEMKAERSRVKKSIANYAAAIANGATSGTIIELINAAEAKAAALDEAIAERELVAAPPKVSKEAIEYFLRNIAAAPDDKMKEKVISTMVNSVVVERVPDEGTKKDSDEKYSITVRFNFTDTPQLSALQSFDVREKSKMVTSAGLEPATF

SEQ ID NO: 26873 - protein, 581 aa, synthetic construct
MYGLNSDFQKRDVAIYARVSTEHEAQLSALENQIDWYKPILEARPDWTLTAQYIDEGITGTSAEKRPRFMQMIEDARQRKFNMIITREVSRFARNTVDTLQYTRLLKEYGVEVFFINDNIKTFDGDGELRLTIMATLAQDESRKTSIRVKAGQQTSMQNGVFYGNGNILGYDRVGKEMVINPEQAQTVRMIYDMYLSGMGVTAIQYELEKAGRLTAMGKERWFSSYIAKMLRNSFYCGIITYHKEYTPDFLKQKKIKNYGDLEYVQVQGTHEPIVTVEEYEQVQKLMDAKSVVMKNHNKGKRRVGRMQHTTAFGRLMICQCGNKFNLRFHSRDGRTDGVDYQCYTSVNRGSVAKRLNKGISIEHSCESPYIQGWKLEMMAEQVFDRYIENADKVIDLSYAMLEKHIADQEELPDNTDVIQRKQGEIEKLMNKRTNLIEMRAEGDIDKEMFRSKKQEIEDRVAKLTEEIKGLQPEKKPTSNENYSAKLLELRERLKEYTGFDYSVIPESIVEAFVERIWVSKDEFRWYLRTGSKEEGEFDPDDHIKIGSFTLTIDDAKKYIYSFSTRRRVYKWVDLNVSVWI

SEQ ID NO: 26874 - protein, 700 aa, synthetic construct
MDSNAFLNDLMSKMKLPEAKGKKKAEQSESVAQILAAMQKVKTEKKKPPVTSYAPTKEMPVNELESMEEFSQLASDVMQECRPAIPAVKTSISEKTVRVAAYIRVSSTNPAQEDSYEMQERYFMSLLAGNAGWTSAGIYSDHGISATSREGRTGFNRLLRHCKQGKIDRVICKSISRFARNTQDFLVALRTLKENNVTILFEREAMDTADAYSEFILTTLAAIAQEESRSISANIAWSNQKRFPAGNVCNKDIYGYEFRKGEYTVNENGYRYRAVFIIPEEAEIVRMVFRLFTKEELGFTQIAQKLDAMHIQPPNSGCRQRQKRKPTVLPAGALKEEAKRGWTATDVRYMIANVRYCGSVLCQKTYTDHRNGHKQKVNKGEKPKYLIRNHHPAIISEEMWQEAQEVWKVYTAKYRGIEKGRNERNYSKLLLCGECGRYFQGHSTTRTTIWRCATKLAQQGQKRCRMEPVYEEQIQTLLCKAFAEKFKLGEKMDAEVHEVMQMISKAPIDSARNQALKNLTEKLREIHDFDHMEQEGDFLKRQLSAVNYSIRDAHQRIRDIQAEKEALKVRCEVLGEPRDKEAVTELENRLLNEEEQLEKLEHEAQQQAEQVRYMEDYWKKLEQTHEIREKTLQWLDSLAGGTQMFLDEAVGTYVKAFVLSVTIFSPKHFRIHWFDDTCTDVECDSVFEGYQQPGMIRRKY

SEQ ID NO: 26875 - protein, 528 aa, synthetic construct
MNRTAARSVTVIPPTINPLTHLSGVAVQKRRVAGYARVSTDSDEQFTSYEAQVDYYTQYIKRNPEWEFVKVYTDEGISGTNTKHRIGFNEMIADAMSGKIDLIITKSVSRFARNTVDSLVTIRKLKEKGVEVYFEKENIYTFDGKGELLLTIMSSLAQEESRSISENVTWGQRKRFADGKVNLPYKQFLGYRKGADGFPEIVPEEAIIVHRIYTRFMEGLTPGAIAKELTVNGIPTPSGKQRWQTSTVESILQNEKYKGAALLQKCFTVDFLTKKKKLNEGEVPQYYVEHSHEPIITPEEFDKVQTELARRKRISRQYSGKSFFSSRIICGDCGSYFGSKVWNSTSKYRRVIWQCNGKFKGEHKCETPHLDEETIKVRFVAALNAIIDSKDRILEDCRLMQTTLTDCTGIDAEIERLLTEIDVVTELTQRCISENAQSAQNQQEYTARYNGLVERYEKAKAQLEQLRTTKAAREAQAEAIGGFMFEVQELDTLTEFDEKLWLTIIDTVTVHADERMTFKFQGGTEIDV

SEQ ID NO: 26876 - protein, 502 aa, synthetic construct
MEIQIREGNREQKRKLRVCAYCRVSTDADEQENSLENQIRHYETVIKANPSYEYAGVYSDFAISGFKEKRPGLQKMLADAQKGKIDLILTKSVSRFARNTSIVLEATRKLKELNVGVFFELQNINTLSGEGELMLTILAAFAQAESESGSVGAKMVYQRKYEAGIPVQYLERSFGFKKDERGVYIADEEEAVWVRKIYDMAAQGYTLAAIKRYLNENNVKTVGGAKWLDSTVLRILENEIYKGDYIMHKYFVNEERKLVRNRGEVDAWYIEDDHEAIVSPELWQKAQDALEAKRDYLAEGSVIEEFTEENYPYMNKIFCARCGHPLYKRIYSNGNRLNWGCSGTKRYGKSFCEGINIPDGVLRGAWHFDENMYIGEKQTDKGKKEFTYLKEASWKRRHKKKEPEPIPENTETEYPYREKIFCGLCGSRLVRHVNTKNHKVIWVCNGRKRKGKDFCDGTRVPDTIIKGWGEIKKDIYIHRKDDKNGKKRYSYTSKKPKGADRA

SEQ ID NO: 26877 - protein, 530 aa, synthetic construct
MSTGTELRAVFYARVSTEEEKQLNALEKQIHENKDVIRDHGWRLVGEYIDEGKTGTTTKRRNDYKRLLKDMTENKFDIVVCKDQDRLQRNTLDWYLFVDNLVTNNLKLFMYLDNKFFKPSEDALITGVKAIIAEEYSRNLSKKLNNSNKRRIERALNGEEVSAMGNGKSLAFKIVNGKWVKDEEEAKLGKKIFELYLEYDSIRKVRDWVNEHGYTNSVGKPFTSESISRILKNEKAKGVIVMGKYHHDFDKKKIVRRSEEELVRIPAPELAYVSEEVFDKVQERLKAKTGNGRGVNAYSDPLSGKIYCGSCGRKLWKHASNGYVNWMCASQVAKGDVECNGTRITTVAIRNIYKKITDNLEVNKGVVKQDIVKWLNELKATLSDTSVNEKIQKDLDKLERKRTKLLEAYLEDFISKDDYKAKYEAIEGQIEEKKKLLVPVEENEDIKVIESVLQNIDDEIDAYVKTLDMEESKVDFLIEHTKRITVLENRDIIIELDLVAGAIIAGKDFLLYVHDTMPKHYGRKRYDIFS

SEQ ID NO: 26878 - protein, 453 aa, synthetic construct
MECVAYMRVSTEKQAEEGNGLDSQKRDIELFCRKNELVVADWYVDDGYTGANMDRPELQRLINDCIKKRVKCVVAFKLDRLSRSMIDGLYIIERVFQPNQVLFKCVHDSVSYDSPMEQAYTQMMAVFAQLDKNTMMLRMRGGMLERIKQGYWIGGANTPYCYNYSKEKGILIPIPERKEQANRAIDMFIGGYSDLYIKESLGFHSEVLVRNVLTGVVNIGMIPYKGNVYQGLHEPIFDKERFELAQEIRKSRRKNKTACHTDANLLTGLCYCGVCGCKMRYQKWTHGKHKIYCCSRDKAMKYLPNFNPNCNNSLEWAADIEKQVESEILKISLNLSECKPIEKQSKLEIMQSQFEKEQVKLKRLYVLYSDGNDTVLEMIKNTEKSISDMKEKITEEEKNERNSQKKEVVYENIKKLADVWAHIDKKEKNNILKSIISRIVIVNGDVEIQLKNF

SEQ ID NO: 26879 - protein, 546 aa, synthetic construct
MRVSVNLNAQKPDTTTNAVIYARYSSHGQTEQSIEGQLAKGHEYAAAQGYTVVHEYIDRAMTGRNDNREAFQKMLSDTGKHQFQVVIVWKVDRFGRNREEIAFNKHTCKKNGVRVEYVAESLPNSPEAVILESVLEGMAEYYSIQLSQNIRRGQLESAKKCQCVGGSVPLGYTLDSDKHFVIDPQTAPVVKKIFDLYAEGATISEITGQLNEQGIRTARKQLFTKNSLTKLLKNEKYIGVYTYKDIVRVEGGVPAIVDESTFDRVQELLKINRRAPSHTWTKIEYLLTDKLFCGHCGSPMVGESGFSHTGAKYSYYGCIKRRREKACDKKPVRQDWIEALVLDETVKLLHDDELMEYIIDRTWEYYQVTDKVQEEKAVLEAQLAEVDKAINNLVRAIEAGIFNAATKSRMDELDAQKAALTASLADLELTSGIRITRDHIEYFLLRLRDLDVKDRECQKRLVQTFVNAVFIYDDGRVKITYNYSGQSSTITLNQIASAEKGKGFVCCLPCSTSSPRFPRGVAAFFCFGVLGKIGCKYTTNFSCIVL

SEQ ID NO: 26880 - protein, 514 aa, synthetic construct
MAIITKIEENKAVTKNIRVAAYCRVSTDQDDQLLSLETQKAHYESWIQGHPNWEYAGLYYDEGLSGTKMDNRPSLLKMVEDCKHGLIDYVVTKSVSRLARNTADFLTIVRGLLDLGIPIYFEKENIDTGSMENELMLSIMSSIAESESVSISENNKWSIQRKFKNGTYKCSYPPYGYDWDKKKGEMVVNPEQAEIVRYIFAQTLAGVGTHDIAKDLAAKGVPTKKGGKWTGHTINGIVRNEKYTGDCLFQKTYTDSSFVRRRNLGEMDQYYVEDHHEAIISREDYEAANDVIDRRRQEKGIELDNGKYQNRYPLSGKVICGECGGTFKRKTYTHKVVLACTQHIDDKEKCSMKYVDLEAVEVAFATMMNRLVYGRNKVLRPFYEALQQSNQTEALLKIHDIQEQLDALVDKKQTIKGLFAKGVIEPAVYTQSINGVTAEMEKLTTEKDALSYIASSEISHIEETRKLLAFADKGEFLEGFDGEIFETYVDRIVVKSQTELEFQMKCGLNLTERI

SEQ ID NO: 26881 - protein, 573 aa, synthetic construct
MQKNQTKKAALYIRVSTHYQIDKDSLPFQRNELINYAKYALGIDDYAIFEDAGYSGKNTDRPAYQDMMRRIRAKEFSHLCVWKIDRISRNLLDFAAMYEELKKFNCTFVSKNEQFDTSSAIGEAMLRIILVFAELERKLTAERVTSIMYSRANKGLWNGAPIPLGYKWDAKGKYPVIDEDTAVVVRYIYDQYERIHSTMKLSDKLNRENIKSARGGEWTGTTVKGILRNPFYKGTYRYNYKTQTGRIKPVEEQIVHDDNHPGIIDKEQWDRVNKILDENSTRSVAQLRSNVKYTHIFSKLLRCGQCGHTMGGGLDRARSDGYRPSRYYCTSHTRKAGCTNGVYSDVYLGPFVFNYIANLVRAQRALTDSQKPRDLERMLLRGKFFDSVAGIEQQGLLDTYNTILYGSGEDVMLQPSPEIAAQSASELELLDRDQKKYERALERIEQLYLYSEESMPEKDYVLKRNELKAMLDNIAERRAEVNSRLGLAPASSDFLEKATYFYLTNSLNQKRSLDFRKMVDTFEPKMLQDFLCSVIDHITVVDGHVASISFKNGLTNKFIYKATKPPKNASTKP

SEQ ID NO: 26882 - protein, 554 aa, synthetic construct
MMDNQSVTGVAIYVRVSSEEQAEKGYSIEEQKNVLLSFCNKVGYNVYKVYCDAGISAKDIVHRPGLQELLEDAKSKCFNLVLTWKISRLSRRLKDAIEIVDFLDKYSIQYKSYTEPFETNTPSGKLQFQMMSMVAEFERSTIAQNVKMGHLAKAKKGEWCGGPAMLGYEWEVMEQYKDCTGRRKSKLIINPEEAKIVKLIFEMYADGKGYKAITNHLNKMGYKTKNGCAFSLNGVRDILLNPVYVGKVRYDVRRNWNERRRGNTNPDPIIADGIHEAIISQELWDKVQIMYNQKKGRRGTVFSYEFPLTGILRCPECGAGMVVGGTTNTLKDGTKKRIPYYVCGSFSNKGSAVCHANSVRAIDTNKEVYKRVKMVCTNSLFRDKVIKEARNMLNGTLNNYQRELEMCDSQIKSNNQKKEKLFEAFESDIISSEEFLERKKTLDEKIANINSKREALLEEKARAELGSVADEVIEETLNNFDQVLENSDKKELKKEMLHMLIKEITVTNGKPKEVDKIVLNINNDLIEYLNTKDGSNITDSSFAFFENHSIELII

SEQ ID NO: 26883 - protein, 503 aa, synthetic construct
MYAMYLRKSRADNPHESIEETLRKHEKILFDLANKLNIKRSEIVQFKEVVSGENLKNRPEAQKMLKLVMENAFEGVLVVDSQRLARGDTLDQGTIIRAFSLNNTKIITPGKTINPGDEIDQDYFEFDLFMGRREYKMINKRMQRGRSISVQEGNYIGSIAPYGYRKTKIGKCHTLEINEDEIVCFNKMKELALNGLGCTNVANELNRLGFKSRKSKLWTTNAVRDILLNKTNLGFIKWNTRKSVKIYKNDEIIKSRPRNEEAEYYPGKHPAIITQVEYDAIVENIKNRARPVKKDKKLQNPLAGIVYCGKCGKAMIRRSYNNGYRDGLICTNTHCNNVSSVLEVVEKRVLESLEDTLKEYRQFIDNYHNDKTKTNNDSLIIKTEKEINKIDSQINKACEMLEVGAYSVELFKERKTLLDNQKKALIDKIEALKKEDTDFKLQNYINAVPILENAIKLYWNSSVEEKNKLLKQIVKRCDYLKSERGKRNGKGMYNFKLNIYLKI

SEQ ID NO: 26884 - protein, 543 aa, synthetic construct
MNDENKRFAVYSRKSRFTGKGESIENQIELCRRYINLNYPNASEKNIFIYEDEGFSGGNTDRPQFKKMMDDASEKKFNVLICYRLDRISRNIGDFAKLIDRLGELGISFESIKEKFDTDSSLGRAMMYIASVFSQLERETIAERIRDNMHELAKTGRWLGGNTPTGYRSVQVQTITVDGKKRSSCMLKIEESEMTAVKKIFEKFLESESLTAVETYMIQNHIKTRKGKDFSRFSIKGILRNPVYMIADSDAWEYLSVLGAEIFAEKSDFDGNCGVMAYNKTLQKKGKTNKIRDIKEWIITTGRHKGVVSGKEWKQVQECLERNSVKAYRKPKNNTALLSGLLYCGDCGHYMRPKIYNSFYKDGEKKFSYLCEMKEKSRRSECSVSNPAGNELDAEVIKEISKLEEDKKELYYILNKAKKTFSDGRESNTEIEELNEGLNVNNRKIASLVENLTELEKTVADKYIIKKIEELHAENELLKKRLYELIKTSENKKSVDVNYITDTLTVWESVIKLIEVRERREVVRTIVDKIIWDGESAHIYFFG

SEQ ID NO: 26885 - protein, 523 aa, synthetic construct
MRFFSYGRKSVFSDKSDSIDNQFRMNREYCESKFSGQVDSWQQFSDEDFTGANTSRPDLQRMLSFIKGGFCDVLVVYQLDRLSRDVRDFANIYALLEEHGVMFISIKENIDTTTPIGRAMMYVTVVFAQMERETIAARVTDNMLGLAKKGYWTGGNPPVGYVRKHIIVNGKKHCSIEVDPDGARYVTQIFDTFLAYNCSLQGMETRFKNQGIRTQNGKFFSTAQLHKMLTMPYCVEATPEVYDFYAAKGCIMDPGSPREMWDGSAGVIIYGRSTEKNKKHQLQPPEKWTVCLGKHKPFMPAEKWLAVQSRFTQNKCIKDAKWPVPLLKGVLRCKCGNLMQVSRKKKVDGTCSSWYYCRKRMRQGVDACDMGQIKCDLLDEEVLELFRGITADPALIQKFVKAEAPADVPDLKAAQARVSACERKIGRLAASLALAEDSAASKYIIAEMERLDVELGALKREASLAEMESHQAAASAKDAKATAAEIAKLIHGLDGFDDKEKNAIARAVIQECTWDGERLFIKL

SEQ ID NO: 26886 - protein, 526 aa, synthetic construct
MAQRKVTAIPATISRYTAAPINSTKKRRVAGYARVSTDHEDQTTSYEAQVDYYTNYIKSRDDWEFVAIYTDEGISATTTKKREGFKTMIADALAGKIDLIITKSVSRFARNTVDSLTTVRKLKDEGIEVYFEKENIWTLDSKGELLITIMSSLAQEESRSISENVTWGQRKRMADGKVSFAYSRFLGLDKDKETGKIVVNPEQAETVRLIFHLFLEGMTPHSIAAELTSRGIKTPAGKDVWNQQTVRRMLSNEKYKGDALLQKEFTVDFLQKKMKKNEGEVPQYYVEGNHEAIISPAVFDLVQAELAKRTKGGSRYSGVSIFSNKIKCADCGGWYGSKVWHSTDRYRRVIYRCNRKYNGDKCQTPHVTEDEVKAAFVSAYNQLVTEKKEIIANAEIIRKTLCVTDSLQEEKSKLEEEMAVLVEMTQNIVAENARVAQDQEEYQKRYNSLVERYDTAKARYDEVVAAISAKEAQSERLANFIKVLKAQDGTIREFDGRLWGSMVEFATVGRDKEITVTFRDGTEIRA

SEQ ID NO: 26887 - protein, 591 aa, synthetic construct
MAKITRVDQAVPTIKTKKKVAAYARISMESERMNHSLSAQISYYSSLIQKNPDWQYAGVFADDGISGTGIAKRDEFKRMIKAADNGEIDIILTKSIQRFARNTVDLLETVRHLKDIGVEVRFEKEHINSMSGDGELMLTILASFAQEESRSLSENCKWGIRKRFEKGIPNGHFRVYGYRWEGDELVIVPEEAAVVRRIFQNFLDGKSRLETEREFAAEGITTRDGCRWVDSNIKVVLTNVTYTGNLLLQKEFISDPISKQRKKNKGQLPQYYVEDTHPAIIDKATFDYVQEEIARRKELGPRANKSLNLTCFSGMLKCPHCGISYAHNKRTDRGFMEYWACGSRKKKGSRCPVGGSINHENLKKACAEVLGLDAFDEDAFLDKVDFINVPERYVLEFHLKDGAVVTKDCPNTGHQDCWTAEYRAKTSEKRRKKPNCKGSSVMTGKIKCAGCGCNFRRASQPSATSESGKAFYWRCAERNGCGTVGLREDVLKPFIAETLGIPVFDDAEFEKRIDHIDVLSASEMVFHFKDGGTVSRTWEQPKRIGRPWTDEQRAKFKESIKGAYTPERRRQMSEHMKQLRKERGKAWRKEK

SEQ ID NO: 26888 - protein, 473 aa, synthetic construct
MEDRIVTEIAPLPKPATFKDTTKAILRVAAYARVSTDHEDQQSSLAAQTEYYTKKISEHPGWQFVQVYVDEGISGLRTERREGFNRMIEDCLAGAVDLVLTKSISRFARNTVDSVSTIRKLKERGIAVYYEKENIYTMDSKGEFLLTIMSSLAQEESRSISENVTWGQRKRLADGKTSLAYSRFLGYDKGKEKYEMVVNEEQAITVRRIFFMFLQGYTAHSISKILTDEGVPTPCGCDVWYARTIQSILQNEKYKGDALLQKEFTVDFLTRKLKKNEGELPQYYVKEDHEPIISPWLFDYVQKRLKERGDVPGRYSGVTVLSSKLECGVCGSMYTPRPWHSTSYNNLVWQCRNRTKKGPKCPTLNVYDRLLHFVIHDAARAAAIKRCVPQTVADIVTKIIGEDRENTVQQWVRTFQKRSAWGMLSDEDDLAVVLQRITVMPDRTLQIRWLDSKKSMSHLPKYCPKKGIEYDDK

SEQ ID NO: 26889 - protein, 506 aa, synthetic construct
MNTVIYLRKSRADEEAEKQGEYETLAKHKSTLLKIAKEKKLNILEIKEELVSGESISNRPKMIELLSEVEKGMYDAVLVMDIDRLGRGNMQDQGLILSTFKKSNTKIITPRKVYDLNNEFDEEYSEFEAFMARKELKLITRRMQRGRIKSVEDGKFIAQSAPYGYKVEYNGRDRYLVIDEEKSEVVKIIFDMYSQNIGANRIASHLNELGYRTTTGRTWYDKAIRDIIKNKTYCGYIVWNKVERKKVSQRIKSIDKQIESKGKHEPIISEELWNKCQNIRTKRSISPTPNNIMTNPLSGVVKCNLCGYTLVAKSGTVKQPDGSIGYTKYLVCTNCRNRGTKLAIVEEKILYSLASWLTEYKVLLNNTDFKQENNIENYTKIVDNLKKELDNLNKQKENLHDLLERGVYDVDTFIERSNNIGTRINSIKDTLDSTMNIIENERKKEQAKYSIIPTLENVLEQYYNTDDIVLKNKLLKSVLDKVVYTKDHKRRDEYDFDIVLYPKLPH

SEQ ID NO: 26890 - protein, 506 aa, synthetic construct
MPKKETTAPVKAVLYARYSSDRQREESIEGQIRVCEDYARRNNMVIVHTYADRAMTGRSDQRPEFQMMIQAAATQAFDVVLVYKLNRFARNRYDSAKYKHKLKKYGVHVVSAMENIADDPSGILLESVIEGMAEYYSAELAENVMRGMTENALECKWSGGLVPLGYKLDADHHLVIDEAGAQIVRRIYQMVLDGRTPTGIINELNAANCRTSTGRPFGKSSLTTILRNEKYIGTYTWNHIRKENAIPAIIDRKTFEAVQKTLQYRKNNHVKVCSENFLLTGKLFCGQCGSNMVGTSGTSKYKNTYYYYACTKHLKKDGCTARNIRADKLEELVCSVTTRILSSKEAVHAIARQAVEAQKKQKESLTVQSLKNQAVEINKKLKNCVQAVESGLISVTITNHIKEYEKRLTGLNEAISREELLSGKSKLTEKHIEFFFYSIAQKIKTADKYKSILLSSLVRCVIVYDDYIEIQYNYKNELPLLQNPVRVKSSNLNGMVIHPGFEPGTP

SEQ ID NO: 26891 - protein, 505 aa, synthetic construct
MTKNAVIYARFSSDKQREESIDGQIRECRAFAEANEINIINTYIDRAMSARTDQRPSFLQMVKDSAKHLFDYVIVYQLDRFSRSRYDSAIYKHRLKKNGVKVLSAKENIKDDPSGILLESVIEGMAEYYSAELSQKVKRGMTENLLEGKWIGGIVPFGYELTSENKLAISPATGHLVPEIYDKYLSGIKTTDILSKLNSLGIKTQRGCNFTRNSLNRILKNQIYTGTFTWAGTSYPDYAPALITQEQYTAMQNLFESRKRKSNTARRVSPQYALTGKIYCGTCGLPMTGYCGKSHTGTTYYYYQCSSKNNKSEKAARSQIACDAKNISRDKLEKLVLDTTISILKNKDAVKCIADQCMAIQKAELEHKPAEQLRLESQIKEIEKRLKNSVKAVENGLISQTITNNIETYEKQLTELNAQLDGLKLETHIIPITEEAVIYYLNQLTERANKKDGYSLDTFDDFIRRVVVTGKRVDIYYNYTAVPNILENPAVKMLRGSSEDCLVTR

SEQ ID NO: 26892 - protein, 521 aa, synthetic construct
MKKITKIDGVQNNSTVNKELRVAAYCRVSTGSDAQLESLEAQKTHYERYINSREDWKFAGLYFDEGITGTKAEKRPELLRLIADCEARKIDFVITKSISRFSRNTTDCLALVRKLQNLNIPIFFEKENINTGSMESELFLAILSSMAEGESASISENSKWSIKRRFQNGTYKLSYTPYGYDWDGENMIINPAQAAVVKRIFADILSGKSTNAIADELNAEKIPSKKNTNWTSSTIRGILANEKYTGDVIFQKTYTDENFNRHTNYGEVDQYMAQDHHEAIISHADFEAANALVSQRALEKGVKKGSDKYQKRYAFSGKIICGECGDTFKRRVHTCTTYKYVAWACNTHLKDKSTCHMKYVRDDDIKAAFVTMLNKLIYGHRLVLVPYLKTLENSSGDEALQRIQHLELLLDQNSEQRETLTKLMAQGYIDQILYNQEINALLLQAETYRSDIEAITICMTGDSAKVTETNLLLHFVSHANMLTNYSEELFESYADHIEITGRNEIKFVMKCGLTFTERIGD

SEQ ID NO: 26893 - protein, 522 aa, synthetic construct
MGNVMLIPARRQVGNNARKQEEEKPKLRVAAYCRVSTDSDEQATSYEAQVEHYTEYIQKNPDWEFAGIYADDGISGTNTKKREEFNHMIDDCKAGNIDMVITKSISRFARNTLDCLKYIRQLKDMNIPVLFEKESINTMDAKGEVLITIMASLAQQESQSLSQNVKLGLQYRYQQGKVQINHNRFLGYTKDADGNLIIDPEQAEIVKRIYREYLEGLSMDKIAAGLERDSILTGAGGKRWHTSTINKILRNEKYIGDALLQKTYTTDFLNKTRVKNNGLVPQYYVEGNHEAIIPKDIYLQVQEELVRRRVVKTSANGKKRSYSCNHCFSQIVICGECGEMFRRLHWNNRGVKSIVWRCISRLESTGLECHARTINELVLQDAVVKAINQMLGDKSSYQAQLQLNIASVIRASQATSVENIDEKLMALQQELIQKAQSKEAYDEIADEIFRLRELRQKTTVDTAARDEQIKRINDLQDYIAHQTTHLTEFDESLVRRWIKQITIWDDHITVELKSGVSIDVDA

SEQ ID NO: 26894 - protein, 637 aa, synthetic construct
MKAALYIRVSTHFQVDKDSLPFQRQELINYSKYVLGTDSYEIFEDAGYSAKNTDRPAYQDMIARIRKGEFTHLIVWKIDRISRNLLDFSNMYEELKKYGVTFISKNEQFDTSSAMGEAMLKIILVFAELERKLTAERVYSIMLSRAEKGLWNGATVPLGYKWSDEVKFPVVDENEANIVRQIYNLYIKLRSTTKIAIYLNNNHIPTKRGGTWVAKTINDILKNPFYIGTYRYNAKDQNRRWKDKSEWVVIENNHEAIVDKDLFNRVQDILKDNYKGDSQYQRENLNTHLFSGLITCDICNSKHWASLDSARKDGYRPSRYVCYKNNNGCSNIISDITLLPFILNYIANFIRLNNSSTPNTSLKNIEKKLLRGKAFVDVIGIDKESLESTYHLLASNYITEDIELTTHSEDVQSSAFDEMTLLQKEKLKYEKALERLESLYLFSDDSMSQKDYIFKQRDLMQQLDQINIKIKELNTATPKSEVSHLSWLDDVQYFLLMQKIQNSISIDYREILALIDTDVLKEFIGKIVDEIWVSEKKVRSIKLCNGITYKFAYKERTTIPTREHLLYRKYEDELLELLRSKKQVTRKDVEEKIPLSRVTIGKLLNEFIERNIIVRIGVSTATYYTLTENKDDPREFV

SEQ ID NO: 26895 - protein, 520 aa, synthetic construct
MKNVTKINQVDFSVFKKTRVAAYCRVSTDSDEQELSLDTQKNHYESYIKANSEWEYAGIYYDDGVSGTKTAKRDGLLRLMEDCEKGLIDLVITKSISRFSRNTTDCLALVRKLLNYEVYVIFEKENINTGSMESELMLAVLAGMAESESRSISENEKWSIKKRFQNGTYVISYPPYGYANVDGEMVIVPEQAEVVKEIFAGCLAGKSTHIIAKELNEKDVPTKKGAKWTGGTINGILTNEKYIGDALFQKTITDTNFKRKRNYGEEEQYYCEDHHEPIIDRETFEKAREAIRQRGLEKGNCTEDTSKYQNRYAMSGKIKCGECGRSFKRRYHYTSHGKSYNAWCCGTHLEDSKSCSMKFIRDDDLKRTFLTMMNKLVFGNDLVLKPLLISITTNNSKKNANSVEDIEKEMESNEEQRKQLNTLLTNGYLERPVFAEAHNKLIMEYEHLVAKRDLLFRMDDAGYTMEQALKELVDFLNDAKPFTEWEESLFERFIEKVKVLSREKIEFEFKCGLKLKERID

SEQ ID NO: 26896 - protein, 524 aa, synthetic construct
MAGAKNITVIPAKKRVGNTATAESKPKLKVAAYCRVSTDSDEQATSYDAQVTHYTEFIRKNPEWEFAGIYADDGISGTNTKKREEFNRMIEDTMAGKIDMIITKSISRFARNTLDCLKYIRQLKEKNVPVFFEKENINTMDSKGEVLLTIMASLAQQESESLSKNVKMGIQFRYQNGEVQVNHNWFLGYTKDENGHLIIDEDQAVVVRRIFREYLQGASLRTIADGLMADGIPTATGNKKWRGDGIRKILTNEKYMGDALLQKTYTVDVLTKKRVSNNGIVPQYYVENNHEAIIPRQLFMQVQEELFRRAHLKTEGGKTKRVYSSKYALSSIVYCGKCGDLFRRVAWKARGASYNKWRCASRIEKGPKKGCDADAISETEIQNAVVRAINKTLGGREQFLVQLQHNIEDVLNGDSTATLEYIDQRMVELQEKLVMCVNKNAEYDVIANEIDALREKKAAVVTKDAEQEMLKKRIEEMRQFLQTQSSRVTEYDEQMVRRLIEKITVFDNKLIFEFKSGMTLELKR

SEQ ID NO: 26897 - protein, 529 aa, synthetic construct
MKIAAYCRVSTEKEAQIDSLEKQIEFFNEFTKKNGYELYKLYADEGISGKQIKHRKQFQAMMQDAKAHKFERVVVKDVSRFARNTVDLLQSIRELKSYGIQVDFLNNGEVMEGGSEFILTILGAMAQQESANMSKRVKFGKDITAKKGRVPNLVFGYDKIPDEKYILKINEEEAKIVKEIFESYVYKGMGTTKIAWELNDKGIRTKKTKSKWVQTSIVRMLKNPIYTGRITNKKSEITDFITGTRKDLPEDEWIIVEKPEMRIISDELFNRAQDILAQRSNEFKLNSKREKTEYVFSTLIYCKHCGYSFRRIKRKYTTDGPEYIRWVCSGRNSMGVNHCPNTTVIDEEELLNAIKEYLKSIISNKKNFMKAVEKEFEKITALRESNERSEESLLKEIEKVTVKKQKYMEMFQNEVINIQELKQYTNPLNEDIARLERELKLITSEIKEKDVLEKELAKTISTVDDVLNNETITNAMLKTIIDVIEVDSDSNVEVRLKLLNEIGSQPTVITNFEDINSTVTKSNIGTQRR

SEQ ID NO: 26898 - protein, 534 aa, synthetic construct
MKIAAYCRVSTEKEAQIDSLEKQIEFFNEFTKKNGYELYKLYADEGISGKQIKHRKQFQAMMQDAKAHKFERVVVKDVSRFARNTVDLLQSIRELKSYGIQVDFLNNGEVMEGGSEFILTILGAMAQQESANMSKRVKFGKDITAKKGRVPNLVFGYDKIPDEKYILKINEEEAKIVKEIFESYVYKGMGTTKIAWELNDKGIRTKKTKSKWVQTSIVRMLKNPIYTGRITNKKSEITDFITGTRKDLPEDEWIIVEKPEMRIISDELFNRAQDILAQRSNEFKLNSKREKTEYVFSTLIYCKHCGYSFRRIKRKYTTDGPEYIRWVCSGRNSMGVNHCPNTTVIDEEELLNAIKEYLKSIISNKKNFMKAVEKEFEKITALRESNERSEESLLKEIEKVTVKKQKYMEMFQNEVINIQELKQYTNPLNEDIARLERELKLITSEIKEKDVLEKELAKTISTVDDVLNNETITNAMLKTIIDVIEVDSDSNVEVRLKLLNEIGSQPTVITNFEDINSTVTKSNIGTHRSNIPER

SEQ ID NO: 26899 - protein, 574 aa, synthetic construct
MARKKNIAAGLDAVIYARYSSHNQREVSIEQQIAECTKHAAALGLRIVGTYEDRAISGKTDNRPRFQQMMRDAEKGKFQAVVAWKSNRIGRNMLQAMVNEAKLDDYGVKVFYAEEDFDDTAAGRFALRNMMNVNQFYSENMAEDITRGLYDNANKCMANGRQPLGYKRGADGKVMLDEPAAAVVREIFTRVAAGDLFVDIARDLNAKGIKTSKGATWNKGSFQSICQNERYKGIYIYGNVRIVDGIPRIVSDELWYKVQEAMRMKKNPVGTRHRVGAEDYLLTGKLRCGHCGSYMTGVSGTSRNGELHYYYTCQKRRTEHACNKKNVRRDVIEPAIAQAIKMYCLTDDVIEWVANRTVEYWEKHDNDLHIEALEQQLEENKKATSNMLKAIEMGIITDATRSRMIELETEQSKLAVQLNAAKADVVKIDRDDLIDELQIFRDMDVNNRSVQAELFKDFLVAAYIYDDNRLKLVFSFMGKDNSVEIPLETGEDPPDGEDSPDAKMFVLTPDCSTKKALYFVGSMVLFFFSAAKNGGCTALSASFSDVLQAVQCSPRVIGASAGQRMPVQLTISSI

SEQ ID NO: 26900 - protein, 583 aa, synthetic construct
MTQQLKKTALYCRLSKDDERQGESLSIETQKSMLVRYAQENGLIPYEIYVDDGYSGLNFDRPDFQRMIDDVATGKIGVVVVKDLSRFGRDHIVVGQYQELYFPSKKVRFIALNDGIDTLNSHSTDYAALKNVINEFYSRDTSRKIKAAFRSRAKDGKYHSKTAPFGYLKDPDDHNHLIPDPETAPVVVKIYDLVLKGWGNHRIRDYLRETKVPVPSWYMHIRGIEDKSHMFPDEESKYIWRPDTLRLLIRNRVYCGDCVLCKSDTVFKTKKHFKTDEADWITVENTHEPIVSRETWERANELVAVKRREYKETLKDDLNIFSGLLKCADCGKALSRRKYGSNSSHMIYVCGTYATYGSHKCTQHKIFEEDLTAAMLADIQELFSAVKKDKAKLIDLLIKNKAKNEGKALNTKEAQYKRVCKRLEEVNRLVDKLYEDNISGKINETNFVRLLSKYQQEQESILAEKGKLESETAAVREIRSDAEQFADLLERYGDISELTPEILNMLVDKIMVYEPRAVEGVMRQQIDVYYRYIGVVKLVDYGSTTYYKSGEVLTAAKKRENAKMEKRIAAVKEEMQSDEAVSA

SEQ ID NO: 26901 - protein, 670 aa, synthetic construct
MNTAVNTNQFNYRFKLTDYSLFDRNRARRVAIYGRVSTEHEAQLSALDNQLQWYDDQVRYHPNWDVVAKYIDEGITGTQAKKRPDFLRMIEDAKQGKFDLIVTREVCRFARNVVDTLVVTRELKSIGVEVFFIEDNIWTMDGDGELRLSLMATLAQEESRKTSERVKAGQKISRDNGVLYGNGNILGYDRVGDTYVINEEQAETVRMIYDLYLQGYGSMKIAGILTERKRKTASGLVKWSVSNIMRAIRNATYTGTKCYNKSRSNNFLEQKRINNLDMSTYEYVEGDFPAIISQEIWDKAQEIRESRVKPSLVSATKTTHSKRDSADVWVNKLRCSCGSSFRKNKWHTKLDGKTSYGYQCYNQLNNGNKKKREELGLDTDGYCDTRMITDWKLDFMAKALLEHLWTERRKSVLIAIDLIKCYYKEEKEIGKQSDVVVVQARLDKANTRLTNLIAMRADGEITKDEYQVMRTPIDTEIQELQKVLENIPTDNDNLKGFDLDSIISTLNSLVDFSGSTISHDVINQFVYLVTPTSDTTFEWYVNLNGKPNVKATFTAEGRKKNCLIRLEEIERISSLHRKENESNAQLIKNPCLLTYLHRRRISLLPPAPLFSAPAGLRRWRSWATPTTGQPTRSANSCIRTSSCSPASLSFSAMFWISPPQRRRLPRLMLR

SEQ ID NO: 26902 - protein, 532 aa, synthetic construct
MTTERKKKTTEEKVKRNTTKKASNTTRNTQPKKNSKKKTNNLPLALPDFQTFLESDKPLDEFLKITACYVRVSTDAQAEQGYSIPDQTAKLQAFCTVKGWENVKFYTDPGFSGSNLNRPAMQELIADAMAGRLKAVIVFKLDRLSRSQKDTLYLIEDVFLPNEVDFVSISESLDTSTPFGRAMIGILSVFAQLERENIYLRTRIGMKGRISSGFWRGGGNIPFGYDYDKDKKTLVPNADAPKVQQIFNLYIKGYSCQKIADMLGLCNDMMVRNILKRRTYCGYVNYKEEEYPGVHEPLISEETFDIAAAEYDRRSRAGLNACGTNTYYLLAGLVYCGDCEARMRYMKWGKYFKIICYSHTSKASMVKNPDCPNMGFLASDIEELVINKLFGIGSGVPLEEFEVKWHSPNTREIIEKRISDATTKLKRLYGLYSESGDSVIHERIFAVRNQIRTLQQELDNEDKHSIRDSHVSYVRDRIKNVGDIWPHLTPMERQTLIRDCVDKIIIHHDGSVKIFFSFSTFDEDKQCIEEEN

SEQ ID NO: 26903 - protein, 571 aa, synthetic construct
MKDVKEDTKKIVRILLRVSSDQQLEADGDLSIQRKIVVEEVKKHEEWILDSKEYFEGSNSGYKNSVADRDVLQEALRDAENKEYDILLAYKDDRLGRRMLEIPMYIMSLKQFGVDVYTVKDGLLTPDLGDITGMLMLSMRYAMAEKSSSDTGMRVKDTAQKLVQQGKFMGGKAPYGYKLEYSGEYSKHQRALKHLVIAPEQAEVVKYIYELSFYKEFGSGKIASSLNNDSRYKNLAPNDVWKSGTITSILTNPIYAGYTAYKRRETQNGMSHSLDRKDWIIAEKQNKEITIINPELWEKVQISRQKRRTKYQKQPWNEKATIISRNDGNLALIDVAYCGYCGRKLTNGTKYDYWTIKGTGERRSSQKSIYKCQNVWQGVPHEKMKQIRADKIEPIVFKKLSEYVGRLQEDENIFEQILENQSFEKKRQEQILVREKRNLQEIEKNIDILNDAIPNAITGTYPLSLEDLAKSIEKQKDKASKQKTVVEELETNIKNLSVSQEDWENLYHNLPTWQDIFMNADVATKRVLVNKLIERIDITDDTVVIRFKVDLDHFCPQPRMTVNERVPEPGL

SEQ ID NO: 26904 - protein, 434 aa, synthetic construct
MERVIERVDFQIPTQPKALRVCAYARVSSGKDAMLHSLSAQVSYYNSLIQSHSGWFYCGVFSDEAITGTKSQRDGFQRMLASCRAGEIDLVITKSISRFARNTVTLLETVRELKSLGVDVFFEEQNIHTMSADGELMLTILASYAQEESLSASENQKWCIRKAFENGELVNLRFLFGYSITADGIQVNEKEAAVVREIFTRFNGGESLSAISRDLNDRGCERPLGGTWCADRIRNLLSNEKYTGNALLQKKYRNNHIDKKLVPNRGRLPMYYVAGSHESIIDQTAFDKAQVRLNEMARQAEKREKPTRSTFSGLIRCGLCGSTYKRVTCRGKHFWNCTTFQTKGKAECPAKKIPAETLEALACEVLGTEVLAPDMVRSKITMIRAEKNNVVVFCMDDGSEIVKRWKDRSRAESWSPEMKEQARQRALQTRRVQK

SEQ ID NO: 26905 - protein, 522 aa, synthetic construct
MGNVMVIPARRQVGNTVKQSAQKKLRVAAYCRVSTDSEEQETSYEAQVTHYTEYIQKNPEWELAGIFADDGISGTNTKKRDEFNRMIDECMAGNIDMVITKSISRFARNTLDCLQYIRQLKDKNIPVYFEKEAINTLDAKGEVLITIMASLAQQESQSMSQNIKLGLQYRYQQGKVQVNHNRFLGYTKDENGHLIIDPEQAEIVKRIYREYLEGSSMDKIADGLMADGILTGAGKTKWHTSTINKILRNEKYMGDALLQKTYTTDFLTKKRIKNNGTVPQYYVEGDHEAIIPKELFMQVQAELVRRRVVHVSPTGKKRSFSCNHCFAQMVFCGDCGELYRRVHWNNHGCKSIVWRCISRLEPISAEKNCTNRTVNELLLQEVTVKAFHQILTERDFFLKTLQQNIAKAVVNADTLSPDGIQTRLEELQKELIKKANNKQGYDAIADEIFRLRDQKEQSELDSHHREEAMNRIKELQDFIAGQETDITEFDEALVKKLIEKITVFADHFTVEFKSGITIDIEA

SEQ ID NO: 26906 - protein, 519 aa, synthetic construct
MKKVTKIAETASSKVKLKKIRVAAYCRVSTDSDAQLESLEAQKTHYENYITSRDDWEFAGLYFDEGITGTKKDKRLELLRLIDDCKAGKVDFVITKSISRFSRNTTDCLELVRKLLALHIPIYFEKENINTGSMESELFLAILSSMAEGESVSISENSKWSIQKRFESGTYKVSYPPYGYDWDGEQMVINPEQAAVVKEIFAALLSGKGTHAIADDLNRRGIPTKRNGRWTATTIRGMLSNEKYVGDCLFQKTYSDSRFVRHNNHGEQTQYMVKDHHEAIISREDFEAAHAFIHQRATEKGVVKGSDKYQNRYTFSGKIICGECGDTFKRRIHSCTGYKYTAWCCSTHIKDKDKCHMLFVKDDDLKQAFVTMMNKLVYAHRIILKPYVDALKNTSSDDSLRRIQEIQTLLAQNTEKRETLTKLMTQGIIDPILFNKETNELLSQADSFRDEINALKNAVSGDVTKVTAATALLHFTEKGGILQDFDDDLFKEYVNRIIVRSRNEVCFELKCGLTLRERM

SEQ ID NO: 26907 - protein, 607 aa, synthetic construct
MTNEKSYVNIMATNPVLTVAPPKEETEMFGATDKITALYCRLSQEDERAGESLSIENQKSILLSYARDHHMTNPVFFVDDGYSGTNFDRPGFQEMLAQIEAGKVANCIVKDLSRLGRNSAMTGLYTTLTFPKYGTRFIAINDNFDSADPNSVNNDFAGTKNWFNEFYARDTSRKIRAVQKSKGEKGIPLTVNVPYGYMKDPNDPHHWLIDPEAAQVVKRIFTMCMEGRGPSQIANQLRADQVLTPTAYKKQQGLGTPHPLPENPCKWSNSSVVNILERREYTGCTVNFKTFTNSIWDKKQRENPLENQAVFPDTHERIIEDDVFEKVQEIRQQRHRMTRTGRTSMFSGLVFCADCGAKMYYGATNNYKPQNAFFDCSLHWKDKEKCSTHYIRESVLERLVLRHIQMVTDHILHHKDYFVSVMGQQMRLESSEKIQIHRKKLERNQKRIAELKRLFIKIYEDNAAGRLSDERFDMMSQSYEAEQKQLEAETQTLQQEIEVQERQHENIELFIQKADKYVGIEKLTPYALRELIQGIYVEAPDKSSGKRCQTTHIKYDGIGFIPLDVLMNGKTAWPKSRRFPRTTSSHDILNFTVLRPPCIWRVLFVGF

SEQ ID NO: 26908 - protein, 453 aa, synthetic construct
MECVAYMRVSTEKQVVEGNGLDSQKRDIENYCRKNELVITDWYIDDGYTGANMDRPGLQRLVNDCSRKRVSCVVAFKLDRLSRNMIDGIYLIEKVFQKCNVVFKCVHDSVNYDSPMEQAYTQMMAVFAQLDKNTMMLRMRGGMLERIKQGYWMGGGNLPYCYSYSKEQGILIPIPERAEQARKALELFISGYSDVKIKEICGFKSELVTRNILTGIVNIGMIPYKGKIYQGRHEPIFDKGRFNLAQELRKTRAKSRTTCQTEPNLLTGLCYCGVCGCAMRYQKWTNGEHKIYCMSRNKSMSYLPNYNANCDNSLEWADDIEKQVEKEILKISLNLSSYKPKEKATKLEIMQSQLDKEQTKLKRLYSLYADGNDTVLEMIKESESTVKTMKANVLSESKNAADTQKKEFVYENIKKLADVWNNIDKKKKNMILKTIIDKIVIVNGNIEIQLKNF

SEQ ID NO: 26909 - protein, 550 aa, synthetic construct
MKQSDKITALYCRLSRDDDQQGDSNSIVNQRAFLTKFAKEKGFRNIEYFVDDGYSGANFQRPDWQRMMALVDEGKIGVVIAKDMSRIGRNYLEVGMYTEITFPQNNVRFIAVNSGVDSSNQSDNEFAPFLNIINEFYVKDGSKKVRASLKLKGESGEHLTTIPPYGYVKDAENSEQWIVDDEAAQVVKRIFALCMDGNGPTQIARILKEEQVLTPTVYQDQKGQAVRCSLPDNPYGWNSSTVSAILERMEYCGHTVNFKTHRQSYKIKKTIENPPEQWKIFRNTHEAIVDEETFERVQELRRNKRRPAKTGKSNLFSGVACCADCGEKLYYCTTQNFEERQDHFVCSTSRKKGKDVCGTHFIRAMVLEKGVLKFLQILLWYISDCEDLFREKLGAKRKEEFKKELAAKRRQLTQAQRRIEELDRLFKRIYEDNISGKINDSRFQKLSVDYENEQTELTEKMLLWEQEIAKQEEEADSIEQFIRRAKKYPELTELTPAILNDLVNKVYVCAPDKSSGHRVQDVRISLACIGFLPESIISEMVNHAAESRTA

SEQ ID NO: 26910 - protein, 518 aa, synthetic construct
MNVVIYARYSSHNQQETSIEGQLKVCHEFCERNNYTVIHEYIDRAISGRTDNRPDFLQMIQDSANRNFEFVIVYQLDRFSRNRYDSAHYKNKLKKNGVRVLSARENINEDASGILMESVLEGMAEYYSAELSQKVKRGMEINASKCLCTGGNRTLGFYIDKDKKFQIDPNTSPIIKLIFEMYADGKSIVEITDYLNAQGYKTIQNKPFGNNSIRNILGNKRYIGTYTYKDTEIAGGIPRIISDELFNKVQEVLKKNKKAPARARAKEEYLLTTKLFCGYCKEMMTGFSGTGKLGKVYRYYECKGTKKHTCKKKRVKKEYIEDIVIEVCRGLLAKENINRISKEISKLFENNQDTFNLKRLKKQLSENERKHRNLINAVSECDIESLRKTFYSEILELESQKEKIEEEIREEEKLHIVLTEPEIKFFLTSLKNGSADNIKYRKVLITTFINAIYLYDDKITLIFNSGDKPVTINNILLSEIEANESNNTDTEGLFIDNVALPSKNGLNTAFKPFFDTIL

SEQ ID NO: 26911 - protein, 522 aa, synthetic construct
MGKVRIIPQTINPLTQVKIGTIKKKKVAAYARVSTDQEEQESSFDAQVQHFTEYIKSRDDWEFIKVYSDEGISGTSLKKRDGFNQMVADALNGKIDLILMKSISRFARNTLDLLTTVRKLTAKGVEVFFEEQNISTLDGGGELFLTIMSSIAQEESRTISENVKWGKKESYKKGNVSFAYSRFLGYKKEDGKIVIDKEQAVVVKQIYQWYLRDGLTLTAIAQRLNENSVKTPSGKNNWTVNNITSILTNEKYKGHAILQKTYCDNFLTHQMKKNTGQMPKYHVEDSHPAIIDEDTWNEVQLEIQRRREIGSCYSSTDVFSGKLICADCGSFYGAKVWHSTSKYARTVYQCNHKFKHKCQTPHLEVSFIKEKFIEAYNMVMIDKESLIEDTKEGITVLCDFVGLDGRLVELQNEMDIVSELSNKMIIENMHKLQSQEEYTKKYEELLKRYEKANVEYGRIQDEKLHKIGLSQKLESFIKDLENRPASIDYFDETTFRFMVESVKVDRDKRLTFKFRNGKEIEV

SEQ ID NO: 26912 - protein, 441 aa, synthetic construct
MIVNEIVPQELANKRLRVCAYARVSADNEDMMHSLSAQVSHYNDMIASNPKWIFAGIYADGGLSGTKTNRPEFQRMIQDCKNGKIDLIVTKSISRFSRNTIVMLETIRMLDEMGIDVYFEEQQMNIKSGKGELMLTIIGSFAQEEARQVSENMKWRIKKDFEKGILWGGNNPYGYVIDRKEKRLVINPEQAKVVRLIFEEYLDGKGASLIAKKLNKMGFKTMMNSEWNNNVVMAILKNEVYTGDLLLQKTYRENYLTKKTLKNKGELQQYYVEDDHEPIITHEMFEETQRIRNERIKKFKNKISYSNKAYPFTGIIKCSCCGSTFNHKTTKYNKLWICKTFNMKGKEYCQESKQIDESKLYEAINKYFGWDCFKENDFKTKVEYLIAKPNNEIEMHFKDGNVAIIKWEDRSRSESWTSEMKEKARQKKIEQYKKRGGGLNG

SEQ ID NO: 26913 - protein, 527 aa, synthetic construct
MAKSVTKIPQTRNIFTAAPITGIAKRKVAGYARVSTDSDEQFTSYEAQVDYYTRYIQSHPEWEFVKVYTDEGISGTDTRHREGFNEMIEDALAGKIDLIVTKSVSRFARNTVDSLVTIRKLKEHGCECYFEKENIFTFDGKGELLITIMSSLAQEESRSISENVTWGHRKRMADGKVSVAYSTFLGYDKGPDGNLVVNREQAKIVRLIYRSFMEGMAPIGICRMLEERGIPSPGGKKKWYEGTVISILTNEKYRGDALLQKTFTVDFLTKKTKVNEGEVPQYYVEANHEAIIPPEEFEMVQAEIARRKKIGRAYSGTIFGSKIVCGDCGGYYGQKVWHSNDAYRRIVWRCNRKYGQGERCCTPTITEEDIKKLFVQAFNKLMSERTSAITDCEGLATELENTSGLDQEIEATQKEIDTAVEQNRRLIREQAFTGMPTEEFDARAAMLNERYKKADEKLARLKAEREDHLTRGKGIRRFLSALDAQPQNLEDWDEQAWNLLVSRVIIQRNGCVEFVFRGEITITVRVA

SEQ ID NO: 26914 - protein, 436 aa, synthetic construct
MEKQVTRVPVKPTLERLQNVAAYARVSSGKDAMLHSLAAQVSYYSQMIREHPGWRFAGIYADEAMTGTKDTREEFQRLLTDCRAGKIDMVITKSVSRFARNTVTSLETVRELKLLGVDVYFEEQKIHSLSGDGELMLTILSAFAQEESKSASDNQRWRIRKGFEDGELMCLRTMFGYRISKEDGIEIDPEQAQIVREIYARVIRGETLNSIARWLNRNGIHGAYGGKWNTPRLRDLISNEKYTGNALLQKVYVNNHIEKKRIKNKGEVPQYYATETHPAIIDQATFDAAQEALARIAARHPSGGHIEHYAFTGMILCPACGRHFKRTKNHGLSRWACPTFIQEGKEYCHSRKIPEEILMRITSDMFGWNSFDEAAFRSTVDHITAVYPDQLIFHLKDGTERKTEWQLESRSKSWTPEMKAKAAENARRRGHGKKCD

SEQ ID NO: 26915 - protein, 572 aa, synthetic construct
MASRIAEKLAAKKAAIYIRVSTHWQVDKDSLKVQRRELIAYVTLVLGITDYVVFEDPGYSAKNTDRPEYQAMMDRIRTGEFTHLVVWKIDRISRNLIDFAAMHDELQSLGVTFVSKNEQFDTSSAIGEAMMRIILIFAELERKTTAERVTAVMLSRASDGQWNGGRVPFGYSWSKETKTFSIVPEEAKAIRRMAELYEQYQSLLYVAKYLNDAGIVTKTGGQWTPTTVRTILTNPWYIGQYVYNVHSDGKGIEKRDSDEWITVENHHEPILNEDIFCRMKFLLTRNKRGGVPSHKTYVRKNIHIFAGLLRCGQCGSNMTANLDRRRANGFRPSQYACGSRRRKGTSCTNKYISDTTLGPFVLNYVANIIRASKNSSEATTPEVLERKLLRGEAFEDVASVSTDALGQLLDAFRSAGDAVEYRPQIAFSGDDNSIREIDTLRARRRKLDNALARLNALYLYDDEAMPEKDFVMQRGQITKQLEEVNTRIEELQNQESSEELGDDFIGKASYYIMANKLIEDRYIDYEKYIRAIDPSIPRSFLQQIIDHIVVNDGRVISITFKNGSTHTFTYKT

SEQ ID NO: 26916 - protein, 582 aa, synthetic construct
MAKHAISIPQNPKAALYIRVSTDMQADKDSLPLQESDLRKLADLNGIKDIEVFSDAGFSGKNLNRPAFRSMMDRIRAREFSHLYVWKLDRISRNLLDFLELYDELKDYGVAFASKNESFDTQSPGGEAMLKILLIFAELERKTIAERVTAVMLGRANENKWNGGRVPFGYMPGPVTTDANGKKCKSWPVPDPIEAPIVRAIFELYLREKALKKVATALNTAGYRSRKGTLWSDTTVRCILKNHFYKGEYVYNRQNPNAGRREDFYRSENDWVVVTGQHEAIVPEETWRRCNEMLSKNRSWLAPIGSLVSAQDKYIFGGLLQCAECGYTMNSKDRTRIHDHTHSSYYYCTGRWKAPVVCTGEHSGYASDRVLLPQILKLIARMIEACANAIKFASAEQLVSYLLNDNLIPGATGIEEAQRIYMIVRAHVKHIYGVDQANQYNPNALLVEQSQKEKEKQERALSRLKRAYLFDDGDMSEAEYFEQKAAIEGTIAKLEKQIKSLSGNDIGADEAYLAQLSKLIMIKKLQDTNSDFDYYKLAKAIGRKPIHDFLTEIISRIIIGEQNRIIKIIFKNGVSITLQYTK

SEQ ID NO: 26917 - protein, 514 aa, synthetic construct
MNTVIYARYSAGPRQTDQSIDGQLRVCTEFCKQRGLTVVDTYCDRHISGRTDERPEFQRLIADAKAHKFEAVVVYKTDRFARNKYDSAIYKRELRRNGIQIFYAAEAIPEGPEGIILESLMEGLAEYYSAELAQKIKRGLNESALKCQSLGSGRPLGYTVDEQKHFQIDPESSQAVKTIFEMYIKGESNAAICDYLNARGLRTSQGNLFNKNSINRIIKNRKYIGEYRYNDIVVEGGMPAIISKETFCLAQAEMERRRTHRAPVSPKAEYLLAGKLFCGHCKGPMQGVSGTGKSGNKWYYYYCANTRGKERTCDKKQVSRDRLEKAVVDFTVRYILQEDVLEELSKKVYAAQERQNNTASEIAFYEKKLAENKKAIANILRAIESGAMTQALPARLQELENEQTVIQGELSYLKGARLAFTEDQILFALLQHLDPRPGESEQDYHRRIITDFVSEVYLYDDRMLIYFNISSADGKLKHADLSAIESGVFDAGLTSSTKKDIAFCSVFFLLYVQF

SEQ ID NO: 26918 - protein, 446 aa, synthetic construct
MNIAIYPRKSKKDDNSESMEQQIDDCRKYINKTYPDANIIVYSGDYAITGHSTAKRKDFQRMMDDVRAGRINAVVIMRYDRIARNMRDFCNLYHDMESAGCNLISVSQQIDTSTPYGKNFMYQMANMAELEWAVISERYKDTAAYKIREGKAYTGRVPIGFKIEKIDGIKKVVHDNEEQTRAIFDYLLATKSKRGTVLWVRENLIPDFTRHKLDTMINSDLYIGKVRENENFCEPYFTKEQMEEIRSVNQIKYAPSGHIYLFSGLFRCPICGRKMSSFYSIDRKTKKHRQYQRCWFGGNEKLHKTKLVSEAKTEKYLLENLDAALKNLEFDVKKEAGKPKRNLNKKLNDAIAERDRLNYLFEKGRIDIPEYEKKYSVLSEKINSITEELSNNKVVRIEEFKKQIPEDWKELYEQLDQKGKQEFWHRIIKEIYLNEAFEITGFIFYI

SEQ ID NO: 26919 - protein, 599 aa, synthetic construct
MRKINKIEPKLPVLPTRKKVAAYARVSVETERLHHSLSAQVSYYSELIQANLEWEYVGVYADDGITGTKATKREEFQRMLDDCEAGKIDIILTKSISRFARNTVDLLETVRHLKELGIEVRFEKENINSLSGDGEVMMTLLASFAQEEITSLSNNVKWGVRKRMEQGIPNGHFRIYGYRWEGDQLVIEPEEAAIVRRIFQNFLDGKSRLETEREFEAEGITTANGCRWVDSNIKVVLTNITYTGNLLLQKEFIEDPITKRRKKNRGELPQYYVEDTHEAIIDMETFKYVQDEMARRKGLGAFANKSLNITCFTSKLKCSKCGSSYVRNQRSNRTKYTSTYGDTIVVWVCGTTKKKGGRCSRKDIPERVLRETCAKALDLEEFDEDVFLEKVDYIMVNPNCQLEFHFYDGTTKVQTWKSTARKDCWTEEHKERQREWVRKNMATSSRFSPFTTRVVCGGCGSSCRRQTQPSKLSETGKIAYWRCSGGAKTNCGIKGIREPELMEITAQVMGTPEFDGDAFREQVDHIMMVESGKLEYTFADGHTRTAEYSVARPSHPWSEEQRGKFKESVKGTYTPERRKAMSEHMKKVRSEKHWASKRK

SEQ ID NO: 26920 - protein, 527 aa, synthetic construct
MGVQKKVKTIPATLTRFTASPIAEQKKRKVAGYARVSTDHDDQFSSYEAQIDYYTNYIKGRDDWEFVEVYTDEGITGTSTKHREGFKQMIADALDGKIDLIVTKSVSRFARNTVDSLTTIRQLKEAGVEVYFEKENIWTFDGKGELLLTIMSSLAQEESRSISENCTWGQRKRFADGKVSVPFQRFLGYDRGPDGNLVVNREQAVIVKRIYSLFLQGMTYHGIADTLTKDGIPTPGGKKKWSISTVKSILSNEKYKGDALLQKSYTVDFLTKKTKVNEGEIPQYYVEDNHEAIIDPEVFEMVQREMAKRGKGKKYHSGVHAFSTKVKCGECGSWYGSKVWHSNSKYRKTIWQCNHKFDGDCRCQTPHLTDEEIQLHFLSAANKLLATKAAVIANGREMQALLFDTTELEAEQAQLLEETQVVSDMVQQAIQENARTAQNQTEYQKRYDGLVQRFDRAKTRLEEVTAEIQEKQTASANMGAFLSTFEQMPDALTEFTLESWHSMVDFATVYSIDDIRFTFKNGQEIQA

SEQ ID NO: 26921 - protein, 422 aa, synthetic construct
MKIEILGANTQVKRQKLRVCAYARVSTASDAQEDSLDNQRTTYERLISSNPEYEFVGVYADQGISGYSEHRPAFQNMLQDAREHRIDLILTKSISRFARNTVTVLKYVRELKELGVGILFEEQNIHTLSHEGELMLSVLASFAQEESRSTSENNRWTVRKRFEHGEPIINTTCFMGYDKNEYGELVVNPEQAAIVRRIFHMYLSGYGAFRIAQIFNQEGVPTVRGGKWADRTILDMLRNEKYKGDYLLQKYYTPENMRNRSVRNNGEVQSYYIAEDHEPIVTVEEWDEVQRIMAARREKRGMSGSRKYSNRYPLSGMLFCPYCGKTLRRKQVHNKRIEWWCSTYILHGKAACKGIHVRDEEIPKITEKTVVEEFLRDGEKHYCYTSKADFDAGIHREPVIREDPGSRILPCVNRPRRTAIKL

SEQ ID NO: 26922 - protein, 464 aa, synthetic construct
MARSVTVIPARSQKVRTGHKAVQEKKIRVAAYCRVSTDQEDQLHSFEAQVEYYTKYINEHENYEMAGIYADEGISGTNTKKREQFKKMIADCEDGKIDLVITKSISRFARNTQDCLAYSRKLKNLGIGIIFEKENINTLDSTGELLFTILSSLAQDESRNISENCKWGIRTKFKNGEMHLNTFKFLGYDKDENGKLVINKEQAKTVRRIYRDFLIGINPAQIAKELTEEKVPGCLGQTKWYPSTVTGILKQEKHMGDALLQKTYTADFLTKRQVRNNGEIAQVYVKDSHKGIIDKQTWNAVQEEFDRREKFMESHGTDRYSYGADCMPFCEKVFCGECKSLFTRHSWSSRGIVQWQCKNHRKDGKVACTNAYVDNADLEKGFVKAFNRLVTDRDKHMERWQQMKSDGTPLEKIRAGQMMEAVGNEPLTRFVPEIAQLVLCEVTVLGAKKYEFFFLEGSKVKVSV

SEQ ID NO: 26923 - protein, 551 aa, synthetic construct
MNVVIYARFSSHNQQEQSIEGQIRYCTEYAKKNDMTIINSYIDRAISGTSDNRPEFLQMIKDSNNHQFNVVLVWKLDRFARNRYDSAIYKNALKKNNVKVVSVTEYLGEGSESVLLEAMLEAMAETYSRQLSENVRRGMRESALKCQVVGGSVPLGFDTVDKKYVINEKEAEIVRFIFDEYVSSTSKKEIVNKLNAKGWRTKNGSTFVFNSLNKILSNRKYIGEYKYEDIVIEHGIPAIIDERTFNLAQKQLSKNKQNRGTKSAKHEYLLATKIFCGYCGGSMIGETATGKGGGKFGYYVCRNRKKHINDCKKRREKQKELETFIVERTLYMYKNKDFVNEVAQKVVDLYNKECGQNHLKTLELNKKELEKKLEELSDGLLKTTNARVLKKFNEQINVIDNQLAELEIEIAREKAIANATMRCSDVIDFISDIMNGDINDKQFQKKIIDTFINAIYVFDDKFIVYYNGSNTSDKVTFDDLLHDLKNKGVEGSTFNTLTPPNKYWMNTYFFSGGFAVRCVLWYKNRTPFQCKSWSGVFLSLKDFLSTYSIFG

SEQ ID NO: 26924 - protein, 531 aa, synthetic construct
MPRKPAKHPAKPKRGKKLEIEEPGVLYGRYSSHNQKDISVEQQFEKGYELAAEYGIRIIDTYADRAVSGRTDKRRDFQRMMTDAAKGKFRYVIAWKSNRMGRNMLEALINEARLQDLGVRVLYVEEDFDDTAAGRFAARSMMNVNQFYSENMAEDIKRGLYDNAANCMVANGHLPYGYKADETLHYAIDEPKAAVIREIFTRVSCGEAFVDIMASLNARGIKTSYGRPWGRSSFQKILSNERYRGIYIYGDVRKEGGIPRIVSDELYFKVQEVITTKKNPQGRHRVNGDYLLTGKLFCGHCKSPMTGISGTSRSGNLHYYYVCQKRRTEKTCEKKNLRRDDIELQVAKAIKRRTLDDDTINWIADSVVEYSQHQESASGIGLLEDQLKDTQRSIKNLMAAIEQGIITPTTKVRLMELEKEQSDINRKITMAKADVIPVNRDQLVGWLKKLQAGDVHDKKYQAELFDTFLIAVYVYDNPDGQDYMKVVFNYAGSKNTVEIPLDPSVIDNVENIETGAVRLSSAQVHQNQKSC

SEQ ID NO: 26925 - protein, 558 aa, synthetic construct
MTNAVIYARYSPGPNQTDQSIEGQIHECTRFCEDNDLRIVGTYIDRKQTGRNDNRADFQKMLRDSSRHGFSTVVVWKIDRFGRNREEIAKNKAVLRMNGVRVLSAKEHIPDGPEGIILESVLEGLAEYYSANLSQNIKRGMRESALKCQFNGSGLSTGYTVDADHKYRIDPDGAAVVRTIFEMYDGGKKIADILRYLQQSNIKTMRGKEYTHYGISRILRNRVYIGEYHWHDIVVPGGVPQIIDNDLFDRVQKRLEVNKHAPAARRGDVDFLLTSKLICGNCKSTMIGDCGTGKNGARWYYYTCRAKKTKSSKCRKKSVPKEALEREVTALTAAYVLRDDVIDYIANKVVEIQKSEHDDKSMLRYFESQLKDTNKAIANIMRAIEAGIITETTRSRLEELEDTKRDLETEIIKEKVARPTIEREQVIFFLEKFRGGNVDDKEYQRKIIDTFVHKVILYDDKITITYNYSTDSTKNAENTVESIESAASAAECKCSNKPSSSPPVTRILLLQCSCYFFRRGSNRTVLRSRISSVRWTVGKSACVSAHGSASSDPLRLHQ

SEQ ID NO: 26926 - protein, 485 aa, synthetic construct
MPTSDLKIAAAYIRVSTDDQEEYSPDSQVRLIREYARKNGYLLPEEYVFQDDGISAATARKRPAFNRMIALAKEKERPFDAILVLMFSRFARNREESVLYKGLLRKQGISVISVKEPAVDGPFGTLIESIIEWFDEYYLINLSAEVKRGMSEKFLRGEAMGTAPFGYRIDSANKTFTVDPERAEIVCDVFRSYADGAGLRDIAVQLGDAGITTRRGNRPDSRFVEYMLRNPVYIGKIRWTPGHKTRYSRVHIADGVEVVDGKHPPIVSMDLWEAVQRRMDQRKAAYGRYQRQAPAAWMMRGLVRCSACGATLIMAGRSSSCPFLQCHSYAKGACHTSHSLSLRRANAAVLAGLRRSVGTLIFHMVPHLTSAPSRAADYGRLLEQERRRLARCKDAYQAGVDTLEEYRDNKARLEERIRRIEEQAASAAAAPGSFDKAAYGKKTADILRFLETSADEGAKNEVLRSVVDHITYEKASRHLAIYFYT

SEQ ID NO: 26927 - protein, 519 aa, synthetic construct
MKKVTKIDKIQPAKNAEDKLRVAAYCRVSTATDAQLESLEAQKNHYENYINSRDDWCFAGVYYDEGITGTKASKRPELMRLLADCKAKKIDFVITKSISRFSRNTMDCLKIVRTLLNLNIPVYFEKENINTGSMESELFLSVLSTMAEGESASISSNNKWSIKKRFENGTYRLSSAPYGYKLESGGLQVVPEQADIVKRIFRELLSGKGMYSIAKKLNAEQVPTQKGGRWTSTSVHNILTNEKYTGDCIFQKTYADSNFNRHINNGELNRYLIQNHHEAIISHEDFKAAAALIEQRAAEKGIESGSDKYQKRYAFSEKLICGECGNTFRRRIHKGKYNSYVAWVCNTHLSDTNRCSMLFVRDDALKLAFVTMLNKLIFSYRLLLKPYLAAMQSNTADEALLRIQYLEKQLDQNAEQRSTLHKLMAQGYIDQILYTQESNELLLQARDFRSEIEALNNTVAGDTTKVYETERLINYCKRGEMLTDFNESLFELFVDHILIYSRQKIGFVLRCGLTFEEMI

SEQ ID NO: 26928 - protein, 524 aa, synthetic construct
MVNVAIYLRLSDEDRDKRHKSDESESIQNQKSMLRAYCFERNWNIYDIYCDEDFSGADKSRPNFNRMLRDCETGKVNVVLCKSQSRFSRDMEMVEKYIHNKFIEWGVRFIGVVDNADSANATNKKARQINGLINEWYLEDVSENIRETLKHKREKGEFTGSFAPYGYLIDPKNKNHLIVDENTAPIVKDIFNWYIQGWGYRKIVMELNDRHIPNPSSYKHQINSNYVNTKESESPSRGLWTHTTIYRMIRNETYCGTLVQGKSHNVSYKNKKRKPVSPNEWIKVENTHDAIIDKETWRKTQERLKSRARVNKSSYELSLFSFKVKCAVCGRAMKRNVYHNKSKTKTYYGLQCATYKTGAMNCTNTRTINGNVLESIVLEQLNNLLNKYCQSDNIILQETELSSIKSLEVSMQSYQNKIKALEDKILKIYDDKLEGIISLEQYIAYSKKYNDDIDYLKAECKNLNNKIKQYEENRNIHSKQKEIIKRYTHPDRLTREIVDEFIDCIYIGRLDENGNRDITINWKF

SEQ ID NO: 26929 - protein, 529 aa, synthetic construct
MAYCIYLRKSRADRELENQGHGDTLKRHRDTLIELAKKKHLVIEEIYEEVVSGDSISARPQMQRLLNDVSEGKWQGVLVMEIERLARGDTSDQGIVTNTFTYSNTLIVTPLKTYNPADEFDQEYFEFGLYMSRREYKTIKRRLHAGMEASCREGNYIHHTPPFGYSRVKNEKSKGYHLEPKPGEAEIVKLIFQWYTQGELQPDGSCKPIGTSLIAHKLNTEYSIKPLNGVWTVSTLSSMLRNEHYLGYIVFGKSRRSKAVENGNIVNKWIRNEPGSYELYPGKHPALVSQDVFDMAQAKLSLNPRRPTKSITNPLAGVIKCGMCGRNMYRRPYVKRGQAASLICQEKTCHNVSSAFKLVEDALLSSIQEWIDGYELEEQHEKYNTDTLDSKIALLEESKKQIDKFKGQLEKIYESYESGIYDSATFLERQKLMSAKISDTEQSITNLNKEIQQEREFINNQEQIIPRAKKVLEIYRTCDDVQLKNDLIKSIVDKVVYVKTANGKFKDQKQEDFSLELFPKLPKNKGISD

SEQ ID NO: 26930 - protein, 504 aa, synthetic construct
MNYNDSKGIYLMYLRKSRADEYNQDVENILKRHEEELQSLAKREFGELIPEKYIFREVVSGGTIKDRPLMKEILKMMESGIIAGVLVVDPQRLSRGDLLDQGHIINAFKYTNTLIITPYKTYDLNDTTGTDMKLLKMELNHGADYLDYYKMVQARGKLASVRAGNFIQPIPPFGYRKVRYGKVTTLEPIEDEARIVRIIFQKYAEGKTICGVTNELNAEGYIPPSKQIWTKGSVKRILSNPVYDGKIRWGFTPNKTVMEDGKLKKYRPERHDYLLFDGKHDAIVNHGLFMSVQERLSKNKSFTNDRSLKNPLYGIMYCKRCGRKISRLNVSESRGGHRYACPNKLCDVQSSRYDLVIEAVIDTIQCAIDDFDITFHDCNSSGSDEKIRELRQELTRLNNKEDTLFELLETKVYSTSVFTQRHAELEKKRQEIIGKINTLSLIPPPESCNDKKMRFKDALLALKDESMPPKEKNHLLKKCIERIDYDIEGVRYHSKVKLDVYFKF

SEQ ID NO: 26931 - protein, 518 aa, synthetic construct
MQENETYVIYLRKSRADSEKSSLEEVFTKHESELQSLAERTLGNRIPEDKIFREVVSGETITDRPVISQILKVMESKKIKGVFVVDPQRLTRGDLLDKGHLINVFKYTNTKIITPYKTFDLNNDFDLKLFKMELDKGSDYLEYYKMIQARGRIASVRSGQYIGSTAPYGYDKYSYKENKHTVNTLKPNSDEATVVQLIYHLYVNESLSYAAIANKLNTMNIKPRKSTSWSPYSLKEILHNPVYIGKVRWNRRKTVMKYKNESLLKTRPIALNDSIISDGIHEAIIDEALFDSAQECNGKTPRNHSSSKLINPLAGLIFCGNCGRAMSYKTYKNNAGSEKQSPRYLCNNQSNCHTKSAKATDVINQIISALECYIEDFKVKLENDDGNSFNVRSQIISVLNKQLQDLEVREETQYEMLENKIYTPELFKKRRQKLLEEREVLLGKLQEAKVQEPVKIDYQEKIISFTDTVEALKNPDIDILQKNMLLKKCIKKITYTTDKEKGNRWRESTFEIDITPLI

SEQ ID NO: 26932 - protein, 516 aa, synthetic construct
MNNVACYIRVSTDKIDQQNSLEKQRILLQEQYKDCNISMYSDTGTGTSFKRKGFKQLLFDCGLNEKILKDGRLTFEVDALREPLFNEIVVINTSRFARNIAIIDILRVLWDYKKVNVKFLDVQKNSNNPSDMILLQMFFAMAENEVAETSKRTKRGNKTTIMQNKIRNNSIFGWDFDRETNSLIANEEEKKVVEFIFETALTNGLKNTAKLVNEKGYRTKKGNLWTDSTIKTLITNPKYKGYNVRNKFESVNLFTESRSKYVKKENWVVMKNDRIEPLVSEELWEKVQQALNKRCIAGNKGQNARIYDTRGKVKCKCGANYVRCVTTKVANEPKDKHYLICGHKKKYGKDYCKSENITVGILDRFIEEQRKSYYKNLQLQIRVKIMQIEKEINNIAKDEVFSIKEKEQELDVLRDKLDKLLDTFLSSSETMQKLVEKKVGELEYHIKRLELEISNIKSIYADKEKHLRQLNNKIIKLKQELINSTDKELTRKEWLDKVNKIIIESKISFNVVYNLD

SEQ ID NO: 26933 - protein, 530 aa, synthetic construct
MSTGTELRAVFYARVSTEEEKQLNALEKQIQENKDVIRDHGWRLVGEYIDEGKTGTTTKRRNDYKRLLKDMTENKFDIVVCKDQDRLQRNTLDWYLFVDNLVTNNLKLFMYLDNKFFKPSEDALITGVKAIIAEEYSRNLSKKLNNSNKRRIERALNGEEVSAMGNGKSLAFKIVNGKWVKDEEEAKLGKKIFELYLEYDSIRKVRDWVNEHGYTNSVGKPFTSESISRILKNEKAKGVIVMGKYHHDFDKKKIVRRSEEELVRIPAPELAYVSEEVFDKVQERLRAKTGNGRGVNAYSDPLSGKIYCGSCGRKLWKHASNGYVNWMCASQVAKGDVECNGTRITTVAIRNIYKKITDNLEVNKGVVKQDIVKWLNELKATLSDTSVNEKIQKDLDKLERKRTKLLEAYLEDFISKDDYKAKYEAIEGQIEEKKKLLVPVEENEDIKVIESVLQNIDDEIDAYVKTLDMEESKVDFLIEHTKRITVLENRDIIIELDLVAGAIIAGKDFLLYVHDTMPQHHGRKCHDIFS

SEQ ID NO: 26934 - protein, 520 aa, synthetic construct
MNVAIYARKSKATKKGESISNQIELCKKYFLNTTNENVNFFIYEDEGWSGGNINRPQFTKMMNDAKLKRFSALICYRLDRIARNVADFSSTYKILEESNIAFISITEQFDTSTIMGRAMINISATFAQIERETIAERIKDNMLELSRTGRWLGGTPPLGFKSVQITENNKRMYKLEVVEEEIEIVRLIYKLYPEYKSTVPIARYLVSNYIKGKNGGDFSRNTVLQILKNPVYCCSDENAIKYFESKGSTLNCSENNKYGLMVYNKRKGGKKENPIEEWIIATGKHPGIIPGAEWVECQNILSEISSKTSPRKATGNKFLLSGMLKCSRCGSSMCSWSRTSKGIYYRSYRCELKNRSSNRCDSKMVNADELEQFVIDLCKNINIEDIINIKRTKNNNASLKRELTSLNKNLNENDKLLQGLIKKLALIDDIDVLSMIQTEIKKIKTENDNINKRINEINISMFDVEDEENKKQLLLESHKLFINTIDLIEDVEAKRNLIMNFIEYFTYDSETNEVGYKLRL

SEQ ID NO: 26935 - protein, 523 aa, synthetic construct
MELSRNITVIPARKRVGNTAAAEQRPKLKVAAYCRVSTDSEEQASSYEVQVAHYTQFIQKNPEWELAGIYADDGITGTNTKKREEFNRMIQDCMDGNIDMIITKSISRFARNTLDCLKYIRELKEKNIPVFFEKENINTMDSKGEVLLTIMASLAQQESQSLSQNIKLGLQYRFQNGEVRVNHSRFLGYTKDEEGNLIIEPAEAEVVKRIYREYLEGASLLQIGRGLEADGILTGAGKTKWRPETLKKILQNEKYIGDALLQKTYTIDFLSKKRVKNNGIVPQYYVENSHEPIIPRELFMQVQEEMVRRANLRGGKGGKKRVYSSKYALSSIVYCGQCGDIYRRVHWNNRGYKSIVWRCVSRLEEKGSECTAPTINEETLQAAVVKAINELLTKKEPFLSTLQKNIATVLNEENDNTTDDIDRKLEELQQQLLIQAKSKNDYEDVADEIYRLRELKQNALVENAEREGKRQRIAEMTDFLNEQSCELEEYDEQLVRRLIEKVTVFDEKMNIEFKSGVEIEGRI

SEQ ID NO: 26936 - protein, 465 aa, synthetic construct
MKGNAGDTIVKKIDLSPELVRVALYIRVSGEEQKIKGLSLEAQQERLEAYARERGWVIVGIYIDAAKTARKNIHKRTDFQRMMDSVKRDEVNILLFCRLDRWFRSVADYYKIMEVLEAHNCDWKTTDEEYDTTTANGRLYINVKLSIAQNEADIDGERIDVVFDSKIAHGTVVSGSAPFGFRVNEEKRLEVVPEDAAIVQDAFNYFETSISQRATVRYIRETYGVNWCDATFRRMLKEKLYTGVYDRGGRFNDHFCPAIISKQQFDRVQALLERNARSVPSGKVYIFTSILTCAECGHKLVGYKSSDYYYYRCNQHFQRGRCSHNHSAREDVVEKWLFEHLAEELERCQLEWEVAAAKKKASVARTDKAALKRKLTKLKELYVNDLIDIEDYKRDYQIYTAALKQIPEPSIEPPPDFAAVRRLLDNDFKTIYENLTREEKRTLWRSAIKEIRIDNDQNITGVVFG

SEQ ID NO: 26937 - protein, 592 aa, synthetic construct
MAKITKVEQKMPTIKAKKRVAAYARISMESERMHHSLSAQISYYNALIQKKPEWEFAGVYADDGISGTGIAKRTEFQRMLADCEAGKINIILTKSIQRFARNTVDLLETVRHLKDIGVEVRFEKENINSMSGDGELMLSILASFAQEESRSISENVKWGTKKRFEQGIPNGHFQIYGYRWEGDHLVVEPEEAKIVKLIFDNFMNGLSAESTEKQLEEMGVKSYKGVHFSNSSIRQILSNVTYTGNLLFQKEYVSDPITGKSKKNNGEMPQYWVENTHEAIIPMEIFQAVQKERQRRRELGVLANWSINTSCFTSKIKCPICGKNYRRSGKRQRKDPNEVYYIWICRTKSEKGAKFCDAKSIPEKKLKAVCAEALGLNEFDETQFSERVRQITVIGDDTLEFYFTDGTVLQKKWKSTAKTDWWTEERKKEWGERHKNKFRNPNRAFYNEFTGFIKCGNCGENYRSQGKTYADGTKDRYWRCSESCGNTAIKHSTVQALVCDVLGIKKFSEEQMDAVIEKAVVSNGLVTFCFKDGHTESREYEEKKKGIPHTEEYKRYMSQVTKERWTPEAREEMSKRVKELRKERGKTWRKEK

SEQ ID NO: 26938 - protein, 526 aa, synthetic construct
MAKRKVTTIPATINKFTAKPMDSKKKRRVAGYARVSTDHEDQQTSYEAQVDYYTTYIQGRDDWEFAGLYSDEGISATNTKHRDGFNQMISDAMAGKIDLIITKSVSRFARNTVDSLSTIRKLKEHNIECYFEKENIWTFDSKGELLLTIMSSLAQEESRSISENVTWGQRKRMADGKVSFAYSRFMGLDKDKETGKIVVNPEQAKVVKLIFRLFLEGLTPHAIAVELTNRSIKTPGGKDVWNQQTVRRMLSNEKYKGDALLQKEFTVDFLQKKMKKNEGEVPQYYVEGNHEAIISPAVFDMVQAELAKRKHSGSRYSGVSIFSNKIKCGDCGGWYGSKVWHSTDQYRKVIYRCNHKYKDEKCQTPHVTEDEIKVVFVSAYNQLITERAEIIANAECIRMTLCVTTDLEEEKQQLEADMTVLVEMTHNIVAENARVAQNQDEFQKRYNGLVERYNTVKARYDEVVVTISAKETQSERLAHFIKILKEQKGILHEFDSNLWGCLVDFVTVGRDKSIVVTFKDGTEIQA

SEQ ID NO: 26939 - protein, 546 aa, synthetic construct
MEETIKAVGYARFSSSMQREESITAQKRYMMMYAKRNNMEVIDWYCDEAKSAKTVNRPAFQKMINDAKNNPEFKAVLVHKTDRFSRNLSDSIQYKKLLEEYGVQVIFVNERFEDNPESHLLYHIMGSVNQFYNENLAREVMKGLKENAYQCKFTGGRPPLGYDVDKDLKLVINEKEAEAVRLIFEMSAEGYGYGETIDKLNILGYKTKKGLPFVKNSLYEILRNEKYKGTYIFKRSCSANSLNKRNNHRRKPEEEIIRIENGCPAIVSSGLWHRANAVKKATRSSYTNAKNTYLLTGLIHCGECGGKFHGNVRYNKNNTNLVYRCSSKKNKRKCESKEIRCEYLDSFVIDKFVEFFFNDDNIKVITKQLNEQYNKSCISDLEYNEAKSTLKILEKSRNNLVEAIAKTGINDIMSDKIKEYEEQIKKTAEFIQKYEKQKVDRVITEDEIREQINHLKDYFYNPKNIIRTKYVLSQYIDRIDISNENVQVQFKVSMSPSGNTDGDYFCVHTEMIKRKYLFDYVCEKVDFEQWNIEKLNKSESEHRKGA

SEQ ID NO: 26940 - protein, 561 aa, synthetic construct
MKNKKIKCDIYTRVSTTMQVDGYSLDAQKEKLKRYAEFQNMEIVNEYSDEGKSGKSVEGRPEFQRMLDNIENGTDEVQFVLVFKLSRFGRNAADVLNSLQRMQDFGVNLICVEDGIDSSKDSGKLMISVLSAVAEIERENILVQTMEGRKQKAREGKWNGGFAPYGYELVNGELQIAEDEAEIIRLIYDKFIHTNMGISAIAAWLNQHGYKKKKRQNNTLDVFASSFIKGVLDNPVYCGKLAYGRRKNEKVSGTRNEYRIVKQENYMLHDGIHEGIISETDWELAHQKREKTGVKYEKTHSLEHEHILSGILRCPLCGSGMYGNVNRKKKKDGTLYKDYFYYACKHRRLVDGHKCGYRKQWSEEKINNAVEEVIRKLVKNPKFEEAILNKIGSRIDTEEIEKEIEGLEKQHRQLTGAKARLGQQMDNLDIMDKFYEKKYQDMETRLYRLYDEIEGVENSIEEVKNRLLNIRQQKISEENVYQFLLYFDKLYDKFTDLEKKEFLNSFVEQVDIYEQEQPDGRFLKHIKFRFPVYFGDRETQELCWDNESTVETVVGLHRKDM

SEQ ID NO: 26941 - protein, 502 aa, synthetic construct
MEIQIREGNRRQNQKLKVCAYCRVSTDADEQENSLENQIRHYKEVITSNPDYEYAGVYSDFAISGFKEKRPGLQKMLADARKGKIDLILTKSVSRFARNTSIVLEATRKLKELNVGVFFELQNINTLSGEGELMLTILAAFAQAESESGSVGAKMVYQRKYEAGIPVQYLERSFGFKKDERGVYIADEEEAAWVRKIYEMAADGYTPASIKRYLNENRVKTAGGAEWIDSTVFRLIENEIYKGDYIMHKHFVNEERKLVRNRGEVDAWYIEDDHEAIVSPELWQRAQDALEAKRDYLAEGSVIEEFTEENYPYMNRIYCARCGHPLYKRIYSNGNRLNWGCSGTKRYGKSFCEGINIPDGVLRGAWHFNENMYIGEKQTDKGKKEFTYLKEASWKRRHKKKEPEPIPENTETEYPYREKIFCGSCGSRLVRHVNTKNHKVIWVCNGRKRKGKDFCDGTRVPDIIIKGWGEIKKDIYIQRKDDKNGKKRYSYTSKKPKGADRA

SEQ ID NO: 26942 - protein, 464 aa, synthetic construct
MARSVTVIPARSQKARTGHKAVQEKKIRVAAYCRVSTDQEDQLHSFEAQVEYYTKYINEHENYEMAGIYADEGISGTNTKKREQFKKMIADCEGGKIDLVITKSISRFARNTQDCLAYSRKLKNLGIGIIFEKENINTLDSTGELLFTILSSLAQDESRNISENCKWGIRTKFKNGEMHLNTFKFLGYDKDENGKLVINKEQAKTVRRIYRDFLIGINPAQIAKELTEEKVPGCLGQTKWYPSTVTGILKQEKHMGDALLQKTYTADFLTKRQVRNNGEIAQVYVKDSHKGIIDKQTWNAVQEEFDRREKFMESHGTDRYSYGADCMPFCEKVFCGECKSLFTRHSWSSRGIVQWQCKNHRKDGKVACTNAYVDNADLEKGFVKAFNRLVTDRDEHMERWQQMKSDGTPLEKIRAGQMMEAVENEPLTRFVPEIAQLVLCEVTVLGAKKYEFFFLEGSRVKVSV

SEQ ID NO: 26943 - protein, 461 aa, synthetic construct
MMLLPIYFIQTDFREGAFSMDEKQVEVIKKVDGPVIRDRRKMGKPLTITRKRVAAYVRVSTNGEEQIQSFNSQKQYYQDKIDSNKEWVMVGIYADEGITGTKTTKREQFLKMIDDCMNGLIDIVITKSVSRFSRNLVDTLQYTRMLKVKGVTVIFEKENIDTSKMESEMQLSLLSALAQNEVESLSQNVTMGVQMKMSRGELMGFNGCLGYDYNPEDKSITINEAEAETVRLIYDLYLQGYGAYRIAKELTRLGKVNKKGKVKWTDSGVRGILKNEKYKGDLLMGKTYTVDPISKRRLDNHGESNKYYTKNHHEAIISEEEWDKVQDILKSRYRTNENVSDAERIKFARKYAFSSMCQCGFCGTNLTRRSHNQDTKHKKPVWKCRTATNKGIANCPHSKAVDEVVIENAFLEMFKLLAENFDNILESVLSSVEETLSKDDSTEKLKRIEKEISSLEKKRKN

SEQ ID NO: 26944 - protein, 578 aa, synthetic construct
MGYVTKKAAQRFEEKKAAIYVRVSTQYQVDRASLPVQREELINYAKYALGISDYVIFEDAGYSAKNTDRPDYQQMMARMRTGEFSHLLVWKIDRISRNLLDFSVMYAELKELGVVFVSKNEQFDTSSAMGEAMLKIILIFAELERKTTSERVSAVFVSRANDGIWNGGKVPYGYSYDKESKTFSIAEDEAKIVRLIYSLYESEKSIVRVARIMNERGLKSRAGSDWSPTTVHTILSSPFYSGTYRYNYRDESNAKRFREKGKDEWVLVENHHPAIVSPERQAAVGVILESKHYNKNATYQRKNVHVFAGLLTCGCCGSTMAATTDKVRADGWRPSMYICSRRRKSEDCTNKYVSDVTLGPFVLNFFANLIKASNSFGRTTSIETLEKKLLRGEALSHVDHIERPGLEELYNHLRSGFDEKCFESPTIAATESSADLSERDLLLSEKRRLERALNRLKTIYLYGDDEMASKDFNIERERITKALSEVDSRINELDIANAFDLSLSDEAFMQKASQFILTQQLLDKRYVNYERFIRKIDPKIVKDFLNETVSNFCIKDGLTTSILLKNGIELRFSYKTAE

SEQ ID NO: 26945 - protein, 540 aa, synthetic construct
MRKKANIAPEARAVIYARYSSANQRDCSIEQQVAKCRELAARLGLAVIEVYEDRAISGKTDRRPSFQRMMKDADRGIFDIVLAWKSNRMGRNMLQAMTNEERLRDNGIRTIYAEEDFDDTAAGRFALRNMMNVNQFYVENMAEDISRGLMDNASKCLSNGSLPLGYKPGEDHKVVLDEAEAAVVQEIFTRVACYEPFIDIARDLNRRGIKTKKGAEWGRSSFHTICRNERYRGIYIYRDVRVEGGIPRIISDELFYKVQEVLKVKKNPQGRRKRSGYEEYLLTGKLYCGHCGSPMTGIAGTSKTGAMHYYYTCQKRRTEHSCDKKAVRRDQIEKAVAVAIQQQLLNDETILWMVDQTMAYNAKTEIEYRLQGLHDQLNANKTATANLLKAIEMGIITDTTKARLLELEQEQGCLLAKIDAAKSEMVPIEREDLIAILTRYRKGSLDDKKYLAALFDTFLVRVDLYDDHLKITFDPTGGKTPVDIPIGVEDSPESPGDSPDSADFSAPSQDAEKVRFDSSQLHQNPRTFVRGFFVLVICLG

SEQ ID NO: 26946 - protein, 561 aa, synthetic construct
MFHQSNTAAALQFPYNAMSVEAITALYCRLSRDDELQGDSNSIINQKKILQKYALEHGYTNFRFYIDDGISGTTFNRPGFQEMIADVEAGIVKRVIIKDMSRFGRDYLQVGMYTEIMFPEHDVHFIAVNDGVDSTQGDNEFTPFRNIINEWYAKDTSKKIRAVMKVKGNAGEHLTTNAPYGYMKDPDDSKHWIPDREAADVVYEIGLYVMDGFGPSQIARKLRERKILTPAAYYESKGIPCNVKKQGDPYGWDNTTIAGIMDRWREYLGHTVNFKTTKKSYKSKKKIKNPESEWVIFENTHEPIWTEAIAEAVKQARQSRRRPTKMGEMGMFSGMMYCADCGSILYQCRATGFRKDQEYYICSGYRKGKQVCGTPHSIRTVILEELILQNLREIVSFARSHENRFVQMVMDMDVKERNKGLAKKRKLLSEGEKRITELDMIFKRLYEDNISGKLTDERFHKLSTDYEAEQTGLQTQAAILREEIEEAEGKSANVDRFLSVVRQYTDIPELTPRILHEFVEKIVIHAATDPHSKINRRQEVDIYYKGIGILEMSKVFDSRQK

SEQ ID NO: 26947 - protein, 523 aa, synthetic construct
MRFFSYGRKSVFSDKSDSIDNQFRMNREYCESKFSGQVDSWQQFSDEDFTGANTSRPDLQRMLSFIKGGFCDVLVVYQLDRLSRDVRDFANIYALLEEHGVMFISIKENIDTTTPIGRAMMYVTVVFAQMERETIAARVTDNMLGLAKKGYWTGGNPPVGYVRKHIVVNGKKHCSIEVDPDGARYVTQIFDTFLAYNCSLQGMETRFKNQGIRTQSGKFFSTTQLHKMLTMPYCVEATPEVYDFYAAKGCIMDPGSPREMWDGSVGVIIYGRSTEKNKKHQAQPPEKWTVCLGKHKPFMPAEKWLAVQSRFTQNKCIKDAKWPVPLLKGVLRCKCGNLMQVSRKKKVDGTCSSWYYCRKRMRQGVDACDMGQIKCDLLDEEVLELFRGITADPALIQKFVKAEAPADVTDLKAAQARVSACERKIGRLAASLALAEDSAASKYIIAEMERLDVELGALKREASLAEMESHRAAASAKDAKATAAEIAKLIHGLDGFDDKGKNAIARAVIQECTWDGERLFITL

SEQ ID NO: 26948 - protein, 492 aa, synthetic construct
MAAIDFNNVVDLYIRVSTSEQAEEGYSVAEQEERLRSYCAAFNYIINAIHIDPGFSGASLDRPGIKKVMYDVEHGRCKKVIVWKLDRLSRSQKDTLILLEDVFLANDCNFISLMESFDTSTPFGRCIVGILAAFAQMERENIKIRTMMGRQARIRDGHFHGSRCPLGYKFQYAPDGTLLSNDLVVDPYTSKLVQEVFRLFLSGSSLSSISAHMASTYGCSMYDWSNSTAIRRILSNPIYMGKVRVGNELYPGIHEPLVSETDWYMVAAMLKHNKEQQKRTYAYQISGGAYADNLLTGLLFCGDCGARMYARRVSQNKKKYICHSVAKTSPAMIRSDHCTNRLHPFTVHQLDEMVINEILKLSLDRPGFDMLCDQPDESSKSEDKEIYEERLAEVNRQLDRLVKLYQTGLIDLDNISARLGDLNQEKNFLEGNLATINEVTPAEIRETAWKSIQSLQSVLNNGDMDEVHRIIHTLIDKVVVLNTDVTIYWSFC

SEQ ID NO: 26949 - protein, 520 aa, synthetic construct
MKNVTKINQVDFSIFKKTRVAAYCRVSTDSDEQELSLDTQINHYESYIKANSEWEYAGIYYDDGVSGTKTAKRDGLLRLMEDCEKGLIDLVITKSISRFSRNTTDCLALIRKLLNYEVYVIFEKENINTGSMESELMLAVLASMAESESRSISENEKWGIKKRFQNGTYVISYPSYGYANVDGEMVIIPEQAEVVKEIFAGCLAGKSTHIIAKELNEKGVPTKKGAKWTGGTINGILTNEKYIGDALFQKTITDAEFKRKRNYGEEEQYYCENHHEPIIDKDTFEKAKEAIRQRGLEKGNCSENTAKYQNRYAMSGKIKCGECGKSFKRRYHYTSHGRSYNAWCCGGHIEDSSSCSMKFIRDDDLKRAFLTMMNKLVFGNDLVLKPLLISITTNNFKKNANSVEDIEKEMKSNEEQRKQLNTLLTNGYLERPVFAEAHNKLIMEYEHLEAKRDLLFRMDDAGYNMEQALKELVDFLNDAKPFTEWEESLFERFIEKVKVLSRDKVEFEFKCGLKLKERID

SEQ ID NO: 26950 - protein, 524 aa, synthetic construct
MAGAKNITVIPAKKRVGNTVTAEDKPKLKVAAYCRVSTDSEEQATSYDAQVEHYTEFIRKNPEWEFAGIYADDGISGTNTKKREEFNRMIEDTMAGKIDMIITKSISRFARNTLDCLKYIRQLKEKNVPVFFEKENINTLDAKGEVLLTIMASLAQQESESLSKNVKMGLQFRYQNGEVQINHNWFLGYTKDENGHLIIDEDQAVVVRRIFREYLQGASLKNIADGLMADGIPTATGNMKWRGDGIRKILTNEKYMGDALLQKTYTVDVLTKKRVANNGIVPQYYVENNHEAIIPRQLFMQVQEELQRRAHLRTENGKTKRVYSSKYALSSIIYCGKCGDLFRRVAWKARGASYNKWRCASRIEKGPKKGCDAEAISESEIQKAVMRAINKTLGGREEFLMQLQHNIEDVLNGDSTATLEYIDQRMAELQEKLVMCVNKNAEYDVIAKEIDALREKKAAVVTKDAEQEMLRKRINEMRHFLQTQASRITEYDEQLVRRLIEKITVYDDKLIFEFKSGMTVELKR

SEQ ID NO: 26951 - protein, 499 aa, synthetic construct
MKKAFAYARFSTDMQREESIDAQFRAIKEYCSRNKISLINFFKDEGISGTTDNRPAFQEMIKKAEEVDYIIVHKLDRFSRNKYDSAIYKRALHQKGVRVLSVLENLDNSPESIILESVLEGMSEYYSKNLSREVKKGLYENAYKAKFNGGVPLFGYSIDENKNYIINEYQAIAVRLIFEMFSKGHSYSEIITELNKRGYKTNKGNNFKKTTLHDLLANERYIGTYVFSREDYDMENRKRNSHKFKNRNDMIIVENGNPAIIDKKTWDLVKERQSLNKKISNKAKWTYVLSPFLYCNQCGKKMSGFTRKNKIGKYYQHYRCINTSCEQKSVRTDILESEFYDAFNKLIFNDSNKKLLVEKINNFIKMKNSNNDNSKIENELKDIEQQLNNAVTFILNGSSSQTIKNKIEELEQKKYNLQNELIQKSQKHNNINSKEIINFLNRYDKLEKFSIPEQQTILKFFIDQLRYEKGKLIIKLKLAEKPPPTLKNNENGTELPAPF

SEQ ID NO: 26952 - protein, 591 aa, synthetic construct
MKKVQKIDVKKPLIEIRKKVAAYARVSMETDRLKHSLSAQISYYSKLIQNNPEWEFKGVYSDYGISGTSTSKRPGFMEMMEECEKGNIDIILTKSIKRFARNTVDLLEVVRHLKSKGIEVRFENENINSLSGDGELMLSILASFAQEESRSISENVKWGTVKRFKQGIPNGRFNVFGYVWEGDKLVIVEEEAEIVRRIYSEYLSGKSRMQIEKMFAKEGITTRRGYRWVDSNIKVILRNITYTGNLLFQKEYVVDPITKKRKLNRGELPQYYVENTHEAIIPKETYDKVQVEMERRRLAGAIGNPAIPTTEMTGKIRCPHCGKNFQSSVRNLVNGKNKYWVCATRKTGHGNPCHTGDINDRLIKEIICEVLEIEEYAPEIFTKEIDHIDVIKKEKFIFYLTNGRIVEKPYRNIDRKKYFTEEVRAKISEQRKNKHKYHRKNSATPFTGLIECDRCGNSFNALKTTLKTGEKITYLSCRTKRSECPHNSIQEGTLKKLLCEVLELDEFDEKVMDEKIQRIYIADNKVRFKFKDGHEEVKGYLEKKRGTPWTKERHEKQILQIREYWKDENHRKEASKRMKKIRSEKEWPTRK

SEQ ID NO: 26953 - protein, 525 aa, synthetic construct
MANKKVTTIPATISKFNLAPINEVKKRRVAGYARVSTDSEEQQTSYEAQVDYYTNYIKSREDWEFVQVYTDEGISATNTKKRDGFKRMVKDALDGNIDLIVTKSVSRFARNTVDSLSTIRKLKEHGTEVFFEKENIWTFDSKGELLITIMSSLAQEESRSISENCTWGQRKRFADGKVTVPFERFLGYDRGEDGNLVVNTEQAKVVKKIYRLFLQGYSSFGIAKELTGEGILTPGGKKKWSARTVAAILSNEKYKGDALLQKSFTVDFLTKEKKKNEGEIPQYYVTGNHEAIIPPSTFDRVQRLLEQRKAGKNRISSVSIYSSKIKCGDCGSWYGSKTWHSTSKYRQKIWQCNHKFEEKCTTPHLTEEEIQKLFLEAVNKLVKNKKEIISTHKEMVKIIFDTSVLEKDKIELEEELNIVAEQVNDCINENARKVQNQDEYEVRYTSLVHRFNATKARLDEIKQTIIEKQSKRDEVEDFIQELEKQELMTEFDKNVWLSMVDYLTVHHVGKVEFTFFDGSQVELNR

SEQ ID NO: 26954 - protein, 544 aa, synthetic construct
MAQKKAAPLIPAVIYARYSSSGQREESIEGQLRECHDFARRNGLTVVGEYVDKALTGRSDKRPDFQRMLRDCERGVFQAVICWKMDRFARNRYDSAMYKYKLKKHGVRIFYAKESIPEGPEGIILESVMEGYAEYYSENLSQNVKRGYYDSALELKTLGQTVLGLRKGADGRFELDPATAPIVRRIFEEYAAGDSAKEIYHRLNDEGYRTSRGGLFNKNSLRRILQNEKYVGVYEFKDIRVENAIPAIVNRELFDKVQAMVEKHHRAPAAQRETSFLLTAKLFCGHCGEPMTGDGGTSRTGRVYYYYTCNGRRAHKCKKERAPKAWIEQLVVDELVALIHSDEFVNEVADKCMEYQQREKDDSALRALEARQKENEKAIQNMLAAIEAGIITPSTKSRLMELEAERGQIEKGIAQQLIAEPTLERDQVVYFLERFRDGDVSDEGYRAFLVDTFLNSVYLYDDDKLVLVLNYTGERCKVTLDLVESAVEGDGLSGSCFAPSSAPQAMPKAFVFKGFRFFIFVKNEKNEKAAVFHWLFPSANGIYD

SEQ ID NO: 26955 - protein, 517 aa, synthetic construct
MYLVAYARYSSDNQREESITAQLRAIHNWADANGHIIVKEYIDEALSARTDKRPNFLKMIEDSKTEDWNGVVVHKLDRFSRNRYNSAVYKKTLKDNNKKLFSVLEKLDDSPESIIMEAMLEGLSEYYSANLAREVKKGLNENALDCKHNGGTPPLGYSVLNSHYVINEQEAVIIKLIFDMYRTNHSYVEICLELNLRGYKTKRNKNFSKNSIHDILVNEKYIGNYTFGYGNRAKKRGQPNPDMIKIEGGMPAIIDKNVFFEVQEKMKGRKHMGGTYKAKQVYILSGILKCGICGEKYVGAKKNKFWSVYECSGHKKGVCDNKAIKKEEIEKIVVDELKTKLKKLFNNTELLEKVNSTYKDLYDNAENNLKVEEEKLINVKAQINNINKAVMDGLYSPEMKDQMNSLQTKKELIEHSIYLIKNISEKNEITSNDLNKIINTDLLKLESDNLEDIKEIVQKYVKEVLITPENINIKIVLDDTNINTKHKGDTDVCDSPPPKFEKRTAIILNLAVLFFFI

SEQ ID NO: 26956 - protein, 565 aa, synthetic construct
MDENKKIVALYVRVSTGYQVDKDSLPFQKKELRAYCEHMLHINKKQVEVFEDAGRSGKNTKRPAFERMMEKVKSGQVSHVIVYKIDRITRNLVDFSLMYDDFKYNNVTFISLNEQFDTSSAIGEAILKIILVFAELERKLTSERVKDVMIGRAQNKQWNGARVPYGWDWDAEKKCPVHSKKEAPYAKAMYQMYLDGGSSVTICDYNNSHNIPTKRGGEWTSKTVADFLRNPINKGDYRYNYRESARGKKKSDDEVIYIKGVFPPLIDPNIWDEVNRRMDANSQNRNTSVFHPIRKRCNVFAGLMICGKCGSGYQVKGKDSRKGDGFRPSSYACTGKYQKKNCDNLNVSDVKIGPFMLNYIAAMVDASKSRRFIKDSESLERVILSHISFSDVAGISVSSLQDTLDLLFGRSGSELLSGKPISSGATDESKTTELKEKLQRTDRALERLKKAYLFDDDGMDEKEFLEMKSKLEVDRIKLENSIKGLESSSISENVDQAAFLKSASQFLISHKINSGDYIDYSRLAALDEESMKAFVNSIVDHIVVLDKRITEIVFKNGLTHTLLYR

SEQ ID NO: 26957 - protein, 517 aa, synthetic construct
MSYCIYLRKSRKDLEAEQAGQGETLARHERTLLSLARQRNLIIGNIYREIVSGESITARPVMQKLLKEVESGIWDGVLVMEIERLARGDTIDQGTVQRAFQYSNTYIITPQKTYDPSNEFDEEYFEFGLFMSRREYKTIKRRMQAGRYAAAKEGKWPFNAAPYGYKRVKLQNEKGWTLAFDDSEASVCRMIFSMFTGSGRKGITIIRRYLNQHGIKPRKGNLWTDSSIRGILSNPAYDGKVAIGRRKVVPAIEDGLPVKTRPRADDYAIYEGRHPSLISHAVFSEAQSYLGHGTPKLPESYGVKNPLAGMIICKECGKRMQRRPATSPDIKNGAKYDMLICKSEDCPTVGSPLALVERELIRALQDWVKGYELTAELPESRIPELEALLSTARQEHETLEKQKTRLYDLLEQGIYDSETFLERSRRLQDRLQESQAGIVRLETDLAAEEKIQANLTSFLPSCRDLLGCYWDLDAQDRNKALKLLIESVEYRKTSRNKRGEAGKASFELTIKPRIPRI

SEQ ID NO: 26958 - protein, 524 aa, synthetic construct
MNKLRAAAYCRVSTDRAEQSGSLASQRSFFDDYIRNSDSMTLVGVFYDEGTSGTTTLNRYGFNKMISLAVSGGIDIILTKEVSRFARNTVDTLNITRMLRAKGVGIIFINDNIDTRDSDGELRLSIMATIAQEESRKISERVKWGQQRKMEQGVVFGRSCLGYDVKDGKITVNADSAEIVKRIFTEYTVLLKGAESIADRLNAEQIRTVNGGRWSGAFIRKVLRNVKYVGDLEQKKTCTPDFLTHKKRLNSSEHIYIRNHHEPIISRELWEQTQAEISRRKPTDTSRHSDRYVFSGKVYCGVCGSVMVSRVKTLKNGKIYHALRCSGRIGGKSCNNETLNVTALKACVKRIFTDMPIDKTAVINAVIKGLSRTDKPDIPALRRKIETLNAKKRRAVDLMLDGLITQQELIEQKSYYDSIIEKLSQEISSDRSVFETDTIRKNAERFLDFTSDPIWLLVIRADYIHGTLTVYLKGVEKGFTTCFTATGRGDSYRVITANTVRSQGIIPGMMQVQKNWFRHDVNDK

SEQ ID NO: 26959 - protein, 536 aa, synthetic construct
MQTGKITALYVRFSYDDGIDAESGSIEHQKSLLRSYAESNGFTNLSYYADDGYTGTNFNRPDFQRMLGDIHKGLVSTVIVKDMSRLGRNYLMVGQYVEIEFPKHNVRFIAISDNVDSAKGMNDLLPIHNLMNEWYSRDISKKVRAMIRQKGNSGQSIASKLPYGYYNTPEDKQTWLIDESAANVVRRIFDLYLNQSFGMYQIARILKAEGIPRPTYHRRMAKGIKVEADDLCVWSASVVRDILQHREYIGDTVNFRTEITSYKNKKVIHNSDDKLKIFPNTHPAIIDKETFQKVQNKISKVIRHTRNVHSYLFADYLYCMDCHSRMHGRQCYLKGGRTLSAYECSTYRKSKGCCFHGVPEMYLQAEVLAKIQNVLAFAKSNSAEFRQNISKALEEQSDGSKAVIQEELDKAQARTAEIDKYIQGLFEAKVRGEIDGSLFASLKKTYDEEKEQLNKLIIDLITKLSRENEADEKIQLLYAAIRKYDAVWELTPEVLTDFIEKIEVGQVSAENKKISFELRDNQISVFFWGVGIIDFM

SEQ ID NO: 26960 - protein, 425 aa, synthetic construct
MRIRIINAVPTAEKKKRVCAYARVSTDSRRQEESLENQTATYERLIRPNPEYEFAGVYADQGISGYCENRPQFQKMLERVRAGEIDLIITKSISRFARNTVTVLKVARELKELGVGIFFEEQKINTLSGDGEMMLAVLASFAQEESRSMSENNKWSIKKKFERGEVMITTSRFCGYDKNEYGDLVVNGKEAEIVRLSFDLYLMAIGSSRIASLLDYLGVPTVTGGTWEGGTIGGMIANEKYKGDFLLQKYYTPPDKRNFTRKNRGEVQSYYISENHEPIVTPEVWQQAQEMRDYRKKIRNIGQDGTRKFQNRYPLSGMLICPHCGRTLRRRQVYKKKIQWLCSTYIEQGKQACKGIRIDDAELAGLHITEQTVVEEVLKGGKKHYRYTSKAEFDFTGEFQPERPENTDGSVLPGVNRPRRTVIKL

SEQ ID NO: 26961 - protein, 444 aa, synthetic construct
MAAYCRVSTDQEEQLLSYENQVNYYTKFIKDNPLYTFAGVYADEGISATNTKKREEFNRMIADCRDGKIDMIITKSISRFARNTLDCLNYVRELKELGIGILFEKENINTLDAKGEVLLTILSSLAQDESRSISENSTWGIRRRFETGKHKMSTKRFLGYDTDEKGKLIVNSRQAKIVVRLFQEFLDGKTTDYIKRIFEREGVVNWDGSTKWHATTMNSMLQNEKYKGDALLQKSYTVDFLTKKRVKNAGEVQMYYVEDDHEAIIDPRIWECVQLEFKRREKYLQEHGTHSYSRNPETNPFASRIVCGTCNKVFSRKGWRSSAGYDRKVWQCSERYRVKGVQGCDNRHVEEETLVKAYLMAWNALVENRESFLEQWKQQMQGEDLLAGYRAEKFVEYTKDAEPLKEMDTDFMLKTLDHIKVFEDGTLLVIFLDGSEIECRSEEA

SEQ ID NO: 26962 - protein, 428 aa, synthetic construct
MIQKVAFPQKKPFLLKRTAAYARVSSGKDAMLHSLSAQVSYYNQLIQSNPEWLFCGVYADEALTGTKENRAEFQKLLNRCRQGEIDLILTKSISRFARNTVTLLETVRELKTLGVDVYFEEQRIHSMSSDGELMLSILASYAQEESYSASENKKWQMRKDFEQGKVGSMRMLGYQRTKSGKLEIVPEEAEIVRMIFLYYLSGMGKLAIAKKLNEQQICTVRGCAWTTEDVRRTLRNEKYTGNLLLQKSFRENHITKKKVDNIGQLPQYFVAGSHEAIISQEQFDAVQKQMAERQKKYAGSCTTNRYPFTQKIRCACCGKYYRRKTTVTGVVWICSTYNTKGKKYCPTAKQIPENTLLSACCDVLEISEFDAEQFAEQIEQIQIPAPNELQFCFSDGTEQTVSWKDRSRSESWTTEMREKARQKKWRQS

SEQ ID NO: 26963 - protein, 526 aa, synthetic construct
MATVLKIPAKFHPITHLPETKVQKRRVAAYARVSTDSEEQQTSYAAQVDRYTKYIQERADWEFVAVYTDEGISALNTKHRDGFNRMVADALDGKIDLIVTKSVSRFARNTVDSLTTVRKLKEKGVEVFFEKENIYTLDSKGELLITIMSSLAQEESRSISENVTWGQRKRMADGKVSLPYKHFLGYRKGADGLPEIVPEEAEIVRNIYRWFMEGKTPTGIARTLTEQGIPTPAGKEQWCSSTVKSILTNEKYKGSALLQKRFTVDFLTKKSKVNEGEVPQYYIEESHPAIIVPEEFELVQAELLRRQNLRRQYNGKSIFAARLVCGDCGNFFGAKVWHSNSKYRQVIWQCNHKFQGVCKCRTPHLQESVIQQRFQAAVQELLQKRKAILENCQVMLELLTDCTDLEYQLQELETQKMRISEQVQGYVRENSEIVQDQEKYEERYQALVGQYEPLQKQETTLQEQRAERLARREQIQGFQRALNGQNGMLPEFDTQLWLAAVEKAVVYRDGKIVFVLKDGTELVQKI

SEQ ID NO: 26964 - protein, 479 aa, synthetic construct
MRGVIYARYSPGPHQTEQSIEGQVADCQQYAEEHGIDIIEIYADRHVSGKSVVGRDEFQRMLRDAEKGRFDCVLVWKIDRFGRDRQDIAMGKMALKRAGVKLMYARESVPEGPEGIILESVLEGLAEYYSADLRQKVIRGMKETAKKGQYCGQPLPIGYKVDSQRHVVIDEREAAAVREAFKMHIAGAQLRDIVQLFADRGIMGRRGKPVSNAVVYRMLRNEKYLGEFYIQDVKLNVEPIIDQATFLEAARHFKTSRNNAAGRAKVNYLLSCKMFCGYCGSMISAEAGTGKLGKVYRYYKCGDKKRGKKCELKPFPKDHLEDAIILATVNDMLTDEMIEKLTVRILEVQEQENADDPVVGLRRRLDSNKKRQRNLLDAIEEGGARGLVSRLAALEEEEEQLVLEIQRAEIKRPRLTHEVVEAWLRSFRVGDVTDDDFRARLVDTFIARVELRNDEALIFYNIREKGPHSRVRVRPEWWS

SEQ ID NO: 26965 - protein, 503 aa, synthetic construct
MIAALYARYSSDSQRAESIVAQIRAGREYCRRKGYHIIKEYADEAYTGTNDNRPAYREMLRDAAAGLFEVVIFHKVDRNGRNEFDYYKNKQELARHNVRVEYSGQAFDSTSPEGALMENQLVGLAAYYSRNLSREVKKGLKENVLAGKITGGRPLFGYSVDKNKKYVINEEEAVAVRYIFERYAAGASYIDILKEVNARGYRTRRGAEFGKATLHDMLNNRRYIGTCILGKNQPYLDGRRNSHRPDHDGMIIVPNGCPAIISPDLFQAVHERMQENRRRGGRRTAKYPYLLSGLVYCGECGASMSGTRTRTRKKEIREYYRCCQKSNHGDAKCPNRYIYAPALENFIVERLAAVIDNESLLFRLAQKVQEKYDALVGNARVQIAALQGQETKASKSLERLYEVIADGDTFDDFDRAQMKHLKQKILDIRAQREKLEQQPGKTISSAEIVRYIRDRFLPAIRQRTASGLTELLQYFVHTVTVFRDKIRVEYWFAACRYSSERTT

SEQ ID NO: 26966 - protein, 523 aa, synthetic construct
MRFFSYGRKSVFSDKSDSIDNQFRMNREYCESKFSGQVDSWQQFSDEDFTGANTSRPDLQRMLSFTKGGFCDVLVVYQLDRLSRDVRDFANIYALLEEHGVMFISIKENIDTTTPIGRAMMYVTVVFAQMERETIAARVTDNMLGLAKKGYWTGGNPPVGYVRKHIVVNGKKHCSIEVDPDGARYVTQIFDTFLAYNCSLQGMETRFKNQGIRTQSGKFFSTTQLHKMLTMPYCVEATPEVYDFYAAKGCIMDPGSPREMWDGSVGVIIYGRSTEKNKKHQAQPPEKWTVCLGKHKPFMPAEKWLAVQSRFTQNKCIKDAKWPVPLLKGVLRCKCGNLMQVSRKKKVDGTCSSWYYCRKRMRQGVDACDMGQIKCDLLDEKVLELFRGITADPALIQKFVKAEAPADVPDLKAAQARVSACERKIGRLAASLALAEDSAASKYIIAEMERLDVELGALKREASLAEMESHRAAASAKDAKATAAEIAKLIHGLDGFDDKEKNAIARAVIQECTWDGERLFIKL

SEQ ID NO: 26967 - protein, 515 aa, synthetic construct
MPKTEEKQAAKAVIYARYSSDRQREESIEGQLRVCEDYARRNNITILHTYADRAMTGRSDQRPEFQMMIRDAATMAFDIVLVYKLNRFARNRYDSAKYKHKLKKYGVKVVSAMENIADDPSGILLESVIEGMAEYYSAELSENVLRGMTQNALEGKWPGGVIPLGYKLDKGGRLIINEEKAPIVRMIYQMFLDGMSVARIERELNNKKYTTDAGKVFSRSRVYYILHNERYIGTFQWKDIKKEGIIPPIISKEAFHAVQERINALKSSSYRTNNNYLLAGKAFCASCGAKVSGTSGKSQNGNKYCYYGCSHHHRSARYKYCETKNIRADVLEKLVCDKTHEILSSKKAIKEIARQAVKLRPRDGSELEIRAIKNHISSCQKKIDNCIKAIENGVMSNALVESLNENERTLDVLKEKLAKASLMQGSGLLTEEKIQFFFETIREKAKETEKYNDILLTSLVRAVYICNEYVEIQYNYAEQLPILTNPVRIESCSYKCTNGGTIWIRTKDLFDVNEA

SEQ ID NO: 26968 - protein, 600 aa, synthetic construct
MKDVEIIKARNVLSSRTRANLAKRLRVAAYCRVSTDSEDQLNSYKSQVQHYTDLIKSKPEWDLAGIYADEAITGTQVTKREDFQRLINDCMNGDVDMIITKSISRFARNTLDTLKYVRMLKEKGIAVFFEEENINTLTMDGELLLVILSSVAQQEVENISANVKKGLKMKMQRGELVGFQGCLGYDYHPEDKSITINEEEAEIVRYIFRRYIEGAGGSVISQELEHLGYKTKRGSTRWAETTVIGIIKNEKYKGDILMGKTFTLDPISKRRLDNFGEEDQFYIRDHHEAIISEEMFEKAQEILKRRAKPRRLGTDGKREKFSRKYAFSCMLECGFCGSTLTRRSWHSGSQYNKVIWQCVTATKKGKKFCPDSKGIAEETIEQAFIESYRLLCQNNKDVLDEFIARTEETLSDGNAGKQLAKVEKDIAALDAKRAKLVDMRLEEIIDKDTYEQKYFDLSSQIEQLQKQREDLQESAETESTMKKRIAEFRKTLEENEVLDTFDRYVFESIVEKVIVGGYDEDGNKDPSMLTFIYKTGFKNSLDGTNFKPPRKNSKTAKQNAGLCSHTTDEAKSMYSYHSNNTRGDGSIDVKSRRKIAAKAQ

SEQ ID NO: 26969 - protein, 534 aa, synthetic construct
MNHVAFATHHNKIKTAPAPTETVYISEDMRLKSTNIVSSSGQSRKRNICFALAVIFVPILNIFYKRRVMQMPEKILRCAIYIRVSTFEQSVHGKSLQAQKECLEQYATDNNMSIVGVYADEGKTARKELKKRKAIHALVEDVKRDKIDVIIFWRLDRWFRNLSDFYKVQDVLDEHGVRWISVSEPGINMETRDGRLQLNVVLSIGQNEVDTTSERIKFVNESSIRQKKLIFGDANMPLGYKTGIVDGKKCMVKDPETEHMVEDFFRYFKNHNTKKGAIRYMQETYGIDFSYSMLRTMLSSEFYKGTYRGYPYCPAYLSEKEWNEMQIISKRNIKNTPSGRIYLFTGLMRCPVCGQKLVGTGCSSIIDRKTREKRTYCYYRCNRALIDHICTYRHRVSQNLVEKYLLENLEREYEKYKVRSNQIGEELKKQKKAKDPEKLRKEMERLNLLFQKGRISFDYYDKEYQRLEREYSASAAFCEEEETRNLHYVEELLKTDFRQMYDSLSPENRRSFWRSTIQEIYLNDDNTIKAVDFL

SEQ ID NO: 26970 - protein, 581 aa, synthetic construct
MARKRTNLIGNTPSVRETKVAIYIRVSTIHQVDKDSIPMQKKDLIAYCQLILGTDNYEIFEDAGYSGKNTDRPAFQNMMGRIRKGEFTHVLVWKIDRVSRNLLDFAEMYEELRSLRVTFVSKNEQFDTSTAIGEAMLKIILVFAELERNMTSERVTATMISRANSGQWNGGRIPFGYSYDPKEKVFSIREDEASICRELKDLYLLNRSLAYVSRALNEKGYKTRAGVSWSPHSVWIIASSPFYAGIYRYNRYNGVESRTINPEEEWVMIQNHHPAIFTLEEHQAMRSIMKSNKRNMDNLPGRVHLSTKTHIFQGIMYCDKCGSKMVSTPGRLHVDGYRTSNYGCPLRRNTKKCNNPTVNDIVIGEFVINYILNMLNAKKTFSTINTPDELNAALLSGSVFSEVSSVEENGLNSFFNLLSRYGSDRSYIFSVKSPRKKKAAVDPELSKLRKEKEKQERALQRLQDLYLYSETSMSEKDFIIRKSEISSHLDNINRQLGLMTQDQASFLSDEEFIKQASHLLIQKELKNKKYIYFKKLVSTVDPDILKAYMETILDSIYTADGKITAITFKNGLTHRFIYKDK

SEQ ID NO: 26971 - protein, 520 aa, synthetic construct
MQYEEYLIYLRKSRSDASLEAMGVDVLERHEQILLDLAKRMNLSIGGIYREVVSGESISARPEMQKLLSEVESGRWEGVLVMEVERLARGDTVDQGIVQRAFQYSGTKIITPTKTYNPNNEFDEEYFEFGLFMSRREYKTIRRRMRAGVTAAVKEGKWPFNQAPYGWQRVKLERGRGWVLAPDPDEAPVVKLIFRLYTGPDRIGITHICRYLDNRGIKPRNGDTWLECSVMGILRNIVNDQRVGIGRRKVIKQVQNGSVSKVRPHSDYDFTAPGLQPRLIDHDVFLEAQEYLARNSHKLPESYGIKNPLAGILVCSCCGKKMQRRPASRDGSSGRCPYDVLMCNTRGCPTIGSTLELVERELIQALSDWVVGYQLDPTLEVENKVPEKEQLLSSAVSNHDLLLKQNGNLYDLLEQGVYTTEIFLERSHELQKRIKESEEHIEILKKDLEYEKEKIANIENFIPSCKELLSCYWDLSVQDRNKALKMLLESAEYTKTKRNRKGDKDNPTFTLNLKPRIPRI

SEQ ID NO: 26972 - protein, 526 aa, synthetic construct
MQYCLYLRKSRADSEAEARGEGETLSRHEKALLDLAKKLNLNITAIYREIVSGETIAARPVMQQLLQEVEQGIWDGVLVMEVERLARGDTIDQGIVAQTFKFSDTKIITPIKTYNPNNEFDEEYFEFGLFMSRREYKTINRRLQRGRMASVKDGKYVANKAPYGYNRIRIENDKGWTLEINKEEADVVRLIFELYTVGEKQSDNTFNRLGTGFIAKRLNAMKVPPKRGKVWVVASIRDILINPVYIGMIRWNWRPQQKKMIDGQLHISRPRATDYVLCNGLHPPIISKETFDMAQELMRHNPARPIGEKNTVKNSLSGIVICGNCGRHMVRRPHTKYPDMLICSEPTCNNVGAQLRVVEERILQSLKEWLGEYKISWDITSPPVERISQVSINKKALQKEQHELDTLNKQISKTHDLLEQGIYTTDVFLERSRALSLRINEVKEHIAILDKELKTEITREDSAVNIIPKVEKLLEVYHDLPSPKAKNDMLKDVLEKVVYTKKERSKKGNLDNFNITIYPKIPKYIT

SEQ ID NO: 26973 - protein, 521 aa, synthetic construct
MPKITKIPASISRYTSAPIDAPVKRKVAAYARVSTDSEEQLTSYAAQISYYTEYIKGREDWEFVGVYTDEGISGCSTKRREGFQRMISDAMAGKIDLIITKSVSRFARNTVDSLTTIRLLKENNVECYFEKENIWTFDGKGELLLTIMSSISQEEARSISENVTWGHRKRFADGKVSVAYSRFLGYDKGPDGKMVVNPEQAEIVKLIYRLFLEGMTPHTIAIHLTEKGIKTPGGKDKWNATTIRRILTNEKYKGDALLQKEFTVDFLTKKTKKNCGEIPMYYIEDDHEAIIDPAVFDMVQQEMERRKTGTSRYSGVSIFSSKIKCGECGGWYGAKVWHSTDQYRKVIYRCNNKYNDESCTTPHIMEEEVKAVFLKSLNKLLANRDELIENVKLICDKLTDTSELEAEKEKYAEEMSLVADMVQAAMLENARIALDQEEYRQKNDVLSARFEAAKKKHDELAMRIEEIETRGQNLRHFQETLESLNGQVTEFDSDLWGSLVDYITVYENGEKTVTFRDGSVI

SEQ ID NO: 26974 - protein, 520 aa, synthetic construct
MKRVYCLYRVSTKGQVDKDDIPMQKTSCREFAERNGWTILKEFQEKGVSGFKVSASDRDAIQDLKAAAEKKEFDVLLVFMFDRIGRIDDETPFVVEWFIKHGIEVWSVNEGEQRMDNHVDKLMNYIRFWQANGESQKTSARVKTRLNQMTLDGKFTGGVAPFGYKLIKSGEINKKGKELMDIVIDDDEAPIVKKIFEMTVKEGYGSYRMADYLNSHGIKTHNNSKFQCNTVNRILKNRLYCGYLVSGGVESPYIERLHIIDENIFDQAQFILKQRSSKNEEKQQIARTTKGSTLLSGNIYCAHCGQKMVSTSYIDRYDRADGSQYRVRRQRYICTNKAMKRGACDGQSAYVAHRIDGAVLATLRDYLAKIKSTPKDIALEKRYNSEISEYRRKQTKLEKEIEKLKRQVVEFSAEIGRSLLGESRFTPDILSASIDNTNDLLHKKEFELSDIKYKLANQQNAMGKLDFYYSQFRTWADEFDNSTMEQKKMIACQLIREVKVSRGYELEIIFDLNYEQFLSL

SEQ ID NO: 26975 - protein, 466 aa, synthetic construct
MNRAALYIRVSTLEQAQEGYSVGEQKERLIAYCKAKDWIIADIYVDGGYTGSNLNRPGIQKLISETDKFDLVLVYKLDRLSRSQRDTLYLIEEVFRPKGVDFISMQESFDTSTPFGKAMIGLLAVFAQLEREQIKERTWMGRVARAKTGLHHGGGHIPIGYEYEDGHLVINPYEAEQVRKIYEWYLAGDSLKTITDKLQEAGYTNKYSSYNSWSSVRNILGNETYTGRLHFGDVTVDNAHEPIITKEQFDTAQVLRGKRQEQYGGQAFQSKHLLAGLIYCGHCGGRYYLRNTGKYSYYACYSRTKQMKSMVKDPNCKNKIWKGSELEPIIDAKVRELLSSPEMAAEIAASHSKPVPVSKNADIEKRLREIDKQIGRLMELYQHDDIPPELLGERINKLYNERTALESTLTPVVENEVMPFDLVEALIADAAQVWDFADESQKRRILQSLVSRIVLTDDDVKIEWAF

SEQ ID NO: 26976 - protein, 497 aa, synthetic construct
MNAIYARQSVDRADSISIESQIEFCQYEMRGEQYKVYTDRGYSGKNTDRPAFAEMMNDIESGVIRKVVVYKLDRISRSILDFSNMMEQFGTHKVEFVSTTEKFDTSSPMGRAMLNICIVFAQLERETIQKRVADAYYSRSQKSFYMGGRVPYGFRLIPTTIDGVKTSMYEINTEEAEQVRLIYELYSKPECSYGDIIRYFQSHGILKNGKPWGRTRLADVLRNPIYVRSDLSIYEFYRDQGAIIANDPGDFIGTNGCYYYKGKDSTGRKQMNLEGNHLVLAPHEGIIPADLWLKCRAKCLEAQQIKPYQKAKNTWLAGKIKCGVCGYALVDKHYSTTRSRYLLCSNKMNAKACAGPGTIYTDEFEQIIYDEMRKKLAQFRKLRQCKGNRINPELTALSVQLTQVESEIAALMERLSVADDTMFRYISGRIKELDGKKQELMKRISELKLHKEADYTEISNHLTMWDELSFDDKRQTVDQLIRVIYATSDSIKIEWRI

SEQ ID NO: 26977 - protein, 525 aa, synthetic construct
MAKRVTTIPATLNRFDSRPLQSVRKRRVAGYARVSTDSEEQAISYEAQVDYYTRYIKSNPDWEFVGIYTDDGITATNTSHRDGFKQMVEDALAGKIDLIITKSISRFARNTVDSLVTVRELKEKGIEIYFEKENIWTLDAKGELLITIMSSLAQEESRSISENTTWGKRKSFADGKASVSFSRFLGYDRGSNGEFIINEEQAVTVRYIYKRFLEGLSTYQIAKELTQMGVKTAAGKDKWYTSSVLSILKNEKYKGDALLQKSFTKDFLTHKRVDNKGEVPQYYVEGHHEGIVTADQFEQVQAELYRRQNMDRYSGVGCFSSIIKCGECGSWYGAKVWHSNDKYRRVIYRCNKKYGKGCKCKTPHITEDEIKEMFIKAANELFSEKDEIIENTKTMMDMVCNTGDLDKELGDKVAELNIIAEQMQTAIAENSRTALDQNEYERRYADLTERYNTIKADYDKISEQIESKKAQRELFKGFIRALEKQGALVEEFDEGLWSSLVQEVVVNTKDDIRFIFKNGFEIKTR

SEQ ID NO: 26978 - protein, 503 aa, synthetic construct
MANIRRIEPVLPRLKARKRVAAYARVSMETEQLHHSLSAQISHYSALIQSNPEWEYAGVYADEGITGTATKHRDEFKRLMAECDAGKIDLVLVKSVSRFARDTVDTLKATRHLKDLGIDVYFERENIHSISKEGELLLTLLAAFAQAESRSISENIKWSIRKKFKLGIPNGIKAPYGYEWNGDSFSVIPEQGEVVREIYDRYLAGEPAYSIAKGLAEKGVKGQSGVPMDDSTIKNILSSLSYTGTMLLQKNFFTEGHKRRKNKGELPMYAVEEMFEPLVSEADFDKAQQIMKDRAEAMPNRNPKLTAFSGIVRCANCGCSVSRRTSKYGKKWICNTKERKGKAVCDFRDIYESELEDAATKALSLDGFNADEVKSRIAFITIDNAYITFRMKNGTSRQVLRKYKKGYSGFSTRLFCGCCGGMLEADTWNMGPAGKKTKYKVWVCRNCSAPREFDSTFRKATQELFHEEQCDGLFAQNIEKAINYDEKIEFYYKKGEVVTWQKE

SEQ ID NO: 26979 - protein, 503 aa, synthetic construct
MENTTKTAVIYARYSSDSQSEQSIEGQLRVCNEYAKNNNILVLKTYIDRAMTGTNDNRPDFRQMIEDSKKHQWQIVLVYKFDRFSRNKYETTKHKKTLKDNGVKVVSATEYIPDSPEAIILESMIEGYAEYYSAELSQKVKRGMNETRQKGNFTGGYLIYGYKVENHKIVIDEEKAEVVRFIYEQYARGVYVKDIIKTLTEKGIFNRGKKFAKNTVYNILKNEKYSGVYHHNGETFTNMYPQIVPTDLYEVVRKKTEQNKYGSRSVEVVYLLRNKIKCGYCGSPISAECGTAKNGEKKRYYKCLGRKHQNGCTKSQVRKEILEKYVLDNVVEQMSKPEILGKAVDYLLQVQENRIKQNSVVANLVKEKRQTENAINNIMDAIEQGGQSATVMKRMRELETKLTDIEKRLTIEKSQTAFRLTKEQITEYYKSALVKEPLLLINHFVKEIQLYDDKMIIIYNTPNPINLDESQGFSFYDKNVRMPYVIQNKKYYGLKDFRLIMRL

SEQ ID NO: 26980 - protein, 434 aa, synthetic construct
MERVIKQVEFPVPAQPKAARVAAYARVSTGKDAMLHSLSAQVSQYSKMIQSHPGWLYCGVYADEAFTGTKANREGFQKLLAECRAGHIDLVITKSISRFARNTVTLLETVRELRMIGVDVYFEEQNIHTLSADGELIITILASYAQAESYSNSENMKWKIRQAFERGEIFGLRTIYGYTVSKGNIEINPEEAEYVREIFRRATNGESMNSIAKDFNKRQIPSPFGGKWYVQRIHDILANEKYTGNALLQKKYRNNYLEKKLIKNNGELPQYYAEDTHPAIIDGETFGKAQEILRQNLAARSNRPKPIKRPFTGKIVCGHCGKNYNRLTVGGKVYWHCSTLKNNGKGSCTAKRVPENLLQSLAAEALGLSEFDAHTFERKITVIRAEDNHTLVFCFKDGKEIVKPWKIPSRAESWTPAMRAEAARRRRERTGIKR

SEQ ID NO: 26981 - protein, 527 aa, synthetic construct
MTQTARRVTVIPTTVNPITKQVGGEVRKRRVAAYARVSTDSDEQFTSYEAQIDYFTQYIQRHAEWEFVKVYTDEGISGTNTKHREGFNEMIRDALDGKIDLIVTKSVSRFARNTVDGLVTVRKLKEKGVEVYFEKENIYTLDSKGELLITIMSSLAQEESRSISENVTWGQRKRFSDGKVSLPYKQFLGYRRGTDGLPEIVPEEAEIVREIYRLFISGKTTCTIATHLTKSGIPTPAGKKKWQASTVESILTNEKYKGDALLQKSYTVDFLTKKKKLNDGAVPQYYVENSHPAIIAPEEWNLVQNEMARRKALGRSYSGNSVFATRLVCADCGSFFGAKVWHSTDKYRRVIWQCNHKFNGKKCETPTLAEETIKERFLTAVNSLVVSRDALLEDCRLIQKTLTDCTEIDARLETLMQEIEVVIELTKRCIEENAQNAQDQDAYAERYNGLVERYERTKAEVDDLQRRKAERQAKAENIGAFMFELVERQDAITEFDDRLWLATVDKVTVYSDGRLVFLFQNGTEVTA

SEQ ID NO: 26982 - protein, 526 aa, synthetic construct
MPKVTMIPATINPLTHLPSVAARKRRVAGYARVSTDSDEQFTSYEAQVDYYTKFIQSKPEWEFVKVYTDEGISGTNTKRREGFKEMITDALDGKIDLIVTKSVSRFARNTVDSLVTIRKLKENGVECYFEKEGIYTFDGKGELLITIMSSLAQEESRSISENITWGQRKSFSDGKVHLPYKRFLGYEKGEDGRPAVVESEARVVKLIYGLFLEGKTQAGICKYLEELGIPSPGGKAKWSKTTVTSILQNEKYKGDALLQKKFTVDFLEKKMKPNEGEVPQYYVTGSHPAIIEPDEWEQVQAEFARRKTLGKAYSGKSVLSAKLVCEDCGAFFAPKVWHSTDQYRRTIWQCNGKFASEEHCHTPALDTETIQRLFIKAYNLMMQDRVQIIKEIEAWRQKLMDFGTLDADIERQLEETQVVAELVKAAVKENASTAQSQEAYLKKYEALTERYEKAAAELERLQSLRTSRSQQDKKMALYIRTLKKQPEVMHDWNDTIWTVMIEKAIVHRNGEVTFAFANGTEIKVGA

SEQ ID NO: 26983 - protein, 572 aa, synthetic construct
MASRIAEKLAAKKAAIYIRVSTHWQVDKDSLKVQRRELIAYVTLVLGITDYVVFEDPGYSAKNTDRPEYQAMMDRIRTGEFTHLVVWKIDRISRNLIDFAAMHDELQSLGVTFVSKNEQFDTSSAIGEAMMRIILIFAELERKTTAERVTAVMLSRASDGQWNGGRVPFGYSWSKETKTFSIVPEEAKAIRRMAELYEQYQSLLYVAKYLNDAGIVTKTGGQWTPTTVRTILTNPWYIGQYVYNVHSDGKGIEKRDSDEWITVENHHEPILSEDVFYRMKFLLTRNKRGGVPSHKTYVRKNIHVFAGLLRCGQCGSNMTANLDRRRANGFRPSQYACGSRRRKGTSCTNKYISDTTLGPFVLNYVANIIRASKNSSEATTPEVLERKLLRGEAFEDVASVSTDALGQLLDAFRSAGDAVEYRPQIAFSGDDNSIREIDTLRARRRKLDNALARLNALYLYDDEAMPEKDFVMQRGQITKQLEEVNARIEELQNQESSEELGDGFIGKASYYIMANKLIEDRYIDYEKYIRAIDPSIPHSFLQQIIDHIVVNDGRVTSITFKNGATHTFTYKT

SEQ ID NO: 26984 - protein, 530 aa, synthetic construct
MPYCLYVRKSRADAEAEARGEGETLTRHINALLDLAKRRHLDITQIYREIVSGETIAARPVMQQLLSEVEQGLWDGVLVMEVERLARGDTVDQGIVAQTFKFSDTKIITPIKDYDPNNEFDEEYFEFGLFMSRREYKTINRRLQRGRIASVKEGKYVGSQSPYGYQREKLVGDKGYTLAPLPAEADIVRLIFQLYTKGEEQEDGSYKRLGVSRIVRRLNDMRIPPRKSTHWSPATIRDILINPVYIGKIRWNWRKDSKKMVDGRVVIARPRSSIDDCVLADGKHPPLIDDATFALAQEYMAQNPPHPIGERNKVKNPLSGLVVCAKCGKKMVRRPYNDRNQADTLLCADTACDNISSALFYVEERVLQALSDWLAEYRLQWETADDTSENASAVNLREKALRRLDTEYDTLNKQLDNAHDLLEQGVYTTEQFLDRSRKLSERIKKNEADRSTLGADIAADKKREQGRKQIIPKVEKLLDVYDSLPSAKAKNDMLKEVLEKVVYLKTKNGRWDNAPDDFEITLYPKIPKSD

SEQ ID NO: 26985 - protein, 477 aa, synthetic construct
MRDSKSKTVIIYNRVSTIMQDKNESLTEQTDECIRYCKTNGYEIYKILKDVKSGTKDDRAGYLELKKHIKRRDFDILVVLETSRIARKMKELVLFFSLLNENNIEYISIREPNYNTTTPDGKFAMNIRLGLIQFERDNTAERVTDRLYFKASKGQWVNGKPPIGYKLVNKRLEIDEEKAEIVRNIYEDFLNGYSLNQINNKLQFSWGSKQVKRILTNPTYKGYIRYGTRSNRKKNNREAFIVKGWHEAIIPEEKWEKVQEMYKNLNRKASSTKPTLLGGLLKCKECGNNYIRKRGGSYDKNLYYGCNLNNLRYSDKFFYKDIPECSSATIKGDLLEKAVIDTLKKQINDLNFNDIEIDKKRQVNIKQIDSSINKFKNRLNKIYELYIEDEIPKDKYLKDKKDIEARIISLEKQKKSFGEIEVEKSNNEMIQEYFSKIDLSNIEEANRILKIIVNKIVVYKKKKTPKDDFEVEIYLNI

SEQ ID NO: 26986 - protein, 519 aa, synthetic construct
MKKVTKIAETASSKVKLKKIRVAAYCRVSTDSDAQLESLEAQKTHYENYITSRDDWEFAGLYYDEGITGTKKDKRPELLRLIDNCKAGKVDFVITKSISRFSRNTTDCLELVRKLLALHIPIYFEKENINTGSMESELFLAILSSMAEGESVSISENNKWSIQKRFESGTYKVSYPPYGYDWDGEQMIINPEQAAVVKEIFAALLSGKGTHAIADDLNRRGIPTKRNGRWTATTIRGMLSNEKYVGDCLFQKTYSDSRFVRHNNHGEQTQYMVKDHHEAIISREDFEAAHAFIHQRATEKGVVKGSDKYQNRYTFSGKIICGECGDTFKRRIHSCTGYKYTAWCCSTHIKDKDKCHMLFVKDDDLKQAFITMMNKLVYAHRIILKPYVDALKNTSSDDSLRRIQEIQTLLAQNTEKRETLTKLMTQGIIDPILFNKETNELLSQADSFRDEINALKNAVSGDVTKVTAATVLLHFTEKGGILQKFDDDLFKEYVNRIVVRSRNEVCFELKCGLTLRERM

SEQ ID NO: 26987 - protein, 522 aa, synthetic construct
MGNVMVIPARRQVGNTVKQSVQKKLRVAAYCRVSTDSEEQETSYEAQVTHYTEYIQKNPEWELAGIFADDGISGTNTKKRDEFNRMIDECMAGNIDMVITKSISRFARNTLDCLQYIRQLKDKNIPVYFEKEAINTLDAKGEVLITIMASLAQQESQSMSQNIKLGLQYRYQQGKVQVNHNRFLGYTKDDNGHLIIDPEQAEIVKRIYREYLEGSSMDKIADGLMADGILTGAGKTKWHTSTINKILRNEKYMGDALLQKTYTTDFLTKKRIKNNGTVPQYYVEGDHEAIIPKELFVQVQAELVRRRVVHVSPTGKKRSFSCNHCFAQMVFCGDCGELYRRVHWNNHGCKSIVWRCISRLEPTSAEKNCTNRTVNELLLQEVTIKAFNQILTERDVFLKTLQQNIAKAVVNADTLSPDGIQSRLLELQKELIKKANNKQDYDAIADEIFRLRDQKEQSEVDSHHREEAMNRIKELQDFISGQETDITGFDETLVKKLIEKITVFADHFTVEFKSGITIDIEA

SEQ ID NO: 26988 - protein, 513 aa, synthetic construct
MAKAKQKAATNDISKLAVIYARYSSHNQTEQSIEGQLAAGHRYADLKGYTVVHEYIDRAMTGRNDNRDDFQKMLSDTGKKQFGAIIVWKVDRFGRNREEITFNKYRCKKNGVRVEYVAENLPDSPEGVILESVLEGMAEYYSLQLSQNVQRGLLESAKKHQVIGGNVPLGLMMDAHKKYVPDPKTAPTVKLIFDMYAEGSTTSEIINHLNSIGMRTKAGKPFTKSSLTTVLKNEKYIGVYKYKDIIRDEGVIPPIVDKEIFYKVQELLKVNRRMPSHKWSYSDYILTDKLFCGKCGTAMVGESGFGKMGVKYSYYICAKRRKDKTCDKKPVRQEWIEEIVLQRVQGILQNEELLEFIAENTWQYYLAQDESMEKLKGLQTELDKVEKSAANLMKAIEAGIFNDMTKARMDELDDQRAVIKKAMAEIEIEKGFKLTKDHILYFLEQFKKLDYKDRDCQRRLIDVFVNSIFVYDDKLRIAFNFGGSDSTITLNEVDKADRGEGFVCCASCPVLRP

SEQ ID NO: 26989 - protein, 474 aa, synthetic construct
MKVGIYSRVSTQEQAREGYSIGEQVERLKNYCAAKGWILYKTYTDAGFSGANTDRPGMQQLISDVADGKIDMVLVYKLDRLSRSQKDTLFLIEDVFIKNNVNFASITENFDTSTPFGRAMIGILSVFAQLEREQFRERSIMGKDARAKEGLHHGGGAPTGYNYIDGQLIINKEEAELIKEAYRLFLEDDMTMMGIAAKLSVFSEKFKYDHRIRKMLTNPLYAGWTHCRDELYKGQHEAIISQGVFDNVQTKLKIRAENNPHYRNAFNRTSLLAGILWCKKCGARYFKRVRRYEKGSKVYYYNKYQCYSRSSYKNMVRDKSCKNKIWTMDVLDKAVIDEIKALVANPAEVDNIIKLNQSNNNITEKKEFYKKRIKEIEKQMNKLTDLYSIDGIDIDFVAKKITTLNTDKKRIESEMNAINEHKPLISAEDAKKRLSGISNILDNGEFTEKVKVITSLINRIEVDDDDIYIYWNFV

SEQ ID NO: 26990 - protein, 454 aa, synthetic construct
MECVAYLRVSTEKQAEEGNGLDSQRRDIENYCRKNELIIKNWYEDDGFTGSNMNRPGLQRLINDCTRKRIKCVVAFKLDRLSRSMVDGIYLIERIFIPNGVEFKCVHDSVSYDSPMEQAYTQMMAVFAQLDKNTMLLRMRGGMLERVKQGFWMGGGNLPYCYDYDREQGILVPIPERAEQARQALNLYLSGYSDAKIRDILGYTSERVVRNILTSPVNIGMIPYKGSVYRGKHEPIFEMERFEVAQEMRKSRRQHKLQNINQPAHLLTGLCYCGVCGCKMRYQKWTHGKYKIYCCSRNAGCSHLPNYNPNCDNSLEWADDIEKQVEEQILKISLNLSSYKPKEKETRLEILQKQYDKEKIKLKRLYSLYADGNDTVLEMIQESESKLSEIKEQIDREAENTEYTQKKEYVYEKIKRLADVWDHIDKPDKNKILKSIISKIVIVNGNVEIQLKRF

SEQ ID NO: 26991 - protein, 434 aa, synthetic construct
MKRVVERVDALIPAQPRALRVCAYARVSTGKDAMLHSLSAQVSYYSKMIQSHNGWMYCGVYSDEAVTGTKRERAGFQHMIEECRQGNIDLVITKSISRFARNTVTLLQTVRELKSLGVDVFFEEQHIHTQSSDGELMMTILASYAQEESLSASENQKWRVRKAFENGEIINLRFLFGYDITPGVIQVNEKDAAIVREIFARFNGGESMSSICRDLDARGHKGVLGGTWCAERMRNTLSNEKYLGNALLQKRYRNNHIEKKLLPNRGELPMYYAEGTHEPIIDQATFDKAQERLRMLAQQTANRTKPTRSVFSGLIHCGLCGNTYKRVTYRKKHYWNCTTFQTKGKSECAAKRIPEETLETLTCEVLGEGSIDSDMVRSKITAIRAEKNNVVVYCMDDGSEIVKRWKDRSRAESWTPEMKEKARQRALQARRKKE

SEQ ID NO: 26992 - protein, 472 aa, synthetic construct
MMRAAIYIRVSTDEQARHGFSLAEQEHDLTEYADKHHYIVVGVYADEGSSARKSVARRKQLQRLLDDVRADRVDIILLKCLDRWFRNVADFYKVQAILDEHKVQWVCTQEDYNTTTTNGRLMLNLKLSIAQNESDQTADRIKYVNQGILRRKREIGGKAPFGYRFVDLEDGGKRIAVVEEQRAAVEFIFRSHLSGHSPMRIAHDVFVQYGIPITRRRVRCVLRNETYTGRRYGIDDFCPAIISPDIFQQAQERIAGHKSWPKKRDFLYLFRGKVICPSCGRVLFGHHGDHKKKNGYVSHYCNYWCCKHFVFGAPDVAAGGCAYGGAVSERSIERYLLDHLAELLESYQLDINKRRSSSRLSPDQRIQTAAAKLTRLKDLYVDGFIDKPTYQADYTKLQQEISAALAEKQATRATPEAVQNLILHADDIRKIYATMDRQHKYDLWQSTIKSIKIGEPTPSRGRAYKNFIVEFY

SEQ ID NO: 26993 - protein, 540 aa, synthetic construct
MNTVIYARYSAGPRQTDQSIEGQLRVCTDFCKQRGLTVIDTYCDRHISGRTDERPEFQRLITDAKRKKFEAVVVYKTDRFARNKYDSAVYKRELKRNGIQIFYAAEAIPDGPEGIILESLMEGLAEYYSAELAQKIKRGMHESALKCQSTGSGRPLGYRVDEQKHFQIDPESAQTVQTIFEQYIKGESNAAICELLNSRGLRTAQGKPFNKNSINRIIKNRKYIGEYRYHDIVVEGGMPAIISKDTFNLAQAEMERRRTRKAPKSPKAEYLLAGRLFCGHCKGPMQGVSGTGKSGNKWYYYYCGNTRGENKTCDKKQVSRDRLERAVVDFTVRYILQEEVLEELARKVHAAQERQNDTASEIAFYEKKLADNKKSIANVLRAIESGATTQTLPARLQELENEQAVILGEISFLKGKRLAFTEDQIFFTLMKHLEPYPGESEQDYRRRIISDFVSEVYLYDDRLLIYFNISSEDGKLKSADLSNIEGGEFDEGLVSSTKETTIFVRRLSFLFVLYVYLFVFFDLKDNGQENNYAETGFPYR

SEQ ID NO: 26994 - protein, 557 aa, synthetic construct
MAKRLHGALICARYSTDNQNPDSIEVQVAKCTEWCHTHNIPVLGVYADEATSGMKDTRPRYAAMMRDLRDGVGDMVVIYDQSRMFRKMTSWFSFRDQLTQMGVDVVSVTQPMIGKDLRDPTNFLTEGSMALFNQIWALQSRQKVMEKMRFMAKNGQHTGGKPALGYEVVDGRLAICEAEAKIVRRIFEEYGFGKSYREIVAGLNADGIKTKRGSAFGANSLHDLLKNEKYIGTLVYGQRPYREDGTRNTHAAAADSIRIENAIPAIIDKELFAKVQDKMAANKRQQGGRPPTKRDYPLKGKVFCAECKSAMTISTSQKIYDYYKCSGKKRRHDCDGVNISVDVLERTVANAVRQVLGSPKNVERLITILRDQSGEIQAQAVDALRQLIAREREISRKLDNATDAILGGLSSPTLLARVKDLEQEKTEIDRQMRELKATVDASAIPETRLREIIDEISGDNPAGNAALLAIVCRVEVAKDTITIWTMLDTHPDGTFDWSEEGVLITPGTTSGVPEKNNPNLFSVGDGFGLFLFPGCGNTNIKAKTSDRLAGGFDFSEF

SEQ ID NO: 26995 - protein, 518 aa, synthetic construct
MSIMSFNNIIIYLRKSRADDPTMTVEEVLAKHESILQDYCIAEFDQPMPESRIYREVVSGETIQDRPVIQRVLRLLESGNIDGVLVVEPQRLSRGDLEDCGHIINSFRYTNTMVITPTKTYNLQDEYDRKFFEMELTRGNDYLEYTKKILARGRLAAVMSGQYIGSVRPYGYTKIVYGSGKNRIRTLEKFKKENDILILMKRLYLDEDYTPEEIARAFDNMGIEPPRGKHWTASAVRRLLASPINNGKIVWNKRQTVVEWRNGKQVKSRAKSNKDDVIIVQGKHPATYDDETYTAIMAKLSIHSVKVTNQRGLRNPFAGILFCQCGRAMSLRSTHNGHSVILICNDHFYCHTRSVAFNPVLDKVKEALSEAITDFSVKISNKEHTESELYALNISTLENKLEQLYKKDLVQKDAYEDGVYSKAEYIQRNTQLQEQISAIANSLKEMRAKAPEVINYKDCIIRFQDCLNALEDNNVSIEVKNALLKACISKIVYHSVNSNSEYSGRTKNPFNLEVFFKL

SEQ ID NO: 26996 - protein, 523 aa, synthetic construct
MRFFSYGRKSVFSDKSDSIDNQFRMNREYCESKFSGQVDSWQQFSDEDFTGANTSRPDLQRMLSFIKGGFCDVLVVYQLDRLSRDVRDFANIYALLEEHGVMFISIKENIDTTTPIGRAMMYVTVVFAQMERETIAARVTDNMLGLAKKGYWTGGNPPVGYVRKHIVVNGKKHCSIEVDPDGARYVTQIFDTFLAYNCSLQGMETRFKNQGIRTQSGKFFSTTQLHKMLTMPYCVEATPEVYDFYAAKGCIMDPGSPREMWDGSVGVIIYGRSTEKNKKHQAQPPEKWTVCLGKHKPFMPAEKWLAVQSRFTQNKCIKDAKWPVPLLKGVLRCKCGNLMQVSRKKKVDGTCSSWYYCRKRMRQGVDACDMGQIKCDLLDEEVLELFRGITADPALIQKFVKAEAPADVPDLKAAQARVSACERKIARLAASLALAEDSAASKYIIAEMERLDVELGALKREASLAEMESHQAAASAKDAKATAAEIAKLIHGLDGFDDKEKNAIARAVIQECTWDGERLFIKL

SEQ ID NO: 26997 - protein, 551 aa, synthetic construct
MNAVIYARFSSHNQQEQSIEGQIRYCTEYAKKNDMTIINSYIDRAISGTSDNRPEFLQMIKDSNNHQFNVVLVWKLDRFARNRYDSAIYKNALKKNNVKVVSVTEYLGEGSESVLLEAMLEAMAETYSRQLSENVRRGMRESALKCQVVGGSVPLGFDTVDKKYVINEKEAEIVRFIFDEYVSGTSKKEIVNKLNAKGWRTKNGSTFVFNSLNKILSNRKYIGEYKYEDIVIEHGIPAIINERTFILAQKQLSKNKQNRGTKSAKHEYLLATKIFCGYCGGSMIGETATGKGGGKFGYYVCRNRKKHINDCKKRREKQKELETFIVERTLYMYKNKDFVNEVAQKVVDLYNKECGQNHLKTLELNKKELEKKLEELSDGLLKTTNARVLKKFNEQINDLDNQLAELEIEIAREKAIANATMRCSDVIDFISDIMDGDINDKQFQKKIIDTFINAIYVFDDKLIVYYNGSSTSDKVTFDDLLNDLENKGVKGSTFNTLTPPNKYWMNTYFFSGGFAVRCVLWYKNRTPFQCKSWSGVFLSLKDFLSTYSIFG

SEQ ID NO: 26998 - protein, 441 aa, synthetic construct
MKRAAIYVRVSTKEQKEKGLSVDSQLLALREYCSNNGYVIAGEYNDAGISARKKYINRPALLQLISDCKEGKIDIILFTKLDRWFRSVADYYQVQTLLDSYKVPWRAIWEDYETETSTGLFKVNIMLSVSQNEADKTSERTKEAVKYRRLRGDFVGGRCPRGYRRENKKLVFDEETYDAINAMFRTYLSCFSIAKATEAVAEYGLHIATSQICRMLKSPAYAGNASGSECPAYITWDEHLLILTNSTKRNRTPKRSDRVYLFSGLCRCGYCGGRMVARVNRWVKNGQQLYYPFYSCAAHNDKRNLDCPGVNLAETKIEAYLMEHLEAELKMCQSEFELEQENKAIYENKIKALEQKLKRIGVRYEDGDIPFEEYKDKRFAIKKEIAGYKDKIDNARSVPSLPDNWKDLYNSLTPDNKRGFWLNILKEIDITKEAINIVFPV

SEQ ID NO: 26999 - protein, 499 aa, synthetic construct
MKQSKAKISVDIRFALLCIIRKVNRVKCVIYVRVSTDEQAKHGYSIAAQIEKLEAYCISQGWELVAKFVDDGYSAKDLERPQFQEMMEQIKAGGIDVLLVYRLDRLTRSVSDLYSILNELDQYNCKFKSATEVYDTTNAMGRLFITLVAAIAQWERENTAERVYFGMDKKARLGEWPGGTPPFGYKIEEEKLIIDPEEVKTVREIFKLSKTLGFYTIAKQLTTKGIPTRNGGDWHVDSVRAIANNPIYAGYIRWGDDGRQNKKPPREQKLYDGIHEPIIDRDEFWGLQDILDKRRTFGGKRETSKYYFSSILKCARCGHSMSGHKGGNGKKTYRCSGKKAGKNCTSHIILEDNIVKAVLTEFEGLVRDIYSDVKTSKEPIERLSVLNSELSSVQKLMKKKKTMYENDIIDIDELIATTSELREKEKELIREIKNIQKEDKTDTDELKYIIENIDTLWDHANDYERKQLMTSIFSQLIIDTNDEYRGSKYPRDVIIVAAK

SEQ ID NO: 27000 - protein, 527 aa, synthetic construct
MNTAVRTVTVIPPSINPMTHLTDTPLYKLRVAAYARVSTDSDEQFTSYEAQIDYYTQYIQRNPEWTFVKVYTDEGISGTNTKHRAGFNEMIEDALAGKIDLIVTKSVSRFARNTVDSLVTIRKLKEKGVQVYFEKENIYTFDGKGELLLTIMSSLAQEESRSISENVTWGQRKRFADGKVNLPYKQFLGYRKGADGFPEVVPEEAVIVRRIYTRFMEGLTPGAIAKELTADGIPTPSGKQRWQTSTVESILQNEKYKGAALLQKCFTVDFLTKKRKVNEGEVPQYYVEHSHEPIITPEEFDKVQTELARRKRISRQYSGKSIFSSRIVCGDCGSYFGSKVWNSTSKYRRVIWQCNGKFKGEHKCETPHLDEETIKARFVAAINAIIDSKDNILEDCRLMQTTLTDCTGIDAEIESLLEEIDVVAELTKRCIAENSQTAQNQNEYAARYNGFVERYEKAKAQLEQLRATKVAREAQAEAIGAFTFEVQELDALTNFDDKLWLTVIDTVTVHADGRMTFKFQGGTEIEA

SEQ ID NO: 27001 - protein, 465 aa, synthetic construct
MARSITVIPASQPYRVGGRTQQKTRNLRVAAYCRVSTDQEEQLNSFENQVEYYTKYIQDNPLYQMAGIYADEGISGTNTKKREEFKRMIRDCEEGKIDLVITKSISRFARNTQDCLEYSRRLKNLGIGIFFEKEHINTLDASGELLFTILSSLAQDESRNISENCKWGIRSKFKKGIPQVDCTKFLGYDKGEDGKLIVNQEQAKIVKRIYREFLDGYNPAAIAKMFMEDHIKTGTGREEWRSVSVRAILKNEKYMGDALLQKTYTADFLTKKVKKNHGEVEQFYVKESHEAIIPKEQWEAAQLELERRDSYMQELGLTFYGYGSEVNPFSCRVVCGKCGAVCGKKSWKSRGVEFWQCNNRSKNHGVKGCANENLPHENLLKGFITAWNQIVAEREQYLPKWEKKKKEGNPLEKLRAEQMIELTLQPPLTKMLPELGQMVLERVIVQGKEIMVIRFLDGTEIKVRI

SEQ ID NO: 27002 - protein, 498 aa, synthetic construct
MQIEVRKADMGKEKKRLKVCAYARVSTEASEQENSLENQVSHYTEMIQSNPAYEFAGVYADFGISGFKESRPQFQKMMQDAKNGKIDLIITKSVSRFARNTAIVLKASRELKERNVGIFFELQNINTLTEAGELLLTILAAFAQAESESASESSKMAYLHRIENGEVVAYLERSYGYEKDENGEYRAKEPEASVIREIYDLVIQGVNCTNIARVLNARNIQTVQGAEWTASTVFRIVENEIYKGDVLMQKTFIDGKRHQVQNRGEKAMYYAKDNHPPIVSEKTWEKAQRKLEDMRAERAEHSVIQEFTEENYPYMNHIFCAKCGWPLKPRVYSHGHRLSWDCSGQKRGTKKFCTGIHILDNDLRKMKIEGNRYFSETVDKYGEVHLKHVGERTWKNKHKKKKFNHKDLYPELNEENYPYYKRLYCARCGSRLGRYISHGTVRWICSSYKRKGQAKCPGVRIPDEIIKGWNLPDGKIYIMGKEDKNGEKHYSYTSESAL

SEQ ID NO: 27003 - protein, 436 aa, synthetic construct
MARIVERVDFYTPKIKKQKRVAAYARVSSGKDAMLHSLSAQVSYYSDLIQKNPEWRFCGVYADEAMTGTKDSRQNFQKMLAECRAGNLNLIITKSISRFARNTLTLLETVRELKDLGVDVYFEEQQIHSLSSDGELMLSILASYAQEESLSASENQKWRIRKDFEKGKVSSLQMLGYKRNHNGVLEIIPDEARIVRLIFNSYLSGMGKLAVANMLNEMHISTKFDNEWTAEAVRRILTNEKYCGELMLQKFYSENHLTKRKMVNHGEIKKFYVEEAHPPIIEKSVFLAVQNLMKKHQEQFTPTKSTAVTYPFTGKIKCECCGKNYRRKTTPTGIVWICATYNTKGKKYCSKAKQIPENTLISVCCEVLDLQKFDVNVFESQIAIILVSAPNEMTFIFTDGHQISANWKDRSRSESWKPEMKKATGERSRKWHEQSR

SEQ ID NO: 27004 - protein, 544 aa, synthetic construct
MAETAKKISMIPAKVQYDRNVKLSEKKMKVAAYCRVSTELEEQDSSYEAQVEYYTSKISENENWKNAGIYADDGKSGTNTKKRADFNAMIQDALAGKIDMILTKSVSRFARNTVDSLVTIRKLKEKNVAVVFEKEGINTLEGTGEILITILSSLAQEESRNISENIRWGVVRKFEKGKVIVNCTKFMGYTKNEDGDLVIVPEEAEIVKRIFRLYLEGYSTGKIAKHLEEQGIKTATGQDKWHSTVIDKMLRNEKYMGDALLQKTYTVDFMTKKKVKNTGLVPQYYVEDDHEAIIPKELFYRVQEEMMRRASLCKAAVTRKKNQRSRYSSTYALTGMLICGKCGQEYRRVTWARNGKKKVVWRCSNRLTNGVKKCGESEILEENALNRAVMEAIHRITSDDMEFMENFRQNIIHVIGSYGTAKESGEYEEKIKEKQEEMVALIAENAKTGSYTPEFDERYRTIAEEINALKEAQKTARNEKRMADSYEQRIQDIDHYLSTSTCQIPEFDNDLVRRLISTIKVESSEKLLIQFQSGIVMEQEIRYE

SEQ ID NO: 27005 - protein, 538 aa, synthetic construct
MAKKVTVIKAAKAQKHTQEERRLKVCGYARVSTGSQAQATSYTAQVEYYTEKIESNPLWEFAGVYADEGISGTNVKHRDEFQMMISDCEDGNIDLILTKSITRFARNTVECIQTIRKLKEIGVGIYFEKENINTLSEKSELFITILASVAQGESENISSNNRWAIQKRFQDGTYIISTPAYGYGKDEDGNLVIIESEAETVRWIYESYLNGMGVYVIAKALNQKGIPTIRGAEKWQDGVIQDILKNPIYAGDMLQQRTYTETRFPFVRRVNNGQRNQYLIKDSHPPIVTHEEAEAVRNLMAYRVDVLHMNKSDYTKRYLFSGRIICGECGRTFRRQKIYIGKPYEKIIWTCSGHVEDKESCCLKAIREDVLHRAFTDMWNKLYTNQGTILEPLLKELTELVAARQDSEEIRQLDKEIKDISGQSQILNQVMRKGYMDSALFMESSSKLGWQLTECRRKKTLLTRKLRRTKEIVRTEQLIQLIAEQDGLMEEFDEQLFKMTAEKIVVSKEHDITFCLYNGLKLTERGGGQDAVAHANRL

SEQ ID NO: 27006 - protein, 504 aa, synthetic construct
MEIQVLEARSSKGYRKKVCAYCRVSTDALEQENSLENQIAYYENLIQSNPEYEYAGVYYDFAISGYKEKRPGLQKMLTDARNGKIDLIYTKSVSRFARNTAIVLKASRELKELNVGIFFELQNINTLSSQGELMLTILAAFAQAESESGSIGAKMVYQRKYEQGIPVQYLERCFGYTKNEKGEFVPDTEQAKWIVKIYEMAAEGYSLSTIADEMNAAGVKTDKGAGWVESTVKRILENEIYKGDYIMHKNYVNEERKLVRNRGEVDAWYIEDDHPPIVSRQLWDKAQEARKKKRDYLDMDCQIREVTEENYPYKGHLFCAKCGSPLTHRIYSNGNRMSWDCSGRRRHGKEFCDGIHVPDTAVRQWKFDGNIYISVKDSRKSIKEFSYTKESSWSRRHKKKEFVRDVPELTEENYPYYRSIFCAECGSRLVRHIKKHGDIVWECNGRKRKGAAYCEGVRIPDRVVQAFMPIRKAIYIKERKGRNGTKHYSYSCKKPERATREEQD

SEQ ID NO: 27007 - protein, 435 aa, synthetic construct
MAAYCRVSTDQEDQLHSFEAQVEYYTRYISDHPNYEMAGIYADEGITGTNTKKREQFRRMISDCETGKIDMVITKSISRFARNTQDCLQYSRMLKNLGIGILFEKEHINTLDSSGELLFTILSSLAQDESRNISENCKWGIRSKFKKGEMHVNTHKFLGYDKVDGKLVINEREAKIVRRIYREFLWGHSPQEIAKGLEDEGIEGCMGSKKWYPSTVINILKNEKHMGDALLQKSYTADFLTKKQVKNHGEVTQVYVKGSHIGIIDKETWNAVQLEFARREEFVKEHGLKGYGYGRECNPFTSRIFCGECGSPYTRHTWRSRGIMQWQCKNHMTDGKVTCVNGFVSQSDLELGFVKAYNMLLKHKEILIPWWKDTIETGNALERLRAKQFLDLSEQPELECYVPELAQLVIQMVIIKGIKKYEFTFMDGSRVTVCV

SEQ ID NO: 27008 - protein, 517 aa, synthetic construct
MRKITRLEPKKTALPTRKKVAAYARVSKDTERLLHSASAQVSYYSELIQKNPEWEYAGVYVDCGITGTLTYKRDEFKRMLTDCEAGKIDIILTKSISRFARNTVDLLETVRHLKSIGVEVRFEKEGIHSFSEDGELMLSLLASFAQEESRSISENVKWGIHKRFKSGEIGVANKHILGYQYDEEQKKYIIIPEEAESVRWMFQMYIDGVTLRDIADNLNNAGICTILGNDFQEASVRQLIFNEVYAGDIRRQKCYVSDPIKKDKVPNRGELPQYYMADCHEAIIDRDTYAKVKAEMERRASLLNPTYCFTKKIRCGTCGAQFTRKKGKVRGKTYVHWICRSKKETGMTCSSVNFSEEELKNICADVLETDSFDEEIFESRVKDIIVLKNGDIEFHLVGGETRRWKNLHLNPPRHKVTLTDAFQGKIRCAKCGNTYHRVNSANKWVYWYCMGKKKKGMTCDNINYTDFQLRQITAHILGLEDFDEQVFSEQIEGITVLEDGNLKYHFYKGRTERWQRV

SEQ ID NO: 27009 - protein, 524 aa, synthetic construct
MAKSVITIPATKSKYTATPLSCKKKRKVAAYARVSTDHEEQQSSYEAQVDYYTTYIQGRDDWEFVSVYADEGITGCNTKKRDGFNSMVEDALAGKIDLIITKSVSRFARNTVDSLTTIRKLKEHGTECYFEKENIWTFDGKGELLLTIMSSLAQEESRSISENCTWGQRKRFQDGKVTVPFGRFLGYDRGEDGNLVLNEDEAQIIRRIYGLFLQGRSPYAIAKVLTSEGIPTPGKKKTWSASTVKSILTNEKYKGDALLQKVYTEDFLTKKKIKNDGQVPQYYVENNHPAIIEPGVFDRVQKLMAVRHPGQNRNSSISPFSSRIKCGECGSWYGSKVWHSNDKYRKVIWQCNHKFDGDCKCGTPHITEDEIRSLFIKAMNILITEKDALIEDFEAIKDTVFDTSALVQERTDLQVDMNTVAGLIEECIAENARIAQDQGEYQKRYDSLAKRFDRTKDRLEAVERSIAEKQAHREMVEQFLSELAKQDAVTEFTDELWYSMIDHVTIHSKDDIRFTFQNGTEIRM

SEQ ID NO: 27010 - protein, 426 aa, synthetic construct
MRVKVINKRPASVLQKKRVCAYARVSTDSRRQEDSLENQMETYERLITGNPEYEFIGVFADQGISGYCENRPQFQRMMEKARAGEIDLIITKSISRFARNTVTVLKFARELKELGVGIFFEEQNINTLSGDGEMMLAVLASFAQEESRSMSENNKWSIRKKFERGEVMITTSRFLGYDKNEYGDLIVNRKEAEIVSLTFDLYLLNVGSSRIGELLDYLGVKTVTGTTWESGTINGMLCNEKYKGDFHLQKYYTPENKRNHTRKNNGEVQSYYISENHEPIVSPEVWEKVQEVREQRKRDRNIGQDSTMKFQNRYPLSGMLICPYCGKTLRRRQVYKKKIQWLCSTYIEKGVKACKGIRIDDAELQGLNIAEQTVIEEVVKNGKKHYCYTSKADFDCGIRNSTVSAEIKDGSVLPSVNRPRRTVIKL

SEQ ID NO: 27011 - protein, 525 aa, synthetic construct
MTAIRKAVISMNTTNAVIYARYSSDKQTEQSIEGQLRYCTEYAKRCGYTIVDSYIDRAASGTTDRRPQFQQMIEDSKKRQFNYILVWKLDRFARNRYDSAIYKTKLKKNGVRVVSATETLGNGDESIILEAMLEAMAEVYSRQISQNASRGMRESAIKGQTTGGNISLGYKIDNKFLVEDTKTSAAVKLIFQQYASGKSQTEICKMCNEKGYRTKNGKPFYTNCLPGILRNKMYIGDYTYKNEIKRSCPALIDIDTFERCQARLEQSRRTRGQKKSEDIDFLLTGKLFCGMCGTTMVGDSGTSRNGSKHYYYTCRNKRKRKGCKKQSEKKDFIEWYIVEQTVNYVLTNERRHYIAEKIVAQYNSDFSAEQVAELERRLVNIDIEINNCAEALINARSAAVIDKINNKADCLQLQKEDTEIELAKLKIACDIRLTVEEVELWLQSFCSGDLMDLDFRKKIIDVFINSIYLYDDKVVIYYNVKDSRQISYMEMLADLEQLDDSLKCSDSSVQGEPKDSRYCIYCLFL

SEQ ID NO: 27012 - protein, 590 aa, synthetic construct
MKTVEKIERKLPVLKTRKRVAAYARVSMESERMQHSLSAQVSYYSALIQKNPEWEYAGVFADYGISGTGTKKRDEFNRMLAECEAGNIDIILTKSIQRFARNTVDLLNTVRHLKELGIEVRFEKENINSLSGDGELMLSILASFAQEESRSISENVRWATIKRFKQGIPNGKFTIFGYEWQDDKLVIIPEEAEIIRWMYAEYMKGASRIEIGRALMDRGIYTRQGKPWVDSNVKVILTNITYTGNMLFQKEYCEDPITKHRRKNYGEMPQYFVEDTHEAIIPMDEWQAVQAEFKRRRDLGPFGNKSLKLSAFSTKITCGCCGKHYRHSGKRNTAGEVYYVWTCQTKSQKGASACPSKNIPEKMLQNTTAEVLGLDEFDEDAFSQQIEEVIVIGDDTLTFRFYDGHEVTTKWQSTAKTDWWTDERRKLWGERHKRKDTNPNKHLFYEFTGFIKCGCCGANYRCQSGKRKDGTPTRSWYCTGPKDQCHNPGIRDETMKRLVTDVLGLDEFDEAAMDAQIENATILDHTVTFHFRDGHTESRDFLDKRHGTPWTEERREKARESMKAAWTDERREAMSERIKKTRSEKKWPNP

SEQ ID NO: 27013 - protein, 523 aa, synthetic construct
MAKSVTTIPATLSRFTAAPINSTKKRRVAAYARVSTDNEEQLTSYEAQVDYYTNYIQGRDDWEFAGVYTDEGITGTNTKKREGFKSMVADALAGKIDLIITKSVSRFARNTVDSLTTIRSLKEHNVECYFEKENIWTFDGKGELLLTIMSSLAQEESRSISENCTWGQRKRFADGKVTVPFNRFLGYDMGPDHNLVVNPEQAKLVKRIYGMFLQGQSPFQIARTLTEEGIPSPGGKDHWNPSNIKSILTNEKYKGDALLQKTFTVDFLTKKKKANEGEIPQYYVKDNHEAIIDPETFEMVQTLMATRKKGRNRKSSVSIFSSKVKCGDCGSWYGPKVWHSNDAYRKVIWQCNHKFDGQKCATPTLTEDEIKELFLRAANQVIDQKEQFIAIYEQVLSRSLDTTAFEGELTELEAEINIAAELIEECIKENAHVALDQAEYQKRYDGLVARFDKAKARHTEVTDLIAERTARRHQIETYLKELRSREPLTEFRETDWLAMVDYVTVHSKDDIRVTFKDGTEIKT

SEQ ID NO: 27014 - protein, 538 aa, synthetic construct
MSTAPNVTIIPAKIQTAENRDKYHQLKVAAYCRVSTEQEEQQNSYQVQIAYYTDLINRKKEWTLAGIFADEGISGTQTKKRTEFNRMIRMCKNKKIDLVITKSISRFARNTVDCLEYVRQLKDLGIGVIFEKENINTLTMTSEFMIALYGSFAQAESESISKNVSWGKEKAYREGKVQFQYKYLLGYKKGEDGKPEIVPEEAETVRLIYTLFLDGYSMSRIKKLLENKGILTSQGNKVWNESLIRSILKNEKYAGDALLQKTFTSDCITHKIVKNHGERPMYLVTDHHEPIIDRDTYNRVQQELARRSSKRKVSDKTITEQGKYSSKYALTELLICGKCGTPYRRTTWTSRGKKLIVWRCISRLEHGRRYCPDSPTIKEEQLHKAIVRAINNYYSCGNDVEKILKANIGNVLECHGQEEIAAIEKRLKEIDKARSDLISLIATGDCDEDKLDSEFEKLYEEEQSLSERLAMLKSKNQTSAETQAKLDKIIDMIEHEKFELETFDNVLVRKLIECVKVLSKTEILVIFKGGYEVRTEIE

SEQ ID NO: 27015 - protein, 508 aa, synthetic construct
MTTVTIIQPTISEEQNHKLRCAAYCRVSSNSEDQLNSFMAQTRYYEKAFEKSDREQLVDIYADEGITGTREDKRDEFQRMISDCRKGKIDRIYTKSISRFARNTKDCLKNIRELKSLGITVFFEKENIDTAKLTDEMMITIMGGLAQEESVSISKNLKWSYQKRFEKGIVNVFSAPFGFKLNNGALIIDKIQAQIVEEIFDMFLNGIGYQRISEICQSKYKVYKDKFSYYGIRYILSNEKYIGDSVYQKTFTTNNLPYRKIQNNGQLNKYCIQNTHEAIISIEIFEKAQKLIESRKHKNIVSESPFRGKLICANCGTKYKRKDSRNKIYWVCRKHDNLAELCMNKRVEEKFIKQSFIRLYNKLLFKYKQILVPLQTSLQDLKLKKFNGKTQVMDIHKEIAKLREQTHVLARLKTKGFLDEAKYIEQTTELTAKINKLQAELKKLTRLDDEDETLDQIEMLIDFFERRDKPITEFEESAFESIVEKIVVIDQHELEFHLIGGIKFKENI

SEQ ID NO: 27016 - protein, 497 aa, synthetic construct
MNAIYARQSVDRADSISIESQIEFCQYEMRGEQYKVYTDRGYSGKNTDRPAFAEMMNDIENGVIGKVVVYKLDRISRSILDFSNMMEQFGTHKVEFVSTTEKFDTSSPMGRAMLNICIVFAQLERETIQKRVADAYYSRSQKSFYMGGRVPYGFRLIPTTIEGIKTSMYEINAEEAEQVRLIYELYSKPECSYGDIIRYFQAHGILKNGKPWGRTRLADVLRNPIYVRADLSVYEFYRNQGAIMANDPSDFIGTNGCYYYKGQDSVGRKQMNLEGNHLVLAPHEGIIPSDLWLKCRAKCLEAQQIKPYQKAKNTWLAGKIKCGICGYALVDKHYSTTRSRYLLCSNKMNSKACEGPGTIYTDEFEQIIYNEMRKKMAQFKTLRRCKGNYINPELTALNVQLTQVGTEIGSLMDRLSAADDTLFRYISGRVKELDGKKKELMKRISELKLHKEADYTEIYNHLTMWDELSFNDKRQTVDQLIRVIYATSDSIKIEWRI

SEQ ID NO: 27017 - protein, 517 aa, synthetic construct
MPKTEEKRAIKAVIYARYSSDRQREESIEGQLRVCEDYARRNNMTILHTYADRAMTGRSDQRPEFQMMIRDAATMTFDVVLVYKLNRFARNRYDSAKYKHKLKKYGVKVVSAMENIADDPSGILLESVIEGMAEYYSAELAENVTRGMTENVLEGKWPGSYVPLGYKLDEQHRLVIDEPKADVVRQIYQLVLEGHNQKYIIDEMNRRHYTTASGRPFSYNTLRTILKNEKYIGVLNWGTVHKENACPAILDKSTFEAVQKHLKFRTKNHIRSCNESFLLTGKLFCGCCHSKMVGVSGTSKTGAIYYYYACAAHLKKKCKARNIRKEAIEDLVCEVTTRILSNPEAVEAIARQAIEMQKNKKDSLELQAIKNQIADINKKLQNCVRAVESGLISETITNHINDYEKELTRLKDDAARVKLLDGDVELTQQHIEFFFWSIAQKIKTADKYKSILLSSIVRSVIVDKDYVEIQYNYKNELPILQNPVKVESSYLNQMVTQERFELTTHRLEGGCSIQLSY

SEQ ID NO: 27018 - protein, 427 aa, synthetic construct
MQISCIKKAEDPIPKKLRVAAYARVSSGKDAMLHSLSAQIAFYSGLIQRNPEWEYAGVYADEAITGTKASRPEFQRLLRDCKAGKIDLILTKSLSRFARNTVTTLQTVRELKECGVDIWFERENIHSLSEDGEFMLTLLSAFAQEESLSASENQKWKIRKNFSEGQPTPTRMLGYKLVGDRFEMLPAEASIVKRIYTDYLSGLGLTAICKKLMNDGIPTKNGGQWRESVIRSILTNEKYVGDILLQKSYVTDHISKKQVHNNGELPQYYVKDAHEPIIDRETFERVQKEMLRRSSARPHTNCVGTTLHEFTGKILCGKCGCKYRRKKLASGKVVWICPTFNRLGKAYCASQQIPDAILRDLVSGIAFDHIRVPYANTVTIITKSGEEITKTWENPSRSESWTPEMREKARQRSITHGKKRSNDHSGD

SEQ ID NO: 27019 - protein, 533 aa, synthetic construct
MAKREVTIIPAIKPKYASKATEVGRKRRVAAYARVSTDSDEQFTSFEAQVDYYTKLINAREDWEFVKVYTDEGISGTSTKHRAGFNRMVSDALEGKIDLIVTKSISRFARNTIDTLTTVRQLKEKGVEVYFEKENIYTLDSKGELLITIMSSIAQEESRSISENVTWGQRKRFSDGKVSLPYKKFLGYEKGEDGYPKVVEEEAKVVRMIYRLFLEGETPSGICHILMAQGIPSPGGGDKWHKSTIDSILTNEKYKGDALLQKKFTIDFLSKKQKINEGEVPQYYVEGSHEAIVSPQVFDLVQFEIQRRKELPTKYSAVNPFSSRIICGECGGLYGSKVWHATDKYKRTVWICNRRYRKGTIAGTGCHTPHLTEAEIKAAFLGAFNKCIHNKTEIIENCRIALAEITDTVELERKAAELSEECEAAAELIRKCVEENAHISVDQNAYAEKYGALAERYAKYKEQLDATNMEISRRNIRKSQIAFFLDELAKSKELVTEFSTGLWNTVVDSVTVYSRSKVVFRFKGGTEVTWKIV

SEQ ID NO: 27020 - protein, 505 aa, synthetic construct
MKITAIAPKDNSRKKLKVAAYCRVSTEADEQENSLNNQKDFYEKHIRSNKSYEFAGIYYDLGISGFKEKRPGFQQMIADAMNGKIDLILTKSISRFARNTVTTLKVVRKLKSAGVGIFFELQNLHTLSNEGELMLSIYAAFAQAESEDSSMNMYMAHQRRFKKGIPAIRVYECYGYRLNSDGEIVLDEIQSQVVKTMFDLALQGIWVSKIRAYLDKNGIPSPQGKRWNDTAVNRILRNEIYKGDVMMQKTYIDADRVRHRNTGQKDRFYIEDHHPAIVDRFVWNEVQEVLDIRSMQLKQKLPKRSMGGNSHNKYSLTRMLYCPHCGSPLHHRVNSGGKYTYWCCGKKIKKGKDACIGITVPEDLTREWKITEEVTVFEEKDEFGRQHFSFMPKKEYEKSRKCPYEPTEKKGRDSYSIYPLSGKMYCGLCGSLMHHQIAWNGKEFWWCSKRIKKNACEGIKVPAEIADSWEFEGTITVMEGVDENGEKSYSYQSRAQTHHENGNKG

SEQ ID NO: 27021 - protein, 486 aa, synthetic construct
MIIAAAYVRVSTDEQTDYSPAAQLADIKEYATQNGYHIPEEFIFMDEGISGKRADKRPAFQAMIRQARKKSNHIQYIIVHKFDRFARNKEDSVLYKALLKKDGVKVISVKEPIPQDDKFAVIYESMLEAMAEYYSLNLAEEVNKTMIKKAQAGEWQATAPFGYKNENKSLTIVPEEAKMIRYIFEQYIAGTSMFALSRQMNQMGYRTHRGNVFEHRTIQYILNNPVYKGYLRWTPGKKINRNFNDSASIVAKGDWEPIVSKEIWDAAAARFKSEKRTYYKHKRPETEGIHWLSGMVKCSSCGRSLVVGAKYKSGAVQFQCGGYCHGQCHDSHAISSNRLIPAILSELEKIAAHPDTEGCRYTIRRELPASDELDVYMPLLTKAQQRLKKAKDAYLNDIDTLEEYRSNKMNIEKEIAELKERIAEIEEQQNVPFDQAAFSTKIASVIEILRDDSRQMEDKRKAFKSICDKIIFHKHDSSLELFLIDQ

SEQ ID NO: 27022 - protein, 457 aa, synthetic construct
MDNIKRAGLYIRVSHEEQVKDGFSLDAQKDNLIKYAKQNNYKIIDIYADEGISARKSYTKRKEFMRLIEDVKSNKIDIILFIKLDRWFRNVAEYHKIQEILEKYNVGWKATTENYDTTTANGRLYLNIRLAVAQDEADRTSERIKFVFEKKIQDGEYLSGKPTFGYKVENKHLVIDEEEAKVVRFVFETYLKLKSKRATVFATIKEFQRDFTYKVINCIFTNEKYIGKFRGNESYCDPIISKEVFETVQKTLKERRMRYSYSTSNKTNYNYIFSGIVRCPICGACLTGNKSSKINKTTGQKFKYYRCPNHLNQKSCLNSHTVNERNLENYLIENILQKLKDYKVEYQLKQKSKKTPNLNSKNKIENKIKRLQDLYVNELIEIEDYKKQYSKLKDELSQFEVIEEKEKDFTEIDNILNSDFEIIYNKLTPLNKRIFWQSIIEKITPTEDRNIFNIFLK

SEQ ID NO: 27023 - protein, 521 aa, synthetic construct
MSNITIIPARPQRTNRQQSEAEKPKLRVAAYCRVSTDSDEQATSYETQVTHYTEYITGNPEWSFAGVYADDGISGTNTKKREEFNRMIADCMDGKIDMVITKSISRFARNTLDCLKYIRQLKERNIPVFFEKENINTLDAKGEVLLTIMASLAQQESQSLSQNVKLGLQFRFQRGEVQVNHSRFLGYTKDENGRLVIDPEQAEVVRRIYREYLDGYSSDKIAAGLERDGILTGAGNPRWHTSTIAKILRNEKYMGDALLQKTYTVDYLSKKRIKNNGIMPQYYVENDHEAIIPKEIFMRVQDELVRRRLVKVSPNGRKHGFSSNHVFSQMIVCGECGELFRRVHWNNHGCRSIVWRCLSRLQSTGVVCHARTVNEEVLKKVVMQAFNELLRNKSAYQKRLRDNLAVVLCGYSDDEALEIDKRLAELQQELINHASRKEDYNDIADEIFRLREMKQKNFTDTAVRDEQVKRINELNDFISQQDTELTEFDESLARRWLKEITIWSDRITVELKSWMSIEIKI

SEQ ID NO: 27024 - protein, 521 aa, synthetic construct
MKTITKIDANQAAANSVKKLRVAAYCRVSTDSDEQLESLDEQKKHYENYIQAHESWDFAGLYYDEGISGTKKEKRSELMRLLSDCEAGRIDYIITKSISRFARNTTDCLEMVRKLLKINVPVYFEKENINTASMESELVLAVLSSIAENESVSISGNEKWSVKQRFQSGTYKLNPPPYGYRWNGEQLEIHSDESVIVKRIFADFLSGKGVAHIARELDSEKISPARGKRWRQSSILRILKNENYTGSAVFQKTFTDESFHRCVNYGQVDKYLVANHHEGIISKEDFVAAAALIDKHAAEKNVTKGSHKYQLRYCFSGKIICGECGATFKHRTHRAGGEPYEAWCCGNHIYNKESCSMKFIRDEDLKLAFVTMLNKLVFGHKLILKPYLLALRNSSTDSSIQRIQQLRLLIEQNTGQQETLTRLMANGFIDRALFGRELNAIMAQTDEYRAEIDMLSNSVTGDGAKLKETERLIKLAERGRMFTEFDSDLFAKLVDHIYVFSRSEVGFALKCGLTLKERIGE

SEQ ID NO: 27025 - protein, 668 aa, synthetic construct
MAYAKVKKHLKIWTKKKAALYVRVSTRYQVDKDSLPFQRKKLKEYCKFLGLEDYVIFEDDGYSAKNTERPHFQEMMSRVRSGEFSHLIVWKVDRVSRNLLDFAAMYQELKDHKVTFISMNEQFDTSTAIGEAMLKIILIFAELERNMTSERVTGIMLDRAEQGLWNGARMPVGYRWNNETKFPEPDPEEVKIVQLIFDKYEEWKSSIKIARYLNNNNFKSKRGGQWTSKLIHDIIRNPFYIGTYRYNLRESGRGPLKPESEWIVRENNHPAIIDKAQFDRCNKIMDQNGSSRDTSDLRARKYVHTFSGHLVCGKCGANMIASKDRARANGWRPSMYRCAQRSRMLDCDNSRTINESYIGPFIFNYIANLARVQKNFKNITTVEKLERELLKGETFDGVAGILPEGLNLTFQALSFRQVGNGTYIPDIDFLGDSDGASDHNQIELLKSEIEKSKNAVTRLTDVYLFDPDSMTKEEFATKKKELAKKIEGMERQLADLLDDSGNDDLADMSFIKKASAFLVAQRIVSKSFVDYVGMAQELDNEILKDFIDQIVDQIVVLDGRVQSITFINGLKHEFRYATPAELPVCQKCGGHIGSTCGCRTRTFDFSGKRYQRIKVGDPRDMIHGKKNPVCPECFAQEGRWHHWNCKVETCPICGGRLAECEHGANGKN

SEQ ID NO: 27026 - protein, 522 aa, synthetic construct
MGNVMLIPARRQVGNNARKQDEEKPKLRVAAYCRVSTDSDEQATSYEAQVEHYTEYIQKNPDWEFAGIYADDGISGTNTKKREEFNRMIDDCRAGNIDMIITKSISRFARNTLDCLKYIRQLKDMNIPVLFEKESINTMDAKGEVLITIMASLAQQESQSLSQNVKLGLQYRYQQGKVQINHNRFLGYTKDADGNLVIDPEQAETVKRIYREYLEGLSMDKIAAGLERDGILTGAGGKRWHTSTVNKILRNEKYIGDALLQKTYTTDFLNKTRVKNNGLVPQYYVEGDHEAIIPKDIYLQVQEELVRRRVGKTSANGKKRNYSCNHCFSQIVICGECGEMFRRLHWNNRGVKSIVWRCISRLESTGLECHARTINELVLQDAVVKAINQILGDKSNYQAQLQLNIAAVIRASQATAIDSIDEKLMALQQELIQKANSKEDYDEIADEIFRLRELRQKTTVDTAARDEQIKRINDLQDYISQQTALLTEFDEALVRRWVKQITIWDDRITVELKSGVSIDVDA

SEQ ID NO: 27027 - protein, 521 aa, synthetic construct
MKKVTKIDGVQKNTAINNKLRVAAYCRVSTGSDAQLESLEAQKSHYEQYINSREDWQFAGLYFDEGITGTKAEKRPELLRLITDCEARRIDFVITKSISRFSRNTTDCLALVRKLQSLEIPIYFEKENINTGSMESELFLAILSSMAEGESASISENAKWSVKRRFQNGTYKLGYTPYGYDWDGKNMIINPEQADVVKRIFADILSGKSTNAIADQLNAEKVPSKKNANWTSSTIRGILANEKYTGDVIFQKTYTDENFNRHTNYGEVDQYMAPDHHEAIISHSDFDAANALVNQRAAEKGIEKGSDKYQQRYAFSGKIICGECGDTFKRRIHTCNTYKYVAWACNTHLKNKESCHMKYVRDNEIKTAFITMLNKLIYGYRLILTPYLKVLENSSGDEAIQRIQHLEQLIAQNSEQREALTKLMAEGYIDQILYNQETNALLLQAETYRSDIEAITIGMTGDAAKVTETNLLLHFVSHTDMLTAYSEELFENHADHIEVMSRNEIRFVMKCGLTFTERIGD

SEQ ID NO: 27028 - protein, 544 aa, synthetic construct
MARKKNIAAGQNAVIYARYSSHNQREVSIEQQVRECMKHAAELGLHVVGTYEDRAISGKTDKRPNFQRMMRDAEKGKFQAVVAWKSNRIGRNMLQAMVNEAKLEDCGVKVFYAEEDFDDTAAGRFALRNMMNVNQFYSENMAEDITRGLYDNASKCMANGRQPLGYKRGEDGRVVLDEANAAVVREIFTRVAAGDLFVDIARDLNAQGIKTSKGANWNKGSFQSICQNERYRGIYIYGDVRVADGIPRIVSDDLWYRVQEAMRMKKNPVGTRHRVGAEDYLLTGKLRCGHCGSYMTGVSGTSRNGELHYYYTCQKRRTEHACDKKNIRRDVIEPAVAQAIKMYCLTDDVIAWIADRTVEYWEKHDNDLQIEALEQQLEENKKATSNMLKAIEMGIITEATRTRMVELETEQSRLSVQLNVAKEDVVKIDREQIISYLELLQQGDIHDRDFQMELFKNFLVAVYVYDDNRMKLVFSCMGDQNSVEIPLETGEDPPDGGLSPDAKMFVLTPDSSTKKALYFAGSTVLFFLLKPIFGGCIASPASFL

SEQ ID NO: 27029 - protein, 535 aa, synthetic construct
MKKKQPNTRHGRAAIYARYSSHNQREASIEQQVKACRELAVRLGLDVVETYEDKAISGKSDRRPSFQRLLRDAEKGYFDCVLAWKSNRMGRNMLQAMTNEARLKDWGVRTFYAEEDFDDTAAGRFALRNMMNVNQFYSENMAEDITRGMMDNASKCLSNGALPLGYKAGENGRIVLDKAQAAVVQEIYTRVACREPFVDIAADLNRRGIKTKRGGPWTKSSFYTICRNERYRGIYIYDDVRVEGGVPRIVSDGLFYRVQEVLKVKKTPQSARHHTGAEDYLLTGKLFCGKCGRPMTGVSGTSRSGEMHYYYTCQKRRREHACDKKNVIREQIEKSVAQAIKQYMLTDEMIQHMADATMAYNARQEKDLHLQDLQGQLAAVKTSAANLLKAIEMGVITETTKARMVELEQEQGRLNAQIENARAELVPITRDNFVSLLHIYRDGDINDSKYLASLFETFLVRVDLYDDHFLIWFNPLGQKTPADIPITSIENGNVDDFFDECRSKNVFDWGGKWSTKIKAPAVPRRVFLFWCSVSC

SEQ ID NO: 27030 - protein, 503 aa, synthetic construct
MLRAALYARFSSENQREESILAQFRDSTEYCKKHNYAIVAKYADEAKSGTTTIGREQYKLMLKDAQKGKFDVVVFHKIDRNARNELDYYITKHKLEEAGVKYAYSRQDIDSTSPEGQMMESMLVGMAAYYSRNLSNEIKKGLRENAIQGKCTGGRLPYGFSVDADKKLIINEKEAAVVRMIFDLYSTGVHYGVIRKRLFNAGYRNRAGKEFTLASIYEILRNRKYVGDLYLGKTLFRKGKRNTHQVSANVQYFENVIPAIVSRDIFEEVQVKLDQNKRRSGAGKAKAIYALSGLIYCGQCGSAMVAHSTKNSRGIKNYYYRCPKGRLVGDEKCPQKFINRDDIESTVYQLIRKLFTAPDAHDQIKRIIAKNNIGVKVPNYTDQVKRLKKQESDASKRLDKLYDLYMTDREDEFTSAKMAQLKEEILRLRAQIKEAEDRQAIAQSTTFDIDKIIDTFQKQLKQKQSPEFIKTLFELAVKNITVYPDKIKVVLLVTQERFELPTP

SEQ ID NO: 27031 - protein, 519 aa, synthetic construct
MKKVTKIDKIQPAKNAENKLRVAAYCRVSTATDAQLESLEAQKSHYENYINSRDDWCFAGVYYDEGITGTKASKRPEFMRLLADCKAKKIDFVITKSISRFSRNTMDCLEIVRTLLNLNIPVYFEKENINTGSMESELFLSVLSTMAEGESASISSNNKWSIKKRFENGTYRLSSAPYGYKLESGGLQVVPEQADIVKRIFRELLSGKGMYSIAKKLNAEQVPTQKGGRWTSTSVHNILTNEKYTGDCIFQKTYADSNFNRHINNGELNRYLIQNHHEAIISHEDFKAAAALIEQRAAEKGIESGSDKYQKRYAFSEKLICGECGNTFRRRIHKGKYNSYVAWVCNTHLSDTNRCSMLFVRDDALKLAFVTMLNKLIFSYRLLLKPYLAAMQSNTADEALLRIQYLENQLDQNAEQRSTLHKLMAQGYIDQILYTQECNELLLQARDFRSEIEALNNTVAGDTTKVYETERLINYCKRGEMLTDFNESLFELFVDHILIYSRQKIGFVLRCGLTFEEMI

SEQ ID NO: 27032 - protein, 521 aa, synthetic construct
MENVMIIPAKRQVGNTSRRQEDKPKLRVAAYCRVSTDSDEQASSYETQVEHYTEYIKKNPEWEFAGIYADDGISGTNTKKREEFNRMIEACKAGEIDMIITKSISRFARNTLDCLKYIRMLKDKNIPVFFEKESINTMDAKGEVLLTIMASLAQQESQSLSQNVKMGLQFRYQNGQVQVNHNHFLGYTKDREGNLVIDPEQAEVVKRIYREYLEGSSMDKIAKGLEKDGILTGAGKKKWWTSTINKILRNEKYIGDALLQKTYTTDFLNKTRVKNNGIVPQYYVENNHEAIIPKDIFLRVQEELVRRRVVKTSANGKKRSYSCNHCFAQLVICGECGEMFRRIHWNNRGCKSIVWRCLSRLEATGMECHARTVNETVLENVVVQAINTLLGDKSTYQAQLQQNIAKVIREAQKNNTDGIDEQLMELQKELLKKANNKEAYDEIADQIFKLREQRENCTVDTAARDAQIARINDLQDFIKQQSATLEVFDETLVKRWLGQITVWGDHFTVELKSGLKIDIEG

SEQ ID NO: 27033 - protein, 565 aa, synthetic construct
MTCNPIRFDSTEPERLGKDEKIMKSNQQKITALYCRLSQEDELEGESNSIKNQKSMLEKYAADNGFGNCRFYIDDGYSGVSFERPDFKRMIADMEKGEIGTVITKDLSRLGRDYLKTGTYIEIIFPQNDVRYIAVNDGVDSEKGCNEFIGIRNYFNDFFAADTSKKIRAVQRAKAERGERIGSKLPYGYMKSEDNRLVPDPDTAPVVKRIFDMYVNGVGTRTIAMTLERDKIMSPSAYAYYKYGRKENGLKLNNPYLWSDVTLRGMLVNEVYIGTTANYKTTTKSNKLKKQIHNDRKDWLIFENTHEAIIDKSTFEMVQKWFAGRRKPNKSGKTDVFAGLVYCADCKSRMYLRRVLKHPKENNYLCKTYQRYGNNHCTAHRISEQDLHAVILQKLREVTAYVRENPEEFYEIASRNARAEAEREMKTYLREKEAAEQRIAELESIIRCLYEDRVLGRISVERYESLSSGYETEQSELKTKLNEMNAFLDENEKREQLIQDFIENAKKYIDIQELTPEILRAFISRIEVHEKAKWHSTECGNDIVIYFTVERKEQLNVWHKEIKTA

SEQ ID NO: 27034 - protein, 506 aa, synthetic construct
MVVTEIQPTKKNDEKIRLAAYCRVSSDSLDQMNSFAAQIKYYTDYSKVHTEYELVDIYADEGISGTSLKKRDEFKRLIKDCENGKIDCVITKSISRFARNTSDLLTVLRMLKTLGVRVYFEEQALDSDKMNAELLVTLPGLAAQQESINISDNMRWSYRKRMESGDFNTTYPAFGYRISNNELIVNEDEAKTVRTIFALYLQGMGKQAIANTLNENNIPSRKVKWHCCSVDYILNNERYMGDALLQKTYTTESFPFVRKKNRGECAKYYIENSNVAIISKETFNAAKELQRRKSVQHSNASYPLSRVIRCCECGHNYRRIVTNNKVYWGCSYKASLKTDCTTQTLLESDIYSAYLAMMSKLKKHKSEILDNMINQLEYIEDTTNPNQASISAVDKQIADLSTQNLMIARLRTKSILSESEFSKQALEINSKISKLRSKRKLLLSDDSAEETICNLKHLSEIIDKFDYRDGFNEEMFSDTVEQIKAGYDNKLVFTLSGGLELTEIVK

SEQ ID NO: 27035 - protein, 544 aa, synthetic construct
MEQKALQRKVNYIAPTLNTKSESETAYKQIRVAAYCRVSTPMEEQLNSYEVQVKHYTDKINSEPKWSFAGIYADKGISGTSAKKRDEFMKMIRACKRHKIDMIITKSISRFSRNTLDCLKYIRILKELNVDVFFEEQGLHSKDAGAEFYITIYGSIAQSEAENISANVRWGKQQSAKEGKVAFSYNAFLGYKKGSDGKPEIVEDEAKIIREIYDKYLEGDSIRKIADYLNDNQIKTPTGKKVWYYGTVKSILSNEKYKGDALINKTYVIDCISKKVKRNDGERAQYYVENNHPAIISPEKFNRVQEEMARRSSKKKVKQVGTKTELGKYSSKYALSELLICGECHTPYRRCTWTTTDGKKKIVWRCINRLDYGKKYCHHSPSVEESVLQSAIVQAVQNNIGKCSEVLEKLKRHIRMGLSGEETEDKTIDIQIEIARLDKEYADLLNRITSDMKNTEALESQLEEIVLKKHSLQKELQIYENSSSRQANTKTRLDEIFQIIEGIKNHPMEFNNVIIRQIIDGVIVESKEKIKVVFVGGYEVEQEL

SEQ ID NO: 27036 - protein, 469 aa, synthetic construct
MRIAVYARVSTEHEAQINALENQLEWYKIECSRHSDWEIVEVYVDQGITGTQAQKRPEFLRMMEDAQKGKFDLIITREVSRFARNTVDTLSYTRELKARGVDVFFINDGINTATNDGELRLTIMSSMAQDESRKISERVKAGQKISREKHVLYGSGNILGYRRENGTYVPDPDQAETVRLIFQMYSTGENGLVKIVNELYRLGRLDAGGHVSWDASKVSRVLHNATYKGCICYNKSHSDGYLTQKRVKNLDESSYIYVKGDFEPLVSEEMWDRCQQILASKSARVIDENGKKHKYMRNTPKSVWTAKLRCSCGAGFIQFKWRVNRDGAVVHGFQCYRRTRRPSISYLQEHGLDLGISCQIKAICEWKLDLMAAKVFEHLTFDKGKTVKEVYKILNRCMAEEKTVRISRKAMLFSSIARQRERLDKYIDLCADGIITKQELAERRKGLDKVQKSSQGTDGANRSSTEIIF

SEQ ID NO: 27037 - protein, 578 aa, synthetic construct
MRKVSKIEPISPSLPPRKKVAAYARVSMETERLNHSLSAQVSYYSNLIQSNPEWEYAGVYADNAVTGTKSSSREEFQRMLEDCEAGKIDIILTKSISRFARNTVDLLEAVRHLKELGIEVRFEKEHINSLSGDGEVMLTLLASFAQEEVRSLSENVKWGTRKRFEQGIPNGRFLIYGYRWEGDHLVVEPEEAKIVRLIYDNFLKGLSAEATEKQLEEMGVKSMKGMHFPNSSIRAILKNITYTGNLLFQKEYTLDPISKKTRKNHGELPQYFVENTHEAIIPMETYQAVQAEIARRQELGALANWSINTSCFTSKIKCGLCGASFVRNTRKNRAKTSQLGERYTFYGCGTNKRKGAHCFSGTIRENVLKEECAKALGLPEFDEDTFSGRVAKVTIPATGTMVFELTDGTSFEHHWSRNAKKESWTAERRKAVSEYRRSRETGWKCYHTFTHFIKCGRCGANYRCQTHKRVDGTVVRSWYCSSPTAVDCSKVGIREDTLKALIADVMGLPEFDEELFNQQLAYATVPADNEIAFHFRDGHEVSRTFAQKRQMPRHTEERKKHMSEVMKAKWRERHAEND

SEQ ID NO: 27038 - protein, 534 aa, synthetic construct
MKKNPCRSSDLSGQRAVIYARYSTGPNQREESIEGQVRECREVAERHGLHVIHEYIDKKMSGTNDARPDFQRMLRDADRGLFDVVITWKNDRFARNRYDSAIYKQRLKRNGVKIIYAKETIPDGPEGIILESLLEGMAEYYSANLAQNIRRGQRENALEGKFFGGSVPLGYRLDFDKKFLIDKRKAPIVQEIFKRYVDGEAILDICRDLNSRGFRTAQGKKFNRSSLHRILTNEKYIGVYRYKDIKSNSIPRLISDEIFLAAGRRAERNKRSRRTMHEDSVDYLLTGKLICGYCGSSMGGTCGTSRSGERHYYYHCHCKKIKKTKCIKKSERKEILESLVIDTTINSVLKNPDVVNTIIDHCLGLQEKEEKMSPATALRYELKDTEKKIQNILSAIEAGIFTDSTKARLEELEARCADLKCGIASAEIAPPKFSRDQLLFLFEKYQNRDADDPRFIRDIIDTFIHEIYVYNDKILITYNYSDRYTKEDAAVISPRAIEKAATVTVFGFDSSGGDEGNRTPVQKACPISISECSS

SEQ ID NO: 27039 - protein, 464 aa, synthetic construct
MARSVTVIPARSQKVQTGHKAVQEKKIRVAAYCRVSTDQEDQLHSFEAQVEYYTKYINEHENYEMAGIYADEGISGTNTKKREQFKKMIADCEGGKIDLVITKSISRFARNTQDCLAYSRKLKNLGIGIIFEKENINTLDSTGELLFTILSSLAQDESRNISENCKWGIRTKFKNGEMHLNTFKFLGYDKDENGKLVINKEQAKTVRRIYRDFLIGINPAQIAKELTEEKVPGCLGQTKWYPSTVTGILKQEKHMGDALLQKTYTADFLTKRQVRNNGEIAQVYVKDSHKGIIDKQTWNAVQEEFDRRERFMESHGTDRYSYGADCMPFCEKVFCGDCKSLFTRHSWRSRGIVQWQCKNHRKDVKVACTNAYVDNADLEKGFVKAFNRLVTDRDKHMERWQQMKSDGTPLEKIRAGQMMEAVENEPLTRFVPEIAQLVLCEVTVLGAKKYEFFFLEGSRVKVSV

SEQ ID NO: 27040 - protein, 502 aa, synthetic construct
MEIQIREGNSRQKRKLKVCAYCRVSTDADEQENSLENQIRHYEEAITSNPDYEYAGVYSDFAISGFKEKRPGLQKMLADARKGKIDLILTKSVSRFARNTSIVLEATRKLKELNVGVFFELQNINTLSGEGELMLTILAAFAQAESESGSVGAKMVYQRKYEAGIPVQYLERSFGFKKDERGVYIADEEEAVWVRKIYEMAADGYTPASIKRHLNENGVKTVGGAEWIDSTVFRLIENEIYKGDYIMHKHFVNEERKLVRNRGEVDAWYIEDDHEAIVSPELWQKAQDALEAKRDYLAESSVIEEFTEENYPYMNKIFCARCGHPLYKRIYSNGNRLNWGCSGTKRYGKFFCEGINIPDGVLRGAWNFDENMYIGEKPTDKGKKEFTYLKEASWKRRHKKKEPEPIPENTETEYPYREKIFCGLCGSRLVRHVNTKSHKVIWVCNGRKRKGKDFCDGTRVPDTIIKGWGEIKKDIYIQRKDDKNGKKRYSYTSKKPKGADRA

SEQ ID NO: 27041 - protein, 569 aa, synthetic construct
MTEKKKKKHQKCYIYIRVSTSMQVEGYSLEAQRERLNKFADYQGMEVVREYCDAGRSGKNITGRPEFTQMLRDIADDRDGVSYILVFKLSRFGRNAADVLNSLQYIQDYGVNLICVEDGIDSSKDSGKLTITVLSAVAEIERENILVQTMEGRKQKAREGKWNGGLAPFGYRLDKEKGELVVDPKEAEIVKVIFDKFINSDMGADSISNYLNDHGYTKNTSRDFEVSYFTRSHIMKILDNPVYAGKIVYGKSATEKVKGTRDQYRRVKQDDYLVADGRHDAIIDEDTWNKAREKRKETGVKWNKIHDLDHEHLLAGILKCPICGASLAGTVRRKKYPSGKVNSTFYYRCLHRKRIESTGKKCDFKPSLNQIDTDAEIIGVIHDMVNDEQFEAFIRGKLDEKVDVSSFEAEREGLRTQLVQATGAKDKLMQQLDRLDVTDRHYDRKYQDMQDRLDTLYDRIADLEEKIDDVTDKISGAYDENLTSKQLCKVLLQFDEMFEEMTDLERKEFLYTLIERIDLFPERQENGSILKRIRFKFRVDYDAEDGGKVLLNENDVETVVLLSHKTQTA

SEQ ID NO: 27042 - protein, 658 aa, synthetic construct
MKKCYIYTRVSTAAQTEGYSLDAQEESLKAYAEYRELQIAGSYCDAGKSGKNIKGRPAFRQMMTDIKSQKDDISFVLVFKLSRFGRNAADILKSIQLLEDFGIDLVSVEEAIDSSTQGGRLTLAILSAVAEMERENITVQFMAGKIQKMLEGGWTGGAVPYGYKNVNHELVLVPPEAEVIRKIYELYQQENMSASAVAYELNKSNLVRISGKGEQKPFTYEFVSRILDNPFYCGRVYYNRRTNKKDRDGKTIKLDEDNIIMAEGKHEIVVSPEVWDSVHAKRTEIAGRYKKAEDGGHVHLLSGIVKCPICGKGLTGMISRTKNLKGDGYYKPIYYYKCRYNTRQNGKTCPFDQSLNQEIIDGLMMKILQKLQTYREFQDALQAALGDQGNIEKTEKRLQDLRKELREAELTKDRLGEKLDGLNPLGKDYDKKYEETSDKLDSIYDRIDDLETDVIATKKKLEALKQKADSTVQVMTFIENLPLMYEEMSEEERKEMFQAFVDEIELFPEDRADGKIIKSISFKFPMVFDGKPLVKNSKPEDTISFKLDCADIDIDLPDKGNIIMKKQADGSQKVIVRKGTYANIKAYIFEKYNVKVPTLYIVQIKRKYGLEIGKAYNKPEKNKNRVPKCTKEKELLIIEALKFYNLMEQDVEYREDAV

SEQ ID NO: 27043 - protein, 581 aa, synthetic construct
MAYAMKVPAASADDRIVAIYVRVSTGYQVDKDSLPFQKKELKAYCKHILHVDMSRVEIFEDAGRSGKNTKRPAYERMMQKVRAGLVSHVLVYKIDRISRNLVDFSLMYDDFKYNRVTFISLNEQFDTSSAIGEAVLKIILVFAELERKLTSERVKDIMIGRANEGKWNGARVPYGWDWDSSAGWPVHSKKEAPFARAMYEMYLEVKSTGKIRDYNNAHKIPTKRGGEWTSKTVGDFLRNPMNKGDYRYNYRESARGRKKPINEVVYLEGVFDPLIDPEIWEKVNKIMDVNRDKRNMGGLHPVEKNCNVFAGLIQCGSCGSGYLVGKKDKRRKNGFTPSMYYCGAKTRAIHCQNLNVSDVKIGPFVINYISAMVRVSNERRKIKTPEDLEEMLLSDEAVFADIMGLSSDSLNNTFELLTGKSATGGALWRADLVDQEGAAADPAEIENLKDQIRKYERAKERLEDAYYFSDDGMSEKEYLEKKNRFDSGRVAAENKLKELTETHIASGVDESAFMKSASAFLLTHEIRAGSHIVYSDLAGMVEEESIKAFFNLVLDHITVKDRRVTEIVFANGLSHKFIYRD

SEQ ID NO: 27044 - protein, 556 aa, synthetic construct
MNREGKKCVLYPRVSTEMQVDGYSLEGQKNGLKRFADREEMDIVGIYEDAGKSGKSIEGRPAFKKMLSDIKNGLEIDYILVYKLSRFGRNAADILNSLEFVQSYGINLICIEEGIDSSQTSGKLLISVLSAVAEIERENIIEQTMNGRREKARQGGWNGGFAPYGYYLKDNQLLIEETEAEAIRIIFDKFANSDIGLGGVAKYLNLQGIKKIPRQNGTLETWSSHFIRLILDNPVYCGKIAYGRRTREKVKGTKNEYKQVHAEDYILEDGQHEGIISEELWQKVHAKRMTTGIKQPSKIGKDRSHLLTGILKCPLCGSSMYTNKHAWTNKDGTYKEVYYYICGRNKQERGHHCDYKASLRKTDIEPLVIEAVKELVSDKYFAKEIEKRIGVQTDTTAIDKELANYESKLKEVDLNKARLEREIDNLPVDTRFRERKIHDMTLRLDALYDTIVELEERIEDAKLRKSSIEMETITLDNIYKLMLNFGKLYDIISDEEKKSLITYLIKEIQIYPNGESEQPLKSIEFNFPIYRDGQEVRRLLWEKGNTVETVCLLSRK

SEQ ID NO: 27045 - protein, 492 aa, synthetic construct
MNIQEIPTKKVEKPRVCAYVRVSTDSDAQEDSFAFQSNYWQNRFENDESVEYIGLFSDEGIGGAFMKKRDGLKRMFQKVRNGEVDRIYTKSVSRFARNKVELMEVVREFRDLGVEIIFESENIHTLDPKCGLILTVMASLAEEELLSMSQNQKWAARKRFANGSVELARILGYDMVDGKLVINEKEAVIVRRIFELYLQGNSFRTICHILENEGYTPMHGGRWSKSTITGMLRNEKYCGDSIMQKSYSVMKVQKYNYGELPKYYVQDDHEPIVSREDYQKAQEIMMARGNKYRPRGSPTALYPLSGKLICGECGTSFKRKTSAHGTPYMCIKWTCRKKDVYGVKECTSHDIKDEVVTRLLIEAYNESIDANNEVNGVTEQEDVLRKLIANEQELRQLRAKGYISESKFREETDKILIKIKEQETLIKNLQTRDMVKGKYKKSDELTEQMAEFLVKATVKDWTITFEFQNGYKTTKEYTNGRAGNVNGKLCKH

SEQ ID NO: 27046 - protein, 547 aa, synthetic construct
MSSEKDYSVLPEVTIIQESAKIESEEHKPKKLRVCAYARVSTEKEEQEYSFENQRDYYMDYISKRSDWEFVGIYSDFGLSGKNKKRPQFIKMIDDCHAGKIDRIITKSISRFARNTIDCIQTVRDLREKGIGVYFEREGIDSLSPQSALVLSIMAIVAEEESRSISNNIKWAIQKQFAQGHYLIHTKHFLGYSREEDNRIIIIPKQALAVRSIYQLYLDGKSIHQIALEMELREIESPEGNKNWGDSTILSILKNEKYKGDCLLQKTYSPDFLASKRYKNTGQLRSYYVKSHHAPIISSAMFDEVQNEMQRRKDLRTGSKAYPSKYSGKSCLSGLLICGQCGGVMRRHVQYRKGGGIGYWVCQRHDQGSCSMMQIKEKVIIDGLQMVIRQILFQKEPLYTEMTDTIINSARKAHKSSIKSVNAKIKRVQRQIQQIKDDYIEDAITYEEYCHLSRQFIHTEPFLELEREEMIQENKCLAPIEQRIEEISQRLKLQTLYEHFNEDLVRYIVDEIELVTNKLAICRLSNGSEYYMFLDTWAKGTKRIKEE

SEQ ID NO: 27047 - protein, 550 aa, synthetic construct
MKEVCAMPETPAKTVTVIPATITGPQVKRRSGPLRVAAYCRVSTDDKEQLTSYRNQIDFYTQKISSNPEWTMAGIYADEGITGTIARKRKEFNKLMAACRRGRVDLILTKSVSRFARNTLDCLTYVRMLKELGIGVLFEKENINTLKDSNETILTLCSALAQSESESMSGNITWSKRKAFRDGKVTFQYNRTLGYRRGADGKPEIIPEDARVIRRIFCSYLAGGSLGRICKELMEAGIKNSTGGDEWKASTLLYLLQNEKYCGDALLQKTFVSDCISKKVKKNNGELPQVYVKDNHPAIVSRELFNWVQEEIARRRSKPKVSTKTSKTNLGKFSSQYALSELLCCGECGTPYRRVTWTSCDRKRIVWRCISRLESGKKICKSSPTIPEPILHGAILRGMRLLLDNKAELLASIRDALNTALTSSAEGDAPSIQRRIEEKNAAMMKLVQFAVESGATEDYFDAKFAELAAEIAALHAQAEKLEQSDVTRDTLQTRFDEMMKRLESEEPDLETYNDDLVRYYIESITVMSKTQINIRFKMGIEIAEELKYEE

SEQ ID NO: 27048 - protein, 565 aa, synthetic construct
MPEKEKIVALYVRVSTGYQVDKDSLPFQKKELKNYCEHVLHINKNRIEVFEDAGKSGKNTKRPAFERMMEKVKSGQVSHVIVYKIDRISRNLVDFSLMYDDFKYNNVTFISLNEQFDTSSAIGEAILKIILVFAELERKLTSERVTDVMIGRAQNGQWNGARVPYGWDWDEEKQMPVHSKKEAQYGIDMYHRYLNGYSTLRIARYNNEHSIPTKRGGEWSSKTVGDFLRNPINKGDYRYNYRNSARGKKKAKEEVVYIKNVFPPLIDPKIFDEVNRRLDENYKKQNTNYMFPIRKQCNIFSGLIICGKCGAHYQVCRKDERRLDGFRPSNYVCTRKRQKAICDSLNVSEVKIGPFMINYIAAMVDISQKRKKLKDKKELEQLILSHMQFTDLAGIADDSLQETMDLLYGRSTNIWSSSPIEKESQDNENKKNKLKENLQKTDRALERLKKAYLFDDDGMDEKEFLEMKSKLEIDRVKIENEIKDIDNDAIANNVNQIDFIKTASQFLIIHKINSGEFIDYRSLAILDEESMKAFMNSVIDHIVVLNRQITEIVFKNGLSHKLLYR

SEQ ID NO: 27049 - protein, 668 aa, synthetic construct
MAYVRNKKKILKFWSKKKAALYVRVSTRYQVDKDSLPFQRKKLKEYCKFLGIEDFVIFEDDGYSAKNTDRPHFQEMMSRVRDGEFSHLIVWKVDRVSRNLLDFAAMYQELKDHKATFISMNEQFDTSTAIGEAMLKIILIFAELERNMTSERVTGIMLDRAEQGLWNGARMPVGYRWNPEIKFPEPDPEETKIVQFIFDEYERVRSTTKIARYLNHNQIASKRGGQWTSKLIRDIIRSPFYIGTYRYNLRESGRGPLKPESEWIVRENNHPAIITKEQFDRCNAIMDENGTSRDTSELRARKYVHTFSGRLVCGKCGANMIASKDRARANGWRPSMYRCAQRSRMMDCDNSKTVNESYIGPFIFNYAANLARIQKNFKNIKTLEQLEKELLKGPEFENMKVGKESLRRTFDALAFQEVGKGAYLPDIDLSDGDDDYTAAEQLSILKRELDKCKTAIDRLTDLYLYDPDSMTKEEFAKKKRDLVNKIAGYEKQIEASQATGDKDDLADLEFIRKASAFLVAQRIVSKKHVDYIQMALDLDNEILKDFVDQVIDRIEILEGRVQSIRFVNGLVHEFTYSTPADLPVCQKCGGRIGSTCGCRTRTFDFSGKPYRRIKVGDPGDKFQGVSGAVCPECSAQAGRWHHWKCGIERCPICGEQLITCEHGPSGKD

SEQ ID NO: 27050 - protein, 510 aa, synthetic construct
MRDMDSVRLRVACYVRVSTREQAEKGYSVSEQQERLKAYCLAKDWVVAQVITDPGFSGAKLERPGMQQLISLVQTKKCDAVLVWKLDRLSRSQKDTLYLIEDVFLKNGCAFVSMNENFDTSTAFGRAMIGILSVFAQLEREQIRERMAVGRVGRAKAGLFHGGGFAPIGYDYKTIAEGGAGLVVNEYEAMQVREVFSLYLQGWPVNRIRKYMAAHYTTKDGDWGSDTTVRDVLKNPLYTGKINWAKKVYDGQHEPLISQETFDAAAARLATSSWKRICSDGMERDSPFKSTHLLGGIIWCARCGARYFASGNYSGRGENKRYWPYYVCYSRAKSAKHMIRDPNCRNDRWAVAKLDAIIEGEIRKLAFDPAALELAVSGPQQDEDIAQRRAALQQRLNDLRAQMGRVLDLYQMGGSLPASMVGDRVAKLQAEIDGVEAALAEAVEEPPTQRLDAARAALVGAEDVLDNGTLDERRELVHSLIRRIDLDGENIDIHWSFAPEAAEVIPGRSA

SEQ ID NO: 27051 - protein, 485 aa, synthetic construct
MPTSDLKIAAAYIRVSTDDQEEYSPDSQVRLIREYARKNGYLLPEEYVFQDDGISAATARKRPAFNRMIALAKEKERPFDAILVLMFSRFARNREESVLYKGLLRKQGISVISVKEPAVDGPFGTLIESIIEWFDEYYLINLSAEVKRGMSEKFLRGEAMGTAPFGYRIDSANKTFTVDPERAEIVCDVFRSYADGAGLRDIAVQLGDAGITTRRGNRPDSRFVEYMLRNPVYIGKIRWTPGHKTRYSRVHIADGVEVVDGKHPPIVSMDLWEAVQRRMDQRKAAYGKYQRQAPAAWMMRGLVRCSACGATLIMAGRSSSCPFLQCHSYAKGSCHMSHSLSLRRANAAVLAGLRRSVGTLTFHMVPHLTSAPSRAADYGRLLEQERRRLARCKDAYQAGVDTLEEYRDNKARLEERIRRIEEQAASAAAAPESFDKAAYGKKTADILRFLETSADEGAKNEVLRSVVDHITYEKASRHLAIYFYT

SEQ ID NO: 27052 - protein, 400 aa, synthetic construct
MKRRAGFNKMVDDALAGKIDLIIVKSISRFARNTVDALKTIRDLKAKGIRIIFEKENIDTSDTKSEFILTIMSSLAQQESQSISENVKWGIRKSYIEGKVKIPGFFYGYKYCGKYSFQVDKEEAKIVCLIYKMFLERKARNQIGAYLDKNNVPTATGLENAKWSRNVVNSILTNEKYCGDAILQKRYVQDYITKKQVINDGKLTKYYVKNNHEAIIPRVTWELTQEILKSKRYENRQNNLFSLMIKCSNCGGWYQSKTQTRDYFVRTFKFYQCENKLTKTKECKNSCDITQDQLEVLFHDATLELYDVFPEVLDDLCSITEKIIEGKRKQNRLKKAFKEKPNFIISEYEKTSWPVLVDYAEITQNTLTFHFLNKGLITENFVRWKPIEHFERKTKSPPKQ

SEQ ID NO: 27053 - protein, 526 aa, synthetic construct
MGKVRVIPSTINPLTHQSIVANVKRKVAAYARVSTDSDEQYTSYEAQVNYYTGYIQSRVDWEYINVYADEGISGTNTKKRVQFNKMIEDALEGKINLIITKSISRFARNTLDTISYIRKLKTAGVEVFFEKENLWTFDSKSEMVLSMLAAIAQEESRSISENVKIGKRWGFKEGKVSMPYKIFLGYDKVDGKIVINEEQAKVVRLIYRLYAREGYSRAAIADYLNEMKAPKPSNPEGKWSINNITAILTNEKYKGDALLQKGYVDNYLDHTVKKNKGVLPQYYVENSHPAIIDKDEWNMVQEELKKRDKFRYAYSKNNPFSSKLICGCCSHFYGLKVWHSNTQYRKEIMQCNKKYSTKDDKCDTPSVLREDVNKRFIEAYNAIMINKEEVIKSAKELIGLLTDTTKIDKRIEELNGNISDIKTLVENLIHDNALKAQDQDAYIKKYNSMTAQYDILKQQLDEAISERDSREIKSKSMNLFITDIKEAPIMINEFDLTLWNIMLDEAIVNKDGSITFKFKNGMEYKN

SEQ ID NO: 27054 - protein, 446 aa, synthetic construct
MKIVTEIGAIAPIKKLKKVCAYARVSKDKDAMLQSLSSQVSHYNKLISSNPEWQFAGVYADEGISGTKEDRPEFIRMVEDAKAGKIDMIITKSISRFGRNTETVIKTVRMLKAINVDVYFESQKMHTLSEEGEFMLTVLASYYQEEARSVSENMKWRIKKDFEQGIAWGGNDNFGYKLNGRTLEIVPEQAQIVKRIFDMYINGLGVLAIAKALNEEEIESTMGGKWIKSNVLRVITNINYIGDRVLQTTFRPDFLSKKKKRNNGELKQYYVEDDHEPIIDKETFMKAQLIKEERAKRFKLDVSKRKITYPFTQKIRCSCCGSSYQHKTTKYNQYWICTTFNMSGKKFCNDSKQIPEEKLYEAINNYLEIDEFDEDLFNKKIDYIIAKPNNVLEIHLFDGTTDEIKWIDPTRKDSWTPEMKEKARTRSKEIEKSRKRGVNGKWVKSE

SEQ ID NO: 27055 - protein, 514 aa, synthetic construct
MQKRRTKYANSQGDNAVIYARYSSHNQKDTSIEQQIEVCTKYARDNGYRITNIYADRAISGKTDARPQFRLMMQDAREHKFDVVISWKSSRLGRDMLDAMTNDIILRNLGIKCFYTEENFDDTAAGRFALRNMMNVNQFYIENMAEDILRGMRDNAKKCRVNNGSPPLGYRRGADGKYEIVPEEAETVREIFTKVLAGMAFVDIANELNARGIKTKKGAPWGRSSFSRLLSNERYIGTYKWSDIVIENGMPAIIDREVFEMAQKKIKGERPLRRRHNENGDYLLTGKLFCGKCDSPMTGMSGTSKSGAKHHYYACYSARKDGSCDKKAVKRDWVEKTVALFIKEHVLRDEVIEWMVDQYMVYQKATFESQRIMEMRNQLKDVQSQLDNLVDAIARGMYTDSTKDKLLKLEADKKEIEQDIRLATYNLKEYDREHVRCYFLSFKEGSVESKDYLKRLFDQFVTKIYLYDDEIRIAFSGTKDDSPVSFKIIDEAEELAVSSVRLSSASSHQRIIKG

SEQ ID NO: 27056 - protein, 574 aa, synthetic construct
MRKKKIDAPKEKPQRAAIYLRVSTAYQIDRDSLPMQRKDLVGYCEYALNISDYTIFEDAGYSGKNTDRPAFQKMMMQIRNGMYSHLLVWKIDRISRNLLDFAQMYEELKMLGVTFISRNEQFDTSTAMGEAMLKMVLIFAELERKTTAERVTATMISRANDGTWNGGRVPFGYDYNKETQTFSVNGDESFIVLEMYDLYEKTDSLVHTARELNDRGYVSRQHNPFSPVSVWTILRNPWYIGTYRYNYYKIPGRKAIKDESEWVVIPDHHTPLVSKERFDRVQKMLDSNARYRNTPGRSATQKNVNIFSGLIWCACCGAAFTASPGKLHASGYRSAKYGCPNVRKTKTCNAKYTSDTVLGEFLLNFILNVINAQKSFDQIKSPADLEARLLRGDTFKNVAGIDSASVAALYEMLAEYSPADSVLLKKPTVKKNLDPELRKLRADKRKTERALARLDHIYLYSNKQMSDKEYLIKKNDLMNDLKEQDKSIGLLTSESWAQSLSDDDFLEQASSFIMSQRLQEREYIYFQGLAECTEPSVLRSFFLSIVDSVRMRNGHVEMLTFKNGISHKFTYKAI

SEQ ID NO: 27057 - protein, 560 aa, synthetic construct
MYYQSNTAAALQFPYTAMSSEELTALYCRLSRDDELQGDSNSIVNQKKILEKYAREHGYSNFKFYVDDGISGTTFNRPGFQQMIADIEAGLVKRVIIKDMSRFGRDYLQVGMYTEIMFPEHDIHFIAVNDGVDSTQGDNEFTPFRNIINEWYAKDTSKKIRAVMKVKGNAGEHLTVLPPYGYIKSSDDKKQWVKDEEAAQVVYEIGLYIMDGLGPSQIARKLTERKILTPAAYYASKGRTTNVTKKGSPYAWDSSTIADIMDRWREYLGHTVNFKTRKKSYKSKKTLLNSESEWKIFENTHEAIWTEAIADAARLARQTRRRPTKMGEMGMFSGMMFCADCGSIMYQCRATNFRRDQEYYLCSGYRKSRDVCGQTHSIRTVILEELVLQNLREIVSFASQRKDDFVKMVMDADMRQRNRGLAKRQKTLADAEKRITELDTIFKRLYEDTISGKLSDERFQKLSADYEKEQHQLQEVAAVLRGEIEAEEQKSANVERFLSVVERYTEIPELTPCILHEFVEKIVVHAASDPKGKNRTQEIDIYYKGIGALEVSKVTSSRQE

SEQ ID NO: 27058 - protein, 520 aa, synthetic construct
MKRITKIAENASLGKKKIRVAAYCRVSTASEEQLVSLAAQKAHYENYIKSNDNWEFAGLYYDEGISGTKKEKRDGLLAMVAACERGMIDFVITKSISRFARNTTDCLELVRKLLDLNIYIYFEKENINTGSMESELMLSILSGLAESESVSISENEKWGIRRRFQNGTFIISYPPYGYANVDGEMMIVPEQAEIVKQIFADTLAGKSTHEIAKRLNEQGVVTKKGGRWTPGTINGIIGNEKYTGDVLFQKTYTDNSFNRHQNRGEVDQYLMQNHHEAIISREEFERANAVLKQRGREKGNGHDTGRYQNRYGFSGRIYCGECGGKYKRRLHYKPSGQYAAWTCVTHLEDKKSCSQKYITDAALQLAFVTMMNKLVFGQQTVLRPLLQSLRGLNDQSRLLKIEELETAIEKNRDQKQVLTNLMASGYLEPALFNKESNELAAEEDTLRQEKDGLMRSVNGDMVKIEELQRLLRFVSKGTMLTEFDDKTFLSFAERITVLSRKEVVFELKCGLSLRERLVEP

SEQ ID NO: 27059 - protein, 515 aa, synthetic construct
MQRAVIYARYSPGPNQTEQSIEGQVRECTKYAELHDLRIVGTYIDRKISGKTDNRREFQRMIDDSEKHIFDVIILYHTDRFARNRYDSAIYKHKLKENGVELRYATTDIPKGPEGIILESIMEGWAEYYSAELRRKIKRGMRESALKCHSTGAGRCLGYRTAEDKSLVIEPEGAKAVQTVFDMYIKGKSHADICRYLNDCGFRTAQGKLFNKNSVTHIIRNKRYIGVYTYDDITIEDGIPAIISKDTFHLAQLEAARRKTAKRPKEPKAEYLLSGKAFCGHCQKPLVGVSGTGKSGNKWYYYYCQESRAKRGCTKKPVKRDWLEREVVERTVAEVLQPEVIQHIAKKCYDLQMEYRQDNSDVLFYELKLKDVRKAIKNTMHAIESGVKTKTLPARLQELENEEEALEAELAIAKASDFVITTDQIEFLLTQFAEPWECESEEEYHRRIIKCFVHKVFLFDDKLLIYYNVSRDGKTREQSEAELLEEALGEGFDKRSSGSTNKKGRSVWNVLFYWS

SEQ ID NO: 27060 - protein, 561 aa, synthetic construct
MKKTKVYIYTRVSTSMQIDGYSLDAQKERLTKYAEGNDMVIAGEYSDEGKSGKNIAGRVDFQRMLNDIACKKDGVEYVLVFKLSRFGRNAADTLTSLQFMQDYGVNLISVEDGIDSSKEAGKLMVHVLSAVAEIERENILVQTMEGRKQKAREGKWNGGFAPYGYKLVDGELIIEEDEAEAIRIIFDKFVHTNLGYNGVVTYLNNNGIKKKARQNGYLTQFTTSTVKAILDNPVYYGKIAYGRRKTTKIEGTRNEYHVVAQKEFDVYDGRHKAIVDEQLWKDAQAKRRATASKLEKKHDLDHEHVLSGLVKCPVCGAGLYGNVKRAKRKDGTYYKTYFSYACKHRLNKDGHKCDYHKQWSEEKVDNAVSEIIRKLVNNPRFSEVMKTKINTSVDTSEAEKELANAKKVLKQLVGTKDKIILQIDTLDILDKNYDRKYDDLQKRLDTIYDKIGDAEDLVSETEDKLSNIQKDKITGDNIYNYLLMFDSVYDVLSDMEKKQFYNALLTDIQIYEEEQDKQIIKSIGFKFPVFYDGEFTKRIIRDKEKTVETVVLMQYCGKKEK

SEQ ID NO: 27061 - protein, 524 aa, synthetic construct
MAKSVITIPATKSKYTVAPLSAQKKRKVAAYARVSTDHEEQQSSYEAQVDYYTTYIKGRDDWEFVSVYADEGITGCNTKKRDGFNSMVADALAGKIDLIITKSVSRFARNTVDSLTTIRKLKEHGTECYFEKENIWTFDGKGELLLTIMSSLAQEESRSISENCTWGRRKRFADGKVTVPFGRFLGYDRGEDGNLVLNEDEAKIVRRIYGLFLQGRSPYAIAKVLTSEVIPTPGGKKTWSASTVKSILTNEKYKGDALLQKVYTEDFFTKKKIKNDGQVPQYYVENNHPAIIEPAVFDRVQKLMAVRHPGQNRNSSISAFSSKIKCGECGSWYGSKVWHSNDKYRKVIWQCNHKYDGDCKCGTPNIEEKEIKELFIKAMNILISDKETLIEDFETIKDTVFDTSGLLKERAGLQVEMNVVAEQIEKCIAENARVAQNQDDYRKRYDTLAKRFDRTKARLEEVEQAIAEKQAHREMVEQFLSELAGQDAVTEYTDELWYSMIDFVTVYSKDDIRFTFKNGTEIKM

SEQ ID NO: 27062 - protein, 627 aa, synthetic construct
MNVEVIKGNNRVYARRKGGNAKGKLRVAAYCRVSTNDEDQLNSYRSQVTYYTDLIKKKDDWLFAGIYADEGITGTQVTKREEFQRLINDCMNGEVDMVITKSISRFARNTLDTLKYVRMLKERNIAVFFEEENINTLTMDGELLLVVLSSVAQQEVENISANVKKGLKMKMQRGEMVGFQGCLGYDYDPVSKTISVNEEEAEIVRYIFRRYIEGAGGSVISKELRNLGYKTKRGGTAWPESTVIGIIKNEKYKGDLLMGKTFTVDPISKRRLTNFGEEDRYYLADHHEPIVSEEVFEKAQEILHRRSNPRKTDGGKREIFTRKYAFSCLIKCGFCAGTLTRRCWHSGTTHSKVVWQCVEATKGGKKFCPDSKGVEEVQIKKAFVESYKLLCENADGVLEEFLARVEKNLSEDNSLKQLEKAKRDVAALEGKRAKLVDMRLDEVLSKEDFELKYSELSAKIEVAKAELAQCEEAAKIYGNVRERIAVFRKTLEEHAVLEEFDRYVFESIVEKVIVGGYDEEGNKDPELITFIYKSGFKDSLTAHDFRSPRKSYAARKESYHSSEYEGEDVYQKGGGDTCRRYKCVDGVFVKSGAGGIGQKRLVGIIKAGIDYCYEHSLSVKFHGVVEI

SEQ ID NO: 27063 - protein, 542 aa, synthetic construct
MRSKQLQLNSKVGLYMRLSKDDERAGESLSIENQRIILTKYAQERGWTITDEYIDDGYSGTNFDRPEVQRLLEDAKTGKIDTIIVKDLSRFGRNYIFVGQYVDYIFPMYNIRFIAISDNVDTANTNSAGMDMMPIMNVFNEWHSANTSKKIRAVAEANAKAGKYRSTHAPYGYVKGTGDKCLPVIDEPAASVVRRIFEMRASGKTYKEIYTVLNDEKVPIPAVYQFEKFGITNKKPNKNLWADSILRSILKNPMYLGHLVRLRYTTVSYKNKRRVEREPIVFPNAFEPIITQELWEKCRELDESVSHGKHTSWGIMPPLSGLMYCADCGGKMKLGRQDLKPSKAHPEKRSRYHYICGNHSRFGKYYCYNHYIRIEDIEQIVLDDIRSKARLVLEDEDKARTDFLKHKEQMSAAQYKSDSKALTQKTKRYEELERLTQSVYEDKVTGKIPEEICLKLLAKYTEEQNALKSEIDELENKLSVVTKNEMDVDEFIRRLKHYTNVPELTRELCMELIEYITIGAKPGDKTGTREIHIYYKLLGKES

SEQ ID NO: 27064 - protein, 500 aa, synthetic construct
MKAVIYARYSSDNQREESIEGQIRECMEFAERNGIVVFGTYIDRALSAKTDNRPEFQRMIKDSYRKLFDTVLVWKLDRFARNRYDSAYYKNILKKNGVKVISAKENISDGPEGVLLESMLEGWAEYYSVDLSEKIGRGLTENALKGKMNGGGLTFGYRMKDQRLEIDETTASVVVEIFTRYADGERMTDIAKDLTRRGIRTTQGNKITLNVVHYLLKNRRYIGEYKFRDMIIPDTIPPIVSEELFNRVQEIMARNQKAPAMRKAEDDYILTTRLFCGKCGTFMVGESGKSHTGTIHRYYKCSHAKRKMGCDKKPVKKDWIEDAVIHYIMKIVMNDELIDHIADAILNILAQENSKLPQLNARLKEIETGIQNMLNAIQQGILTPSTKERLEALEQEREEIKVAIYSEELQKPKITKEHIAFWISKFRDVDLTDVTSRKRLVESFVNAVFVYDDKVVFTFNYKDGSKTATIDEITAELGSDLDGTTPPNATYTHTLRLCQN

SEQ ID NO: 27065 - protein, 528 aa, synthetic construct
MPTAAAYIRVSSEMQVETGASLPSQLAAIMSYAEKAGYTVPENLVFCDEAVSARSADRPEFQRMISMAKKDKAPFDAIICYENSRFARSREDAIVYKALLRKRGIKLLYTKQEFDDSPMGRLMEGIIEIVDEWYSANLAVETRRGQEQNAKDGYSTGGRPPYGMRRVEVANEHGAVKARWEPDPATAPVVREIYELYTAEGMGYKAIAAKLNREGTPSPSGGSWNANTLHYILHKNRDAYLGRQIYGRMKSHNSEHRRDTDKSKWVVRENAWQPIITEEAAAKAEQKAVKRPTARRVRADEEPRFLLTGKIFCGECGSAMIGSSAKGHLYYRCNKRCATGGTDCSMPYFPAGELEQTVVETIKRELCDKARLKAFYDEYKNAPREDNSDKAKEAAKIEKAIEKRRREKKRVLELLVKGTIEEDDAKPLLQQVARDIQVLEGQLSDLRSTISSSFEFRSFDEFYQIVSETMPLANSAKGLIDAFVLRVDVFNDHLHITLVIEQSIDIKKDAPASDTSVCWVKDGVKEGN

SEQ ID NO: 27066 - protein, 523 aa, synthetic construct
MRFFSYGRKSVFSDKSDSIDNQFRMNREYCESKFSGQVDSWQQFSDEDFTGANTSRPDLQRMLSFIKGGFCDVLVVYQLDRLSRDVRDFANIYALLEEHGVMFISIKENIDTTTPIGRAMMYVTVVFAQMERETIAARVTDNMLGLAKKGYWTGGNPPVGYVRKHIVVNGKKHCSIEVDPDGARYVTQIFDTFLAYNCSLQGMETRFKNQGIRTQSGKFFSTTQLHKMLTMPYCVEATPEVYDFYAAKGCIMDPGSPREMWDGSVGVIIYGRSTEKNKKHQAQPPEKWTVCLGKHKPFMPAEKWLAVQSRFTQNKCIKDAKWPVPLLKGVLRCKCGNLMQVSRKKKVDGTCSSWYYCRKRMRQGVDACDMGQIKCDLLDEKVLELFRGITADPALIQKFVKAEAPADVPDLKAAQARVSACERKIGRLAASLALAEDSAASKYIIAEMERLDVELGALKREASLAEMESHRAAASAKDAKATAAEIAKLIHGLDGFDDKEKNAIARAVVQECTWDGERLFITL

SEQ ID NO: 27067 - protein, 463 aa, synthetic construct
MTTKVERCAIYIRVSTTEQMMHGKSLEAQKEYLTNYAREHNMAVVGVYADEGKTARKELKKRKAIHSLLQDVEAGKIDVIIFWRIDRWFRNLSDFYKVQDILDSHNVRWISTSEPGINMETRDGRLQLNVVLSIGQNEVDTTSERIKFVNEASIRSGKLIFGDVNMGYGYKSGIVDGQKRMIKDPDREHVVDAFYKYFFKHQNKCATLRYIQETYDPDFSFGIMRTLLSSEFYKGTYRGFPYCPAYLTKDEWNKLQKIQKRNVKATPSGRIYLFAGMIRCPVCGQLLCGTGCSSIINRKTGAKRTYCYYRCNRAMIDHICSYRHRLSQNLVENYLLDNLENEYKNYKVKCEKIEKEKEKQKKKQSPEKLRKELDRLNFLFQKGRIEWDYYNEEYSRVESELNNLQKVLPEPAPNYSYLEELLNTDFRTMYDQLSQENRRAFWRSIIQEIHVNEDNAITSVDFL

SEQ ID NO: 27068 - protein, 542 aa, synthetic construct
MKITAPARSARAVSLEAFVDNLNLANVVIYARYSSAGQNDQSIDGQLAKCREYAQQRGYRVVGEYCDRALSGRYAETRPEFQRMISDSAKHAFDFVLVWKLDRFSRDRYDSAIYKKKLRANGVRVLSVTEGVGDSSESVLLEAILEAMAEEYSRQLAQNVRRGMRQNAEKGLSLGGLAPLGYRVVNKQYEINEDEARIVRFIHEQYADGAGQKQIVADCARLGYRNQRGNPLTLASVKRILANERYVGRYDYLGEIVIEDAFPAIVSKDLKKRVRDRLKANAKAPGHAKAKVEYLLHGKLFCGECGAPMIGECGRGRHGATYYYYTCAARKKQHTCKKRNERKDELEASIVDYIGSRILTDSWIDGAAERVVAEYQKSYDASGIKPLEKQIRDADKEIDQLVDALISATAEAARRRINERIETAEARKQALEADLASLRIASRVQIKKEDIVVWLNQFRTGDRSDLEYRKKVIDLFVNSIYLYDDTFKLFLNVTDSTQITYSDSLALAPPSVSDFGASGVPDMHLSEHIIFVNGVIGMIVQR

SEQ ID NO: 27069 - protein, 500 aa, synthetic construct
MANGVIYARYSSNHQREESIEGQLRECKAFAKAQNIDIINTYIDRALSAKTDDRPGFLKMIADSSKQAFDYVIVYQLDRFARNRYDSAFYKMKLKKNGVKVLSAKENITNDPAGIILESVLEGMAEYYSVELAQKVKRGMTENALAARWASGRIPFGYRVDEQKHLIPDPVAGRAVTAIFIRFARGEKIKSIVDYLNSLNYKTSLRNKFNRSSFQRMIVNPVYIGTFRWNDIVLENAVPPLIDQLTFETCQRRIAAKKRDKNAVNRKSDMFLLTTKLKCAECGGNMVGISGTSRNSQKYYYYGCYNTRRHNTACKIGYINRDDLEDAVFEAAMDVLSSDENIDIIAEQAFKISQQQEENPRIKELEMQKKETEKKLANCVKALEAGLFSETLANAIKKNEDELKSINLALAHENLSSASFEITKQHIAFFLSQFRHMEPTKAREAVLNTLLREAVIKKESDSNYLVTVRFNYTATPTLSDTKEVSVRIMNDWWRQAGSNR

SEQ ID NO: 27070 - protein, 528 aa, synthetic construct
MAVAMYLRKSRADREAEARGEGETLARHEKVLRDLASKTGLKIGAIYKELVSGETISARPQMQHLLLEVMQGKWDGVLVMEVERLARGDTRDQGTVSEAFKLSGTKIITPIKIYDPNNPYDEEYFEFSLFMSRREYKAITRRIQTGRLAAFNDGWYIAGTAPYGYKKVKKKGDRGYTLEIVEEEAQVVRMIYQMYTEGILQPDGSFKAAGSFQIRDRLNDLGIPSRTNGKWTAPSILDILHNPTYAGYQRWQWRKEQKSFSGNEIVKSRRKDENCLKVRGRFTPIISMDTYNSAQETRKGKKTAHYGSYNALCNPLSGLVYCQKCHTLMSRQLSNTKDRYAILRCPNSQCSNISSPLYLIEQKVIEGLEEWVQKYELEWPEDMLGNTQETITLLENSIKTLQSKREQIEVQLSNTYDLLEQGIYSLSTFKERRTILEEKKNTLDTELENLQIEQKTLIAQEQARKDFIPSIHRIIDAYWNIEDVEVKNSMLHEVLDHIDYLKTDRTKKGTRDSAYFTLHFYPKIPENR

SEQ ID NO: 27071 - protein, 521 aa, synthetic construct
MARITKIEATKSFIEKKKIRVAAYARVSTRSDEQLLSLETQKEHYDNFISANSEWEYAGLYYDEGVSGTKGEKRDGLLALLKDCEDGKIDRVITKSISRFSRNTADCLEMVRNLARLNIYMYFEKENIDTEHMSSELMLSILSSIAESESRSISQNNKWSIKHRFEEGTFIISYPPYGYENEEGRMVIVPEKAAVVRDIFNMTINGMGTHVIARELNERGVQSRKGTKWHPSTVRGILQNEKYTGDVIFQKTYTDDNYNRHINYGEKNMYLCKNHHEPIISHEIFDKATAVIHQRAKEKSIETGIGKYHHLYAFSGKIICGECGSTFKRRQHYKPSGNYVAWCCNTHIADNDACSMMYIRDEDIKTAFLIMIRKLQTAHAKVLKPFIEGLRGANNKERLHQVLALEEQIEKNVEQTTVLTNLLSSGYIEPEIFHAEKNQLTSEADRLAREKQLISKSINGDLTHLDEAQKLLRFVSKKAEITEFEDEMFLEYVDTMTVHSRDEITFNLKCGLNITERLVVV

SEQ ID NO: 27072 - protein, 673 aa, synthetic construct
MTAVIYARYSSDSQREASIEGQLRDCKDYAEKNGITVVGTYIDRAYSAKTDDRPDFQRMIKDSAKKIFDVVLVWKLDRFARNRFDAVNYKYQLEKNGVHLVSAMEPISQGPEGIMVESMLIGMAEYYSAELALKVARGERENALQCKYNGGVVPLGFTIGKEDRLYHIDPETAPIVQEIFTRYANGEPAEKIAASLNERGLRTRTGKPFVKNSFFQIFRNRRYIGEYRYKDIVTPGGIPAIVDQDLFDRVQQRFEQNRIAHGRPAKEDVSYLLTTKLFCGKCGTLMGGESGTSHMGNTYYYYKCGNAKRHGKAHCDLKAIRKEPLERFVVDTAIKVIFSDEIIERLIDLVMEAQQQENTRLPVLKEQLRDTEKRLANLLEAIEQGILTPTTKQRLDELEARKEALNTSILEEELKKPVLTREWIRFWLEKFRKGDVGSTEHQRQIIDTFVNSVYVFDDRVVLNFNFTDDAKTVTREEVLGSSAVDNAPLVKKNHRLRSVVLFVLLALCGMVWYTRLSSTTRNLEILCMKKKMLCPIVIVIAFLICCIVYFKPLSLSDVAEADNQMKMIYSQIEVENGEAYIDSVNYQDITIDQKNAILSLLDKYTYRRTVGTLFSNGSTSDLGNKTLSIYVYDDDLLINSVFATSSGKVVINEKTYNMEDAERFIEQMIEIMN

SEQ ID NO: 27073 - protein, 653 aa, synthetic construct
MARKKNIAAGLDAVIYARYSSHNQREVSIEQQIAECTKHAAALGLRIVGTYEDRAISGKTDNRPRFQQMMRDAEKGKFQAVVAWKSNRIGRNMLQAMVNEAKLDDYGVKVFYAEEDFDDTAAGRFALRNMMNVNQFYSENMAEDITRGLYDNANKCMANGRQPLGYKRGADGKVMLDEPAAAVVREIFTRVAAGDLFVDIARDLNAKGIKTSKGAAWNKGSFQSICQNERYKGIYIYGDVRIVDGIPRIVSDELWYRVQEAMRMKKNPVGTRHRVGAEDYLLTGKLRCGHCGSYMTGVSGTSRNGELHYYYTCQKRRTEHACNKKNVRRDVIEPAIAQAIKMYCLTDDVIEWMADQTVQYWEKHDNDLQIEALEQQLAENKKATSNMLKAIEMGIITEATRSRMVELETENSKLTAQLSAAKRDVVKINREDLIDELHVLRSKDIQDREVQAELFKDFLVAAYIYDDNRLKLVFSFMGKDNSVEIPLETGEDPPDGEDSPDAKMFVLTPDCSTIQFVLEPDSLRKRVRVRFLFIGGSAEGLLGTVNEQRQGIAMIVVSCLLFCGIKFALCELGRPPYMARLGVIAAYVRTGRACTPLARCKHTRLCSKVCVPRGIAPLESLRSVYARTQENGKISLYRGCSFIGEYGILGLAQ

SEQ ID NO: 27074 - protein, 512 aa, synthetic construct
MERAVIYARYSSDHQREESIDAQVRACREYCQRKGYLVTKIYADEAKSGKSIAKRDQYKKMLADAQKNLFDVVIFHKIDRNSRNELDYYLTKNQLISSGIKYEYAAQNIDTSPAGQMVEGILVAVAANYSRNLAEETKKGLKENALKALFNGGRPPLGFEINQENKYIINDYEAGAIRIIFDLYLKGKGYHYIISQLNSLGYKTREGRKFGKNSLYDILRNPKYCGTYTFNKVNKDPSGKRNSHKISENAIIVEDAIPAIISKEDFRKVQEKMSRNKHRTAAYRSKETYLLTGKAFCGICGAAMTGHRASARGKKYVYYTCAARDRLGISACENKVVPRDELEQVVLDTLKEELLSNNFQKNLNHYILEEFHTLASEVSNEADSLAEQKAIAERKLNNLYSIIEQGTADEYDLQRLADVKRELTSIKEKLSKCAAAHSLSDINPRAIERTIKLCRNMLLKNASAETLTLIFDDMVEKIVIGAKKITLQFKLECFDTYGAEGRTRTGTWGNHA

SEQ ID NO: 27075 - protein, 464 aa, synthetic construct
MARSVTVIPARSQKVRTGHKAVQEKKIRVAAYCRVSTDQEDQLHSFEAQVEYYTKYINEHENYEMAGIYADEGISGTNTKKREQFKKMIADCEKGKIDLVITKSISRFARNTQDCLAYSRKLKNLGIGIIFEKENINTLDSTGELLFTILSSLAQDESRNISENCKWGIRTKFKNGEMHLNTFKFLGYDKDENGKLVINKEQAKTVRRIYRDFLIGINPAQIAKELTEEKVPGCLGQTKWYPSTVIGILKQEKHMGDALLQKTYTADFLTKRQVKNNGEIAQVYVKDSHKGIIDKQTWNAVQEEFDRREKFMQRHGTDRYSYGADCMPFCEKVFCGECKSLFTRHSWKSRGIIQWQCKNHRKDGKVVCTNAYVDNADLEKGFVKAFNKLVTDREKYMEIWQQMKSDGTPLEKIRAGQMMEAVGNEPLTRFVPEIAQLVLCEVTVLGAKKYEFFFLEGSRVKVSV

SEQ ID NO: 27076 - protein, 502 aa, synthetic construct
MEIQIREGSREQKRKLKVCAYCRVSTDADEQENSLENQVRHYETVIKANPDYEYAGVYSDFAISGFKEKRPGLQKMLADAEKGKIDLILTKSVSRFARNTSIVLEATRKLKELNVGVFFELQNINTLSGEGELMLTILAAFAQAESESGSTGAKMVYQRKYEAGIPVQYLERSFGYTKDERGVFVADEAEAVWVRKIYEMAAEGYTPASIKRYLNENGIKTVGGVQWVDSTVFRLLENEIYKGDYIMHKHFVNEERKLVRNRGEVDAWYIEDDHEAIVSPELWQKAQDALAAKRDYLAEGSVIEEFTEENYPYMNKIYCAKCGYPLYKRIYSKGNRLNWGCSGTKRYGKTFCDGINIPDGVLRSAWHFKENTYIAEKASDKGVKEFTYLKEQSWKRRHKKKQPPAIPENTEAEYPYREKIFCALCGSRLVRYVNPQSHKVTWVCSRRKRKGKDACDGTRVPDTIIKGWGEIKKDIYIQRKDDKNGKKRYSYTSKKPEGADRA

SEQ ID NO: 27077 - protein, 700 aa, synthetic construct
MDSNAFLNDLMSKMKLPEAKGKKKAEQSESVAQILAAMQKVRAEKKKPPVTSYAPVKEMPVNEPESMEDFSQLASDVMQECRPAMPTVPAASQEKAVRVAAYIRVSSTNPAQEDSYEMQERYFMSLLAGNAGWTSAGIYSDHGISATSREGRTGFNRLLRHCKQGKIDRVICKSISRFARNTQDFLVALRTLKENNVTILFEREAMDTADAYSEFILTTLAAIAQEESRSISANIAWSNQKRFPAGNVCNKDIYGYEFRKGEYTVNENGYRYRAVFIIPEEAEIVRMVFRLFTKEELGFTQIAQKLDAMHIQPPNSGCRQRQKRKPTVLPAGTLKEEDKRGWTATDVRYMIANVRYCGSVLCQKTYTDHRNGRKQKVNKGEKPKYLIRNHHPAIISEELWQEAQEVWKVYTAKYRGIEKGRNERNYSKLLLCGECGRYFQGHSTTRTTIWRCATKLAQQGQKRCRMEPVYEEQIQALLRKAFAEKFKLGEKMDAEVHEVMQMISKAPIDNVRNQALRNLSEKLREIHDFDQMEQEGDFLKRQLSAVNYSIRDAHQHIRDIQAEKEALKVRSEVLGEPIEKEAVTELEDRLLNEEEQLEKLEHEAQQQAEQVRYMEDYWKKLEQTYEIREKTLQWLDSLAGGTQMFLDEAVGTYVKAFVLSVTIFSPKHFRIHWFDDTCTDVECDSVFEGYQQPGMIRRKY

SEQ ID NO: 27078 - protein, 543 aa, synthetic construct
MDVKKIPKKTVTLIEPKRSILVDKEKYHQKRVAAYCRVSTDSEEQLTSYVNQKKFYTDMIARNTEWQFAGLYADEGISGTRADKRPEFNNMIKACLAGKIDYVITKSVSRFARNTVDCLDYVRMLRARGIGIFFEEQNIDTLKSDSELYLVIYAGFAQSESESISKNITWSYRKNFEDGKPIFMYKKLLGYRKGEDGEPEIVPQEAEIVERIYTMYLSGMTVDVISSQLQSEHIVIPGKKFSFGKNMVMNILKNEKYCGDCILQKTVTVDCISKTRKKNEGEAPMYIVENSHPAIISREMFNRAQEELSKRKARSPQSQKTAITASGKYSKYALTDVLICAECGSRYKRVTWTSLGQKRIVWRCVNRLDNGKKYCQHSPTLSEPALQEAIVRALNKFNDEDTSTYLTLMKATIGEAISANGGSDEIDLLERRIDALNSRMLKMVSDSVERGADMEENEDEFKTISEQIEQLNRRIEAIRKSEGSDEDRQERLSLIQATIDQREANRDTYDDAIVRQMIECVKVHEGGKLTIIFGGGYEIEEQI

SEQ ID NO: 27079 - protein, 513 aa, synthetic construct
MAQAKLISPVSRQAYERTKVAAYCRVSSNSADQLNSYATQIRAYTKLIKSNDSWELVEIFADEGLSGMKAENRVEFQRMIEMCEHKQIDLIITKSVSRFARNVKEALEYVRKLKLLGIGVQFEKEGIYTLALGDEMLLNTFSAIAQEESKAISQNQRLSIVKRMERGEYVDSNAPYGFRLQDKKLEAFDREADVVRYIFQQYLSGWSTSEIARDLTEKGIQTKLGKEQWRSTKISYILSNERYVGDCRYQKTYRDTTVPFKQSKNRGQEDMFYASETHDPIIDRESFEKVQVLLQDRKERFSKSEQLNIYPLTSRIRCSECGSVFRRKVRNGAIKWVCARHSADTHACPSGYYSEERIYDGFITMANKLRFGEERILDQVIAKLETAAALYKRNNISAGKMSQSIAELNAKLVMLEQLRSKGYLAIEVYQSQTRDIQKQISNLKSERRSAFESTIQTMLDEVLKMRSLLNEIEEPLEEFDDKLFHELVKGIEINKQDEMTVTFLGGLKFTELI

SEQ ID NO: 27080 - protein, 464 aa, synthetic construct
MARSVTVIPARSQKVQTGHKAVQEKKIRVAAYCRVSTDQEDQLHSFEAQVEYYTKYINEHENYEMAGIYADEGISGTNTKKREQFKKMIADCEGGKIDLVITKSISRFARNTQDCLAYSRKLKNLGIGIIFEKENINTLDSTGELLFTILSSLAQDESRNISENCKWGIRTKFKNGEMHLNTFKFLGYDKDENGKLVINKEQAKTVRRIYRDFLIGINPAQIAKELTEEKVPGCLGQTKWYPSTVTGILKQEKHMGDALLQKTYTADFLTKRQVRNNGEIAQVYVKDSHKGIIDKQTWNAVQEEFDRRERFMESHGTDRYSYGADCMPFCEKVFCGDCKSLFTRHSWRSRGIVQWQCKNHRKDGKVACTNAYVDNADLEKGFVKAFNRLVTDMDKHMERWQQMKSDGTPLEKIRAGQMMEAVENEPLTRFVPEIAQLVLCEVTVLGAKKYEFFFLEGSRVKVSV

SEQ ID NO: 27081 - protein, 700 aa, synthetic construct
MDSNAFLNDLMSKMKLPEAKGKKKAEQSESVAQILAAMQKVRAEKKKPPVTSYAPVKEMPVNEPESMENFSQLASDVMQECRPAMPTVPAASQEKAVRVAAYIRVSSTNPAQEDSYEMQERYFMSLLAGNAGWTSAGIYSDHGISATSREGRTGFNRLLRHCKQGKIDRVICKSISRFARNTQDFLVALRTLKENNVTILFEREAMDTADAYSEFILTTLAAIAQEESRSISANIAWSNQKRFPAGNVCNKDIYGYEFRKGEYTVNENGYRYRAVFIIPEEAEIVRMVFRFFTKEELSFTQIAQKLDALHIPPPNSGCRQRQKRKPTVLPAGALKEEDKRGWTATDVRYMIANVRYCGSVLCQKTYTDHRNGHKQKVNKGEKPKYLIRNHHPAIISEELWQEAQEVWKAYTAKYRGIEKGRNERNYSKLLLCGECGRYFQGHSTTRTTIWRCATKLAQQGQKRCRMEPIYEEQIQTLLCKAFAEKFKLGEKMDAEVHEVMQMISKAPIDNARNQALKNLTEKLREIHDFDHMEQEGDFLKRQLSAVNYNIRDVHQHIRDIQAEKEALKVRCEVLGEPRDKEAVTELENRLLNEEEQLEKLEHEAQQQAEQVRYMEDYWKKLEQTHEIREKTLQWLDSLAGGTQMFLDEAVGTYVKAFVLSVTIFSPKHFRIHWFDDTCTEVECDSVFEGYQQPGMIRRKY

SEQ ID NO: 27082 - protein, 500 aa, synthetic construct
MRMCGYARVSTDEERQLDSLEHQMEFFSDFAKQNGHHLVNVYTDEGITGRQLKKRDAFNKMLSDSKLGLFDLLVVKDVSRFARNTVDLLTSIRQLKSRGIDVIFVNNSQKVLGESEFIITLLGAVAQEESSNLSKRVKFGKNITSKKGRVPPRIFGYDRIDNFTMEINEREAEVVREIYHLYIDEGLGCRLIAITLAEKQMKTKFGNDWNQRNIRRILENPIYSGHYINHRYTVVDFLEGTTKALPKEQYYHHDRPEWAIITPERFQQAQEILEQRRKQYATEYTHFTGRYSNRHLFSTLIRCKECGRAFSRRVTHYPNSDYIYWRCPTNNQYTAKRCSNNTIVREDDLIETLSTYLREVVSNKESIAQEIARKFKEANAVEGSKPDAQTLEAKKVKLKAKLEKYMEMYANDVITMEALKSKTAEINESINVIDDQLILLEGQRIQERTIESITNEAMTEIERFLSLQSATNMDLRRIIDSIIVDDKKQVKINLKITGNL

SEQ ID NO: 27083 - protein, 537 aa, synthetic construct
MVMKRGATLQEQEDGVIYARYSSHSQKDASIEQQIKECLAYAKSQGIRIVATYSDRAITGKTDRRADFQRMMRDAEKGKFRYVIAWKSNRMGRNMLQAMMNEAKLNDLGIRVLYTEEDFDDTAAGRFALRSMMNVNQFYSENMAEDIKRGLYDNASKCKIANGGLPLGYKKGEDMRYALDPPKDEIVREIFGRVACGEPFVDIAADLNARGIKTSRGGQWGKNSFHALLTNERYTGVYIYGDIRIEGGVPQIVDKGLFLRVQEVLKTKKNPQGRHRTNGEYLLTGKLFCGHCKSPMVGISGTGKSGKLHYYYICQKKRMEKSCDKATVRRDTIEREVARAIRDYIMRDDVLEWLADSAMNFAREYREQTCVGTLEAQLADNKRATKNLLTAIEQGIITPTTKERLLELEREQAILVSRLAEEQASLLDYSRDDIISAMSLYRNGDVENKSYQAKLFDAFLVAAYLYDDHFKLEFNITGKKNLVDVPLDASLVDSIESNAPAGCSYKVSFGPPRKTLKPQWFQGFFLSMANCTKLFSC

SEQ ID NO: 27084 - protein, 575 aa, synthetic construct
MNKIIDTLNTQKAAIYIRVSTHHQIDKDSLPLQREDLINYAKYALNIDNYEIFEDAGYSAKNTERPSYQYMMSKLRTGEFSHLLVWKIDRISRNLLDFATMYEELKTLGVTFVSKNEQFDTSSAIGEAMLKIILVFAELERNMTSERVSAVMLSRATNGQWNGGRVPYGYNYDKSTKQFSIHPIEGNHIKKLYDLYLETQSMLAVAKYFNEHGIKTKTGNNWSPTTIGKILASRFYLGEYQYNLHKDSIGGAGVASLKPEDEWITVKDHHPAIVSIEQWDKCAEIRAYNHRRSNAPKRYRRKNTHIFAGLIICGECGSTYQATIDRARTGGYRPSIYLCSRRKQYSDCQNKYMSDITLGPFILNYISNIIKANANMGKTTTPDMFKKKLLRGDVFKDVKDIAPSGLNEMYNMIVSKKFNSDPFTSAVNRDESQPDFASERELLISEKRKYLRALDRLKTLYLYNDNAMAEKDYIIENKNILDNLKRVDERLEEIEKNSSQNFTITDSEFIEKASYFIISQELSNQRYINFNSLIQHIDTNVLKNFIQSVIKKIVVLDGRIISIQFKNGIEHDFLY

SEQ ID NO: 27085 - protein, 516 aa, synthetic construct
MARKKKVSPGNRLVAYYRYSGGSQQTEQSIEGQRRDCEAYARQHGLTIVHEYIDRHISGRGVEFRLAFQQMIADSSKHLFDLVICWKTDRFARNRYDSAVYKKKLRDNGVRILYAAESSVEGPEGIILEGLMESLAEYYSAELAQKMRRGMRESALKGRAINPSRPLGLTTDEHKRFIIDEKNAPTIRFIFEHYAAGESSASIVEQLNAAGLRTSKGNAFNKCSIPRIIQNEAYHGVYICKAYDVRIDGAIPAIIDDDLWKRAQKMLTLNKQHRAPHSSHADYLLSGKLFCGCCHSLMRGISGHNCRNDVYYYYACGNKADGGTCKKKNIQKDVAENLVVNAICENILRPDTLEDLADAIAAAQQADVNQPDPERAMLEQGLADVRRKINNIIESIENGTASSRLSARLADLEQQESTLNYQLESLKEIHPPVLDRERILFLLEQFLISPNERTEDYNRRIIDTFVNRIDITDTEMLIYFNLSEASASEKQKNSQPNSCSTGNHLVRVARIELTAS

SEQ ID NO: 27086 - protein, 519 aa, synthetic construct
MKKVTKIAETASSKVKLKKIRVAAYCRVSTDSDAQLESLEAQKTHYENYITSRDDWEFAGLYYDEGITGTKKDKRPELLRLIDDCKAGKVDFVITKSISRFSRNTTDCLELVRKLLALHIPIYFEKENINTGSMESELFLAILSSMAEGESVSISENNKWSIQKRFESGTYKVSYPPYGYDWDGEQMIINPEQAAVVKEIFAALLSGKGTHAIADDLNRRGIPTKRNGRWTATTIRGMLSNEKYVGDCLFQKTYSDSRFVRHNNHGEQTQYMVKDHHEAIISREDFEAAHAFIHQRATEKGVVKGSDKYQNRYTFSGKIICGECGDTFKRRIHSCTGYKYTAWCCSTHIKDKDKCHMLFVKDDDLKQAFITMMNKLVYAHRIILKPYVDALKNTSSDDSLRRIQEIQTLLAQNTEKRETLTKLMTQGIIDPILFNKETNELLSQADSFRDEINALKNAVSGDVTKVTAATVLLHFTEKGGILQKFDDDLFKEYVNRIVVRSRNEVCFELKCGLTLRERM

SEQ ID NO: 27087 - protein, 543 aa, synthetic construct
MPTAAAYIRVSSEMQVETGASLPSQLAAIMSYAEKAGYTVPEDLIFCDEAVSARSADRPEFQRMVSMAKKDKTPFDAIICYENSRFARSREDAIVYKALLRKRGIKLLFTKQEFDDSPMGRLMEGIIEIVDEWYSANLAVETRRGQEQNARDGYSTGGRPPYGLRRVEVANEHGAVKARWEPDPATAPVVREIYELYTAEGMGYKAIAAKLNREGTPSPSGGSWNANTLHYILHKNRDAYLGRQIYGRMKSHNSEHRRDTDKSKWVVRENAWQPIITEETAAKAEQKAVKRPTARRVRADEEPRFLLTGKIFCGECGSAMIGSSAKGHLYYRCNKRCATGGTDCSMPYFPAGELEQTVVETIKRELCDKARLKAFYDEYKNAPRADDTDKAKEAAKIEKAIEKRRREKKRVLDLLVKGTIEEDDAKPLLQQAARDIQVLEGQLSDLRSTISSSFEFRSFDEFYQIVSETMPLANSAKGLIDAFVLRVDVFNGHLHITLVIEQSIDIKKDAPSSDTSTNCWVKVGVKEATTNYRLSLSIALYRH

SEQ ID NO: 27088 - protein, 610 aa, synthetic construct
MARKKNIAAGLDAVIYARYSSHNQREVSIEQQIAECTKHAAALGLRIVGTYEDRAISGKTDNRPRFQQMMRDAEKGKFQAVVAWKSNRIGRNMLQAMVNEAKLDDYGVKVFYAEEDFDDTAAGRFALRNMMNVNQFYSENMAEDITRGLYDNANKCMANGRQPLGYKRGADGKVMLDEPAAAVVREIFTRVAAGDLFVDIARDLNAKGIKTSKGATWNKGSFQSICQNERYKGIYIYGNVRIVDGIPRIVSDELWYKVQEAMRMKKNPVGTRHRVGAEDYLLTGKLRCGHCGSYMTGVSGTSRNGELHYYYTCQKRRTEHACNKKNVRRDVIEPAIAQAIKMYCLTDDVIEWVANRTVEYWEKHDNDLHIEALEQQLEENKKATSNMLKAIEMGIITDATRSRMIELETEQSKLAVQLNAAKADVVKIDRDDLIDELQIFRDMDVNNRSVQAELFKDFLVAAYIYDDNRLKLVFSFMGKDNSVEIPLETGEDPPDGGDSLDAKMFVLTPDCSTKKKSTAQECAVLFCCVCPAMQLLNSCWTFAESYGIILSAIAGIVHRLVYQPSKLRRWVRFPLPAPKDLNLERSGSFLFVLHWAVILQTGGGNATIEP

SEQ ID NO: 27089 - protein, 573 aa, synthetic construct
MAYNAQNKTGARVAIYVRVSTLHQIDRDSLPMQKQDLLAYAKLMLNTDDCVIFEDAGYSGKNTDRPKFQEMMSQMRAGAFTHLLVWKIDRISRNLLDFATMYNELKALGVTFVSKNEQFDTSTAMGEAMLKIILVFAELERNMTSERVTATMISRANNGLWNGGRIPYGYDYDYETHEFSVNEEESKVVILMHDMYEQERSLVRVVRELNERGYRSRAGNLWSPVSLLIILRNVFYCGDYRYNMLKEGDRQKVKDESEWVTVENHHVAIIPKDQKERIMATLDSNSKLCKQRNIYKSSKHTHVFGGLIYCGSCGKPLGSTPGNLTRDGWHYSKYTCPTRRKSVTLCTGKSTSDPIIGEFVFNYILNMLNAQNDFDKIGSPEELEKLLLIGDTFAYIDHIESNGLNDLFNVLSSGTVKGAVFGKGASLPTKKATVEPEVARLRNEKQKTERALDRLRSLYLYADEAMSEAEYMIQKNKLEETLEDINDQIGMMNTDSWQQSVSDEEFIQRASEFIIAQKLSGRKYVNYKRLAMSVDSEVLKNFVVSIIDSITIQDGLVSNIVFKNGLCHTFIFR

SEQ ID NO: 27090 - protein, 572 aa, synthetic construct
MASRIAEKLAAKKAAIYIRVSTHWQVDKDSLKVQRRELIAYVTLVLGITDYVVFEDPGYSAKNTDRPEYQAMMDRIRTGEFTHLVVWKIDRISRNLIDFAAMHDELQSLGVTFVSKNEQFDTSSAIGEAMMRIILIFAELERKTTAERVTAVMLSRASDGQWNGGRVPFGYSWSKEAKTFSIVPEEAKAIRRMAELYEQYQSLLYVAKYLNDAGIVTKTGGQWTPTTVRTILTNPWYIGQYVYNVHSDGKGIEKRDSDEWITVENHHEPILNEDVFCRMKFLLTRNKRGGVPSHKTYVRKNIHVFAGLLRCGQCGSNMTANLDRRRANGFRPSQYACGSRRRKGTSCTNKYISDTTLGPFVLNYVANIIRASKNSSEATTPEVLERKLLRGEAFEDVASVSTDALGQLLDAFRSAGDAVEYRPQIAFSGDDNSIREIDTLRARRRKLDNALARLNALYLYDDEAMPEKDFVMQRGQITKQLEEVNARIEELQNQESSEELGDGFIGKASYYIMANKLIEDRYIDYEKYIRAIDPSIPHSFLQQIIDHIVVNDGRVTSITFKNGATHTFTYQT

SEQ ID NO: 27091 - protein, 464 aa, synthetic construct
MARSVTVIPARSQKVRTGYKAVQEKKIRVAAYCRVSTDQEDQLHSFEAQVEYYTKYINEHENYEMAGIYADEGISGTNTKKREQFKKMITDCEGGKIDLVITKSISRFARNTQDCLAYSRKLKNLGIGIIFEKESINTLDSTGELLFTILSSLAQDESRNISENCKWGIRTKFKNGEMHLNTFKFLGYDKDENGKLVINKEQAKTVRRIYRDFLIGINPAQIAKELTEEKVPGCLGQTKWYPSTVTGILKQEKHMGDALLQKTYTADFLTKRQVRNNGEIAQVYVKDSHKGIIDKQTWNAVQEEFDRREKFMELHGTDRYSYGADCMPFCEKVFCGECKSLFTRHSWRSRGIVQWQCKNHRKDGKVACTNAYVDNADLEKGFVKAFNRLVTDRDKHMERWQQMKSDGTPLEKIRAGQMMEAVGNEPLTRFVPEIAQLVLCEVTVLGAKKYEFFFLEGSRVKVSV

SEQ ID NO: 27092 - protein, 549 aa, synthetic construct
MNNTGVQVRTKTVTKIAANPALSKRNDPNRILRVAAYCRVSTDDEDQLNSYRTQKSYYTELIKKNPKWRFAGIYADEGITGTMVKKRDDFLRMIEDCEKGKIDLILIKSVSRYARNIVDCISYVRKLKALGIGIYFEEQNINSLTEDSEVYIGIYGVMAQSESENISANVKWGINKRMQNGTYACRFTLLGYRRNKDTKEIYIVPEEAETVKQIFQMYLQGRSLDQIKRHLEENNILTVRGNPVWDKGVIKSMLTNEKYVGDIMFQKTYREDCISKRTKINRGEMDRYLVTDNHPAIIDRETFRMAKKEMVKRSSKRRTSSNAVTELGKYSGKYALSELLFCDICGSPFRRKTWTRKGVKRVYWRCLNHVENGDKACPQSRGIEESVLHEAICRGMSKCIPETGDVKNLVRTMLAYATSEDQGLLECQTLENAIRELQEKANEAEEMCIRTEGNKEPYMEQIQKYYASIAELRARIIEKKKQLEKSDEFQTEMQQIDRWLENEDILFAEYDDDIVRYLIESIRVTDDLKLIINVKGGASVTEELYQRED

SEQ ID NO: 27093 - protein, 516 aa, synthetic construct
MSYCIYLRKSRKDLEAEQHGEGETLARHERALLSLAKKNNLIISNIYREVVSGETIAARPVMQQLLHEVEQNLWDGVLVMEVERLARGDTIDQGVVQRAFQYSNTLIITPSKTYDPANEFDEEYFEFGLFMSRREYKTIKRRMQNGRYAAISEGKWPYNSAPYGFRRTKLEKEKGWTLAFDENEAPVVRLIFSMFTGPERVGIRSITRTLNSYGTKPRNSKLWSESTVRGILSNVVYDQCVKIGERKVVRTVENGILTTTRPRTSDYTIVSGRHPRLIDHDVFAEAQSYLGCGFPKPAGSNIIKNPLAGIIVCSECKKKMIRRPPSGTASRVPYDLMLCSTYDCPTIGSPLDLVEREVYNALSDWVEGYRLSGQTPSKSLIPEKEVLLESAQQTLDQLLRQKGTMYDLLEQGVYSTEVFLERSASLQSRISEAQSNVAQLKLELDKERQREANIEQFLPACEDLLSCYWDLSIPERNRLLKLLIESIEYKKLTKNKRGHLNEPNFELTIKPRIPRK

SEQ ID NO: 27094 - protein, 525 aa, synthetic construct
MPTVKVIPATRDFHTGIEKTTTRKKRVGAYARVSTDSDDQLSSYEAQCDYYTRYIKSRPDWEFVGLYADEGISGTNTKHRDRFNAMIADALNGKIDLIITKSVSRFARNTVDSLTTVRKLKEKGVEVYFEKENIYTLDSKGELLITIMSSLAQEESRSISENVTWGKRKLFADGKVTLPYSSFVGYRKGANGLPEIEPEGAKIVRRIYTEFLNGRTARQIADGLSADGIPTPRRAKKWRCTTIISILTNEKYKGAALLQKSFTVDFLTKKMKPNEGEVPQYYIENSHPAIIDPVEFDLVQAEMQRRRKLGKIYSGNSIFASKIICGDCGEFYGEKVWHSNDRYRKTIFRCNHKYNNEKGKCQTPVISEQQIKETFVVAYNALMADKAGVIADCRALQHMLTDTTAMEQEIADLSKLLGDSTAELRQHVEGNMRSAMNQEQFWKRYNTLEEQCNCLSDRLAKLQSSVKERKQRADVIGGFMFEIKERDGIIDEFDEELWTALLESVTITRDGKWQFKFKNERVIEV

SEQ ID NO: 27095 - protein, 447 aa, synthetic construct
MREIQLVTPNNRPILVRKRVCAYARVSTAKDAMLHSLSSQVSYYQKYIQAHKDWEFCGVYADEGLTGTKESRAQFQEMLKECRYGNIDIILTKSISRFARNTVDLLNTVRELKSLGIAVYFEEQNLNTLSSDGELMLTILASYAQEESLSASENMKWSIRKGFEHGELCCFRFMYGYRIERGSVTVCEEEAAIVQEVFDRFAKGESMLAIAKNLNARGISTHSKRQMRWSGKRIGKMLTNEKYTGNALLQKTYINNHLEKKRMVNRGELPKYYAEQTHPAIIDAQTYRLVQERIERNRGRHTVKIGYLKSAFTGKMFCGYCGEPVWRGKNNGRTIWGCRNARGKGVLTCHAASIRNDILEETCCSLFGLSTFDPTFIEQNVRKIILYDNRLVFSMADGREEKISWKNKSRSQSWTPEMKEHARQRTMERLQNRRINDADSKGNTSDS

SEQ ID NO: 27096 - protein, 415 aa, synthetic construct
MQPKAVRAAAYARVSSGKDAMLHSLSAQISHYSEMIQKHSGWLYVGVYSDEARTGTREDRPGFQRLLQDCKAGKIDLVIVKSISRFARNTVTLLETVRELRQCGVDVFFEEQGIHTMSSEGELMLTVLASYAQEESLSVSENQKWRVRKNFEEGKPWNSTMLGYRNINGTLTVVPEEAAIVRHIFDLYISGCGIPSIVKRLNAEGCRTRYDKSFNRSGVFAILRNYAYTGNLMLQKTFRENHITKRTLVNNGELPMYHARNTHEAIIDIEVFQQAQEIMEERAARYAPTVKKSRTVYPFTSLITCAGCGKHYRRKVTKTGPVWICPTFNDKGKTACPSKQIPEAALIALTEEMDMSRIAEITADNGNRLIFRFEDGQILEKRWADRSRSESWTEEMRKKAGEQTKARHEKCRKEM

SEQ ID NO: 27097 - protein, 529 aa, synthetic construct
MQERNVTVIPATRTALHRLADPTAKKRRVAGYARVSTEKDEQYTSYEAQVDYYTQFIKRHADWEFVKVYTDEGISGLGTRKRDGFNEMISDALAGSIDLIITKSVSRFARNTVDSLVTIRKLKEKGVEVYFEKENIYSLDGKGELLLTIMSSLAQEESRSISENVTWGQRKRFSDGKVSLPYKQFLGYERGQKKDDPPVVNPDQAVIVRRIYRTFMQGKTACTIAKELTEDGIPTPAGKKEWRASTVKSILQNEKYRGSALLQKCFTTDFLTKKQKVNEGEVPQYYIEHSHEAIIAPLEWDAVQEEIKRRKRIGKAYSGKSVFGAKLICGDCGGWYGPKTLHSTDKYRTTVWRCNCKYKDTKRRCSTPALSEAEIRDRFTAAFNRIITSKEPYISACVTAKTVLTDTSAIDAEMAELLREMEVVAELTRKCIEENSSVAQDQNEYTARYNGYVDRYEKAKTRYDSLAAERREKQEKAKAIDRFIHTVESREGLLCEFDPCLWLATVENATVMSNGRMRFHFFDGTEIIE

SEQ ID NO: 27098 - protein, 510 aa, synthetic construct
MSYFIYARKSRKDAELEALGIDVLERHITTLLELAKTLSLPIGAIYREVVSGDSIDARPVMTQVLSEVEACMWDGALVMDVDRLARGDTIDQGRVQRAFFYSGTRIVTPNKTYDPANEYDNEYFEFSLFMSRREYATIKRRMQRGRERSSSDGYYVGNVAPYGWERIIAPDGKHYSLTPSQTEAPVLDLMYDLCGNKQYGYQKACTYMSNMGILARSGKPFSPSTLKGIISNPANIGKVRWGYRKTVRAVKDGRVVKSRPNATDYILADAAWEPRISADLFKRANQPKGCFSSPVRNDRPIQNLFAGLVRCSQCGRLMVRKKAQTKTPYDVLICQYTECSTVGIRIDELEEALLEWLKDYIVKYEFTDTHEEDAAAIAAKEMIVTNFETEHQTLLKQRESLFDFLEQGIYTKEIFIERSNALEQRIRDCMNNIATAQEDLHTTIARQANRKNFVPKCKNLLSEWDSLTISEKNSALRQLIDRIVLTKTKRNKKNQKNSEFTIDVYPKVPK

SEQ ID NO: 27099 - protein, 456 aa, synthetic construct
MRNKEIASALVRVALYIRVSGEEQKIKGLSLEAQQERLEAYARERGWVIVGIYIDAAKTARKNIHKRTEFQRMMDSVKRDEVDILLFARLDRWFRSVADYYKVMEILQAHNCDWKTTDEEYDTTTANGRLYINVKLSIAQNEADIDGERIDVVFDSKIAHGTVVSGSAPFGFRVNEEKRLEVVPEDAAIVQDAFNYFENTVSQRATVRYVRETYGVNWCDATFRRMLKEKLYTGVYDRGGRYNDQFCPAIINRQQFDRVQALLTRNVRSAPSGKVYIFTSILTCAECGHKLVGYKSSDYYYYRCNQHFQRGRCSHNHSAREDVVEQWLFEHLGEELERCQLEWDVEAAKKKASVARTDKAALKRKLTKLKELYVNDLIDIEDYKKDYQIYVSALNQIPEPAQEAPPDFAAVRRLLDNSFRTIYDTLTREEKRTLWRSVIKEIRIDNDQNITGVVFG

SEQ ID NO: 27100 - protein, 523 aa, synthetic construct
MAKVTTIPATISRFTATPINERKKRRTAAYARVSTDSEEQLTSYSAQVDYYTNYIKSRDDWEFVSVYTDEGITGTNTKHREGFKRMVADALAGKIDLIVTKSVSRFARNTVDSLTTVRQLKEKGVEIYFEKENIWTLDSKGELLITIMSSLAQEESRSISENCTWGQRKRFADGKVTVPFKRFLGYDRGPDGNLVLNKDEAVIIHRIYSMFLQGMTPHGIAARLTADGIKSPGGKDKWNAGAVRSILTNEKYKGDALLQKSYTVDFLTKKKKVNEGEIPQYYVEGNHEAIIQPEVFELVQQELKRRKQGRGPHSGVHLFSGKIRCGQCGEWYGSKVWHSNSKYRRVIWQCNHKYDGEEKCSTPHLTEDEIKAMFISAANKLIGKKTAIISPLRASLDIAFDTSALEAETEKLQEELMVASDLIQKCIYENAHVALDQREYQKRYDSLTARFDIAKARLEEIETAIADKKSRRAAIESFLGTLAQADLMGKFDPVLWCGLVDHVTVYSKDDVLFTFKNGQEIRA

SEQ ID NO: 27101 - protein, 588 aa, synthetic construct
MRIVNKIEAKTPQMPRRKRVAAYARVSMESERLQHSLSAQVSFYSSLIQSNPAWEYVGVYADNGITGTKAEAREEFNRMIADCEAGKIDIILTKSISRFARNTVDLLNTVRRLKELGVSVQFEKERIDSLTEDGELMLTLLASFAQEEIRSLSDNVKWGTRKRFEKGIPNGRFQIYGYRWEGDHLVVHEEEAKIVRLIYDNYMNGLSAETTEKQLAEMGVKSYKGQHFGNTSIRQILGNITYTGNLLFQKEYVMDPISKKSKINRGELPQYFVENTHEAIIPMEVYQAVQTEKARRRELGALANWSINTSCFTSKIKCGRCGKSYQRSNRKGRKDPNANYTIWICGTRRKTGNTHCQNKDIPEQMLKEACAAVLGLDTFDEIIFSEQIDRIEIPAPNEMIFYFKDGHIVPHRWESTMRKNCWTDERRAAKGRYVQEHQLGPNSSCFTSRIRCDSCGENYRRQRSRHKDGSFDSVWRCASGGKCNSPSIKEEVLKNLCADAMGLESFDETAFREQIACIHIVAPFQLSIRFFDGHTFEAAWENKRKMPKHTEQRKQHMREVMIQKWREKCGESNDYTGDDKPVHGNADQ

SEQ ID NO: 27102 - protein, 615 aa, synthetic construct
MNEYNKITALYSRLSVGDEDRDGGESNSIVNQKAFLERYAQQQRLTNIRHYIDDDESGRFFDRSAYSRMMEDVENGKIGVCIMKDLTRWGRDYLQVGNAMEVFRRNNVRFIAVNNGIDSDNPDTLEFAPFINIMSEWYAKDISKKVKTGIRTKGASGKPIATEAPYGYMKDPNNKDFWIIDEEAAEVVRLIFRLFIGGKNRNQIAVYLKNEQILTPTFYLKQHDRGTAKSRPLNEENRYKWNKATLTKILTRQEYCGDVVNFKTTKHFRDKRNHYVDKSEWQITENVHEPIIDRADFETVQRILENAPVRRPNGDGEIHPLSGLMFCKDCGAKMHIRIDYRNGGKRHVAFCSEYHKGKAKNPKCNSPHIIDADLVMQTIADVLKKVAEYSISNREEFEALVRKNLDMQQTDKSKKQQKRIPQITTRLEQIDKVLNKLYEDNALGAIPQDRYEQMSQKYSEEYYTLKAELAELKEQLSAFEDAGGWAHKFLKLIERYAAFTDLTPAILNEFISRIEVHERDKKRAKQAVQHIGIYFSYIGKFENELTQLAEPTEEEIRQMREKIEEAQKEKSRAYHRNYSKEYRAKNLEKRREYERIKAREYRAKRKAQAAALPVS

SEQ ID NO: 27103 - protein, 433 aa, synthetic construct
MPRAITIVPKPPKLEQKKRVAAYARVSSGKDAMLHSLSAQVSYYSDLIQNHDDWLYVGVYADEAKTGTKESRADFQRLIADCRAGKIDMVITKSISRFARNTVTLLQTVRDFKAWGVDIFFEEQNIYTMSGDGELMMTILASYAQEESRSASENQKWRIKRNFEEGMPWNGAMLGYRLKSGRYEIIPEEADIVHRIYDEYLSGDGYLTIAKRLNEDGIPSRFGKQWGQSVISKILSNYTYTGNLILQKTFRENHITKKTIINNGELPKYHAENAHDAIIDMKTFQAVQAEKTRRAARFLKKPASKKAYPFTSLLVCDGCGKNYRRKVTKTGSVLVCGTFNSIGKAACASKQIPEETLQAVTAEVLGQVDFSEELLRRLIKSILVCNGNVLIFHFFDGSEVTRKWKDRSRSQSWTVEMKAVARQKALERRNQNA

SEQ ID NO: 27104 - protein, 463 aa, synthetic construct
MTTKVERCAIYIRVSTTEQMMHGKSLEAQKEYLTNYAKEHNMAVVGIYADEGKTARKELKKRKAIHSLLQDVEAGKIDVIIFWRIDRWFRNLSDFYKVQDILDSHNVRWISTSEPGINMETRDGRLQLNVVLSIGQNEVDTTSERIKFVNEASIRNGKLIFGDVNMGYGYKSGIVDGQKRMVKDPDREHVVDAFYKYFFKHQNKCATLRYIQETYDPDFSFGIMRTLLSSEFYKGTYRGFPYCPAYLTEDEWNKLQKIQKRNVKATPSGRIYLFAGMIRCPVCGQLLCGTGCSSIINRKTGAKRTYCYYRCNRAMIDHICSYRHRLSQNLVENYLLDNLENEYKNYKVKCEKIEKEKEKQKKKQSPEKLRKELDRLNFLFQKGRIDWDYYNEEYGRIESELNDLQSALPEPVTNYGYLEELLDTDFRTMYDQLSQENRRVFWRSIIQEIHVNEDHAITSVDFL

SEQ ID NO: 27105 - protein, 586 aa, synthetic construct
MKAILLVRVSTDRQEFDEQERIIYNQAIKDGYNDCDIIPIREKESAIKLTEEERKGLNRMKEAIESDKEINCVYAWEISRIARKKKVLFSILDYLITRKIQLKIKEPFITLLNSDGTVNEASETTFTLFAQMAESEMRNKTARFSRSKTASKSKGKYIGGFYPFGYCVDEEGYFQIKEDEAEEVRFIFNSYVTARHSVKTITAEARLKGFRINKSYQVRNILTNNSYAGLNEGGVKYPQIISKEMFRLSREIAQKNNTNIGLKTKNFYLCAGLIKCHLCGYRYSGIKGTHQYTCRGKLSPDTYNLPHKCSAPSISINLLDAIVWEFTKKVESFNPSDLISEVARIEREIEELNKQIENCNHLLELNEKNRAKNNKMYKIDAISDSEYETENNKIKAERKNIENDIKTINEKIKGLNDLKAYRTSYETVKGNLDNITDLPTRREIIRNNIEYIKIYNADISQHKIIRIKCKRYDYESFFIASATSHKSYAQQYNHHTKFNEETKMIDVYIDNEYKCSYSWYQAMAENALYSRTLVFNKELHYKDNYNPVKAKEQREKNKEKRNARARELYKVRQEELKKSQQTEQPD

SEQ ID NO: 27106 - protein, 464 aa, synthetic construct
MARSVTVIPARSQKVRTGHKAVQEKKIRVAAYCRVSTDQEDQLHSFEAQVEYYTKYINEHENYEMAGIYADEGISGTNTKKREQFKKMIADCEGGKIDLVITKSISRFARNTQDCLAYSRKLKNLGIGIIFEKENINTLDSTGELLFTILSSLAQDESRNISENCKWGIRTKFKNGEMHLNTFKFLGYDKDENGKLVINKEQAKTVRRIYRDFLIGINPAQIAKELTEEKVPGCLGQTKWYPSTVIGILKQEKHMGDALLQKTYTADFLTKRQVRNNGEIAQVYVKDSHKGIIDKQTWNAVQEEFDRRERFMEAHGTDRYSYGADCMPFCEKVFCGECRSLFTRHSWRSRGIVQWQCKNHRKDGKVACTNAYVDNADLEKGFVKAFNRLVTDRDKHMERWQQMKSDGTPLEKIRAGQMMEAVGNEPLTRFVPEIAQLVLCEVTVLGAKKYEFFFLEGSRVKVSV

SEQ ID NO: 27107 - protein, 502 aa, synthetic construct
MEIQIREGNSRQKQKPKVCAYCRVSTDADEQENSLENQIRHYKEVITSNPDYEYAGVYSDFAISGFKEKRPGLQKMLADARKGKIDLILTKSVSRFARNTAIVLEATRKLKELNVGVFFELQNINTLSGEGELMLTILAAFAQAESESGSVGAKMVYQRKYEAGIPVQYLERSFGFKKDERGVYIADEEEAVWVRKIYDMAAQGYTLAAIKRYLNENNVKTVGGAEWLDSTVLRILENEIYKGDYIMHKHFVNEERKLVRNRGEVDAWYIEDDHEAIVSPELWQKAQDALEAKRDYLAEGSVIEEFTEENYPYMNRIYCARCGHPLYRRIYSNGNRLNWGCSGTKRYGRSFCEGINIPDGVLRGAWHFDENMYIGEKQTDKGKKEFTYLKEASWKRRHKKKEPEPIPENTETEYPYREKIFCGSCGSRLVRHVNTKNHKVIWVCNGRKRKGKDFCDGTRVPDTIIKGWGEIKKDIYIQRKDDKNGKKRYSYTSKKPKGADRA

SEQ ID NO: 27108 - protein, 573 aa, synthetic construct
MAYNAQNKTGARVAIYVRVSTLHQIDRDSLPMQKQDLLAYAKLMLNTDDCVIFEDAGYSGKNTDRPKFQEMMSQMRAGAFTHLLVWKIDRISRNLLDFATMYNELKALGVTFVSKNEQFDTSTAMGEAMLKIILVFAELERNMTSERVTATMISRANNGLWNGGRIPYGYDYDYETHEFSVNEEESKVVILMHDMYEQERSLVRVVRELNERGYRSRAGNLWSPVSLLIILRNVFYCGDYRYNMLKEGDRQKVKDESEWVTVENHHVAIIPKDQKERIMATLDSNSKLCKQRNIYKSSKHTHVFGGLIYCGSCGKPLGSTPGNLTRDGWHYSKYTCPTRRKSVTLCTGKSTSDPIIGEFVFNYILNMLNAQNDFDKISSPEELEKLLLIGDTFAYIDHIEPNGLNDLFNVLSSGTVKGAVFGKGASLPTKKATVEPEVARLRNEKQKTERALDRLRNLYLYADEAMSEAEYMIQKNKLEETLEDINDQIGMMNTDSWQQSVSDEEFIQRASEFIIAQKLSGRKYVNYKRLAMSVDSEVLKNFVVSIIDSITIQDGLVSNIVFKNGLCHTFIFR

SEQ ID NO: 27109 - protein, 525 aa, synthetic construct
MPSAFSYVRFSSGKQAKGSSEHRQRAMLGQWLGQHPSFTLSDLRFEDLGRSGFSGEHLDHGLGQLLAAIDSGAIKSGDVILVEAVDRIGRLEPLEMLPLFSRIVKAGVSVITLEDGHVYDRSSVNETSLFLLVAKIQQAHEYSNRLSRRINASYTARREKAKAGLGIKRETPVWLTTDGQLVPHVAPHIAQAFQDYADGLGERRICRKLRESGLEEFSKTNATTVRRWLKNRTAIGYWNDIPDVYPHVVDPALFYRVQQRLDAPKVDRAKPSAHYLTGLVKCAVCGRNYNYKQRKHTDPAMLCTSRARLAGEGCTNSKTFPVIVLDQVRKLTSLPFLQHAMESASSQADPSSQRLAVIDGEIGELSRKIGEATKALLALGFTPEIQESLEQLKTAREALEEERATLLLPQAEKLTAAQLEAFSNGLLDDEPMKLNHVLQTAGYFMVVHPDGSIDVDGKRFVYEGANRKKKVYKLRLLGEDRQWEPPILSPEQAASLARSVAGAYLPPNSSEEIARYYEKVKHLVR

SEQ ID NO: 27110 - protein, 558 aa, synthetic construct
MKGKIALYSRVSTSEQSEHGYSIHEQEQVLIKEVVKNFPGYDYETYTDSGISGKNIEGRPAMKRLLQDVKDNKIEMVLSWKLNRISRSMRDVFNIIHEFKEHDVGYKSISENIDTSNASGEVLVTMFGLIGSIERQTLISNVKLSMNAKARSGEAITGRVLGYKLSLNPLTQKNDLVIDENEAHIVREIFDLYLNHNKGFKAITTILNQKGYRTINQKPFSVFGVKYILNNPVYKGYVRFNNHQNWAVQRRSGKSDKNDVILVKGKHEAIISEEVFDQVHEKLASKSFKPGRPIGGDFYLRGLIKCPECGNNMVCRRTYYKTKKSKERTIKRYYICSLFNRSGSSACHSNAINAEVVERVINVHLNRILSQPNVIKQIASSVIEELKQKHSKQTEIKYDIDSLEKQKAKVKTQQERLLELFLDDEMDSEMLKAKQSEMNQQLEVLDQQIKEAKQANQSQDDIPNFDKLKARLILMITRFSVYLRKATPEAKNQLMKMLIDSIEITTDKQVKLVRYKIDESLIPQSLKKDWGSFFMPKFQFEIYGQNDYFIDQITTFTT

SEQ ID NO: 27111 - protein, 507 aa, synthetic construct
MKRAISYIRFSSEKQSRGDSLRRQSKMVTDWLKAHPEYYLDQDLSFRDLGVSGFTGKHLKSGLGDFLTAIEKGLVKAGDTLLIESLDRLSRQNVDRASELLRNILRSGVDVVTLSDGEHYTRESLKDPLALIKSILIMQRAHEESLRKAERIQAAWDAKKEAAKAGIKISRRCPAWLKLNDDRKSFSVIPEKVETVKRCFQLRLEGKSIWEIVRTLNAEGHQTLNQYKAGKFGQTSVQDLLKNRSVIGYFTPKGCEEISGYYPAIIDETTFYKVQQLSHYRYGRKPVSDKPLSVNLFKGVIRCSECGHALIITGFSDTRNGIYRCPLRNENRCSAKGLSRKQTDGTLLTLLSRLDRFDSDMTNTLDTLKLHREHISSNIEKLVQLSLEIEDLSAITIKLKQLKGELSQVDADIEKETQRLKSIDVGCLSDCDLTTKAGRIEAQLIIKSAVKEVVLNTAKRRCKVTFHNGRAITLPITEDPSEDVTEAIQSLSEVTERGLIDVDEVII

SEQ ID NO: 27112 - protein, 526 aa, synthetic construct
MEITAAFYGRFSTDRQRETSIADQERVCDVRASAIGFRIVVRHTDEGVSGSTPVAARPGGKQLLADALAGRFEVLLVEGLDRLSRDMVEQERVIRRLEHRGIRIVGVLDGYDSDSSARKLHRGMRGLINEVYLDDLRAKTHRGLAGQVSRGMHAGGLSFGYRSVPVEGGNRLEVNQEQAGWVRWIFEKYANHGWSVQRIAHELNNLKVPALRGGTWSVSVVYGHPQRGSGILNNTLYIGRYIWNRSQWMKDPDTGKRVRIDRPVEEWITQDLPELQIVSDEAWERAKERMTRTRAEGGPGRAPITRTLMSGVLKCGVCGGPIIAMNKSMYGCSIRKDRGRAVCIGVSANRDKVDERLLGIVRDEILTPEAIDELEQEVRRLMSAQRRESVQAQADAQRRIEASQAEIDRLIDAIAQVGISPALASRLQAAESELAVLQAPSQERQQPELKMRSMANIVARYRTMLENLDEILATDLDRAKELLREILGRPVMEKDAEGHVWVTLDKEKASMLSHEADSAFGCGGRI

SEQ ID NO: 27113 - protein, 507 aa, synthetic construct
MKRAISYIRFSSEKQSRGDSLRRQSKMVTDWLKAHPEYYLDQDLSFRDLGVSGFTGKHLKGGLGDFLTAIEKGLVKAGDTLLIESLDRLSRQNVDRASELLRNILRSGVDVVTLSDGEHYTRESLKDPLALIKSILIMQRAHEESLRKAERIQAAWDAKKEAAKAGIKISRRCPAWLKLNDDRKSFSVIPEKVETVKRCFQLRLEGKSIWEIVRTLNDEGHQTLNQYKAGKFGQTSVQDLLKNRSVIGYFTPKGCEEIAGYFPPIIPETDFYKVQQLSYSRYGRKPASDKPLSVNLFKGVIRCSECGHALIITGFSDTRSGIYRCPSRNENRCNAKGLSRKQTDGTLLALLSRIDRFDSDMTNTIDTLKLHREHISSNIEKLVQLSLEIEDLSAITSKLKQLKGELSQVDADIEKETQRLKSIDVGCLSDCDLTTKAGRIEAQLIIKSAVKEVVLNTAKRRCKVTFHNGKVIDLPITEDPSEDVTEAIQSLSEVTERGLIDVDEVII

SEQ ID NO: 27114 - protein, 605 aa, synthetic construct
MMIQSIDADSKNVKPLVQVTIYCRVSSLMQTDGYGLQRQQDAIRAYLEDFDVPKELGYEIDRDNYVLLEDAGKSAYHGYHFSKGQLGQFRQKVLDGEITCGLFIIENVDRFCRMEEYLAIQEFTNLINNGIDILEVDTGEIFSRKVRKSLNKLTVSIERAYAESERKSRISTRSWKNRKRKSLEEGIAINNNTPDWLSLSEDKQSYIVNKERVEILNEIFKMYAEGFGGTAIVNKLNKEKRYYNKTSWSTNKFYHLLRNRRLIGYLGDERHYPAVIDSILFEQVQSLLNGNVRKGKKAGTMMRSIFNGIAKCGFCGNGMICQTMTSSASYLRCIAERSKTTKCTHAKLIRYKESEQIILEHLCNINWDELKKGNSTHRDDIDVLKTQMSIITDKLQKLDLLIQETEDDDDKISLINIKNKNRKELAAIDEKISALTTNLEIPDLEVIASLKEIQDLENVELRQKVYSLLSKTVSSIECTRTDTPDPFYIFNINYIGAREKHLLIVELKNNCKVTRFVEKISDDLVTYYTPSFVVAYSNNWESGLPEIRGLQDCNGITIKAELMDCMHLFSILDRTSRGEAKVIRDWLVIPKVQEFFFHTSAYEGD

SEQ ID NO: 27115 - protein, 453 aa, synthetic construct
MTKNAILYTRCSTKKQVASFSLEHQTNLLINYINDNALNKFGLYTDSGISGKSMNNRRGIMKLIDAIKKDSNNIDYLITESFDRLSRSKKDLVDIFDLCERMGVTIISVLTPIHNLNYPQRKMMATMYAIFSEMKIDTTSEAVKKSFEQQFNSKGLISSKLPFGYYLDKDANIVIEENAKKLVCHIFHLYLAGYGYRSILNKLYMSGKTNFTIQRIKNILTNTRYKGVMVTNYGTRDDVFPVIIPMNEFNKVQMKIASKSTKILKNKFNNDGFFHKIICPICGNYLGVNAVKSSKKTYFYYYCSTGRNKPTNDKNHHNFSLKMNQFKSLLVDYIKSFLDSRVFKNKLINLLSNFIKDDLAVINSKYNNQKRKIVNQYKINKINQKELKSELKTIGKKDSYFDDIRLKLNKFYELGINGFLKDLVSQVTIDKGKYIFRMYENSVVIGKGVMNND

SEQ ID NO: 27116 - protein, 420 aa, synthetic construct
MIKTKMVLGYCRISTDNQKNGFSILAQKNKIHSYCSMKKLNLNNILVDEAFSGGNMNRPSINKIINLVKSDKVSHLICFDTSRISRNLSNMSNFMDLLHEHQVKFHSVSEGFDYDTVSGKFMGNIASAYNQFELDNITQKSIIGSNNRASNGYSNSGFILGYDSFTDLNGKKNLKISKSEAQIVKMIFQQFVSDKSMLSIAKFLNMRGYRTKAGNKFSAVSIRDILNNSTYIGHTKYGKYKNYKKLGKAGLNVENMIDVPGKHHPIISNDVWNAAQKIIKNKYGGKNSSHPLYNILRCPKCNSGMKISYTNNKGKSIRYYSCKRGSKNGCSANSIRANLAEDLVARTLINHMLYPSIRKKIVKKFNEYKEMENKEVSNIINNKTEVINNLKSQLNRLKEAEKDEFLAEAIQPEIDSIEEE

SEQ ID NO: 27117 - protein, 536 aa, synthetic construct
MNVKHAVGYIRVSTSSQAIDGYSLEAQKNKIQNYCKTNNLILDKIYSDEGISGSSIAKRPGIQELIYDAKQKMFDTVVVWKNSRIARNTRDLLSMVDVFQKHGISFASVSEKIDLDSAQGRFMFTIMGTVSELERNNIAENVYLGMYKRAQDGYATVGRVLGYKPGIDNNGKKQLQIDNDEAVIIKIIFNKFISGSGFRSIANYLNKNQYHTKLGNAFSSGAVKDIIDNPLYVGMVRYSRYRNWNKKRRNGINDSNMIMIQGNHNPIISKDIWKKAVIRRNVTTIQPAWNNQGTNLLTGILKCPQCGSPMAASNTTNTLKDGTKKRIRYYSCSQFRNKGSEVCHANSIQSSKAEKLVMDKFNFVIKNKFVLNKINQDNGESQIKNRNKRIIQNKQSQIDKNNQLIYKYKQVGSTDSFLSSTLQPRILELEAENKQLNNNIKIINSKNNKISLTSKDIGKIKLLFKDVVCCNNRKTIKSVYKLMINAIVLNNHKDQIIMKIKINNEHLQLIKQELKRANSYNDELALSFDNTIQFSI

SEQ ID NO: 27118 - protein, 492 aa, synthetic construct
MKQQARRALVVIRLSRVTDATTSPARQLEACLELCKQRGYEVIGTAEDLDISAGKTSPFDRPELGDWLTNRRGEFDVLVTFRMDRIVRRLLDLADLIRWCQENSVSLVSATETFLDLDSAFGDIVALLVAKVAEMELTAISERNRSAAQHNMREGKYRGGPPPWGYRAEKIDGDWRFVQDDQQVGVINEVVRRVLDGEPLRQVAADLTNRAVLTPRDRAYQLKGKEIQGYSWHSAKLREMLASKSLLGHAVTANGSIRNDDGSPIIRATPILARDVFERVQVELAGRENRKEPTKRSTSLLLRVIYCGVCGKPAYKLKGGKGRQDRYRCASAQYKTTCGNRTVIVGDAEEILTDAVMSVLGGKYRRDKVWDTGNDHAAELAEIDETLSDLTDQLGTGSFRKGTRQRERLDARIAELARRQAELAVQASKPAGWVWVPTDELFGDWWKSQTVEQLNLWLRSMDIQMSWNHQGIQTDMLHLEKMAEQWDKRPPA

SEQ ID NO: 27119 - protein, 452 aa, synthetic construct
MKAAIYIRVSTQEQIENYSIQAQTEKLTALCRSKDWDVYDIFIDGGYSGSNMNRPALNEMLSKLHEIDAVVVYRLDRLSRSQRDTITLIEEYFLKNNVEFVSLSETLDTSSPFGRAMIGILSVFAQLERETIRDRMVMGKIKRIEAGLPLTTAKGRTFGYDVIDTKLYINEEEAKQLRLIYDIFEEEQSITFLQKRLKKLGFKVRTYNRYNNWLTNDLYCGYVSYKDKVHVKGIHEPIISEEQFYRVQEIFSRMGKNPNMNKESASLLNNLVVCSKCGLGFVHRRKDTVSRGKKYHYRYYSCKTYKHTHELEKCGNKIWRADKLEELIIDRVNNYSFASRNVDKEDELDSLNEKLKTEHTKKKRLFDLYISGSYEVSELDAMMSDIDAQINYYEAQIEANEELKKNKKIQENLADLATVDFDSLEFREKQLYLKSLINKIYIDGEQVTIEWL

SEQ ID NO: 27120 - protein, 560 aa, synthetic construct
MTKLYSYIRFSSMRQGEGSSYERQIKMAKEIADRYGLELVNDYQDLGVSAFKGANSKTGALSRFLDEIGRSIPVGSWLFIENLDRLSRQDIISAQELFLSIIRRGITIVTGMDNKIYSIETVTANPMDLMFSILLFIRGNEESQTKRNRTNSSALLKIKAHQQNPQSPAVAIEEIGKNMWWTDTTSGYVLPHPVYFPILQKIVKMKQEGHSTGSVLDYLNEHHTPPAPTSNKQHRKWSIAMVSRLFKTKALIGVKEVTVDGVQYELKDYYPRVLSDSEYYFLKNNLIKKAWSFGHAQEKTIPLLSGIGLLKCAHCGSPMVKRKAANGKVEQYRYTCDGEGSGRTDCLYPNWGFRASSLEGAVLQLLADKVWIAEDKANPIPEIQVQIDEISRKIDNLINLSAMTGATKELANQITDLNTQREALHEEIRLFEREMYSVDSQGWEKLAQFDLSDVQNEERLQIRLKIKGALRSIECARVDRNKNLFVLVYLDGLRQRIVIENNRGIRKGQIFVDLKTINDRQILESAGMVLHDHIDILIDEKAFYDGLPKEEDGPLSKFGI

SEQ ID NO: 27121 - protein, 558 aa, synthetic construct
MTKLYSYIRFSSMRQSEGSSYERQIRMAKEIADRHGLELVNDYQDLGVSAFKGANSKTGALSRFLDEIGRSIPVGSWLFIENLDRLSRQDIISAQELFLSIIRRGITIVTGMDNKIYSIETVTANPMDLMFSILLFIRGNEESQTKRNRTNSSALLKIKAHQQNPQSPAVAIEEIGKNMWWTDTTSGRVLPHPVYFPVLQKIVKMRQDGHSAGSILDYLNEHHEPPAPTSNKKHGKWSRAMVSRLFTTKALIGIKTVNVDGVEYELRDYYPRVLSDSEFYFLRKNIIKKAWDYGHNKEKVIPLLSGIGVLRCVHCGATMVKQSAVNGKREQYRYCCDGRKSGRTDCPYPNWGFRAATLERAVLQLLADKIWIAEDKTNPIPEIQVKIDEISRKIDNLINLSAMMGATKELANQITDLNMQREALHEEIRLFEREMYSVDSQGWEKLAQFDLSDVQNEERLKVRMKIKGALHEIECSRLDSKKNLFVLVYLDGLRQRLVIENNRGLKKGQIIVDLKTINDRQIIESAGMVLHPCIEMIVDKNWKAPEEIPGLLSEEFGI

SEQ ID NO: 27122 - protein, 542 aa, synthetic construct
MQQLKTKRVGIYVRVSTEMQSTEGYSIDGQINQIKEYCDFHHFEVKDIYADRGISGKSMNRPELQRMLKDAKEGNIDCVMVYKTNRLARNTSDLLKIVEDLHKQNVEFFSLSERMEVNTSSGKLMLQILASFSEFERNNIVENVFMGQTRRAQEGYYQGNLPLGYDKIPNSKHELMINQHEANIVKYIFESYAKGHGYRKIANALNHKGYVTKKGKPFSISSITYILANPFYIGKIQFAKYKDWSEKRRKGLNDKPVIAEGKHSPIINQNLWDKVQMRKKQVSQKPQVHGKGTNLLTGIIHCPQCGAPMAASNTTNTLKDGTKKRIRYYSCSNFRNKGSKVCSANSVRADVIEDYVMKQILEIVKSDKVIQRVVARVNQENQVDYASLHHDIAYKQQQYDEVQIKLNNLIKTIEDNPDLTSVIRPSIQKYDKQLNDIMSQINQLKKQQNEDKPSYNAKKIGEILRHVFHNIEQMKKSQLKALYLAVIDRIDIRKDSNHKKQFYVTLKLDNEVIKQVFNDTPLDEVLLSTSSLFLPQPFYLTI

SEQ ID NO: 27123 - protein, 523 aa, synthetic construct
MTKRCAVYVRVSTDKEEQKKSLVNQREIFEHYIVERGWDLYKIYSDVQSGTKAIKRPGFQQMLQDAKEHKFDVILAKELSRLARNGELSYKVLNSLLVNSGIDIITLDGAINSVEQQTNMYGLYAWVYENESQTMSRRIKYSFEAKARNGEFNGSIPPYGYTIVDKQLILRNDFTTDVVRRIFKSYIVGQGIDHIARQLLEDKISTPSQVACKKNASPIWYGSSIKGILQNEHYIGNLVQQRETSISVTSTKRKKNASEDIIRVEGTHEPIISKQDFDLVQQLLKQRSRKHSHAKYHLFTNVAFCADCGKGMHYKKNRKGYVCGSFDKHGHTLCSDNIVREADLIDVITSDIKSLYTRISSKKFKDVLDKRLHSSESKRLKKLQQLKIQIDTFKSDKTEALRCKIRREITDEEYQALVKETNAKILDLITTKEELEKDSSTQVNDRQLNELFEKIEQFIKHPTLNDEILHRLIKKIEIKKDGSPRIYYRFSDPHLSFIFFQATHNIRHASSAETCPPAALQLS

SEQ ID NO: 27124 - protein, 570 aa, synthetic construct
MKLVAYIRISSHGQKDKGDSLDGQRQYIKSWALTGHHTIKKWYVDEAVSAFKGKRLNFELMLDELDSGLIQADAVIVYSLSRFSRNLVTQLNATKTLEKLGMSLLSASESLPNSPDDKYLVVTMLGLINEHQSRQNSRVVSDRLRDTARKGFYTGGPIPFGYNAITVSGDTSKKRKKLVVNHQESPVVKLIFELAEKGTNGKGFGVKNIAVHLNKNGYLNRGKKWNKNSVCNILNNRVYMGEFLFGKSKPNKLGDERIVVKVPSIVSSSKFERVRQYVEERALSNTGIKSARSNSLLTGVLTCPICNGSMRVTHGKSGKYKYYQCSQQVMYSPDSCSFKRIRKEEADKLIIESLINRIFTEQNLSEIYLQTRNLLKERVAKNRMELTSLSHRIGSEKSRANHLIELISEHKIEATKVVNDTLKKHSDQIAHLEEELAKKKISSSLPVKNFGMEKIKQFTHDVHSYIKKADEASLKQLMLATIDKVYIIPEKKISFYGRNMAVIYTIAHAKTGTDFSVPAFVSKWRRDRDLNPRYAINVCRFSRPVLSTTQPSLRCGRYNRGRHKRCKALF

SEQ ID NO: 27125 - protein, 590 aa, synthetic construct
MTDLNPMAAFAESMTPKRAVTYLRVSTSEQASKGGQSEGFSIPAQRDANRKKAQSLGAVVAKEFVERGVSGTSTNRPALKALLRYLEEEQGNVDYIIVHKIDRLARNRADDVAINAKFDEFGVRLVSTSENIDQTPGGLLMHGIMSSIAEFYSKNLANEVTKGMNQKVRSGGTAGKAPLGYLNTRIYETGVETRTVEVDPERAPLVQWAFERYAEGNISVADLTDELAARGLTTVPTRVYPSKAVSKRYIHAMLSNKYYLGITTYCGVEYPGNHEPLITQGLFDRVQQTLNSRRQGERRRKHDHFLKSTVWCGDCGSRMILQKPTNHQGLQYEYFVCNGRLSKRTNCQMSAVPVSWLEGQMEELYRRIQVPREILDLMRPRLKEQLQLHNASRHEERDQLKAQEQAIRRKQEKLLEAFYGQALPMELMAREQKQLEQSLSQVERRLKSFEGDDVEQDALLDTALRLASNCYSAYNKASPTQKRLLNQVFFEKVLVCSLEDKDHHVHAHLAPWTLVFRTTNVAENQAIGLEHQPEPVPEQEPDENLALGLDLTQETEKARSEDLVFSNNFRTRMCKHTMVPRTGFEPVLPP

SEQ ID NO: 27126 - protein, 504 aa, synthetic construct
MPKRAVVYVRLSDFRGDADPTLSPETQEEKCRAYCTAKGWDVVEVVRDLDVSGSDKGLRLDRPGLSRVRALLPSVDVVVFAKLDRLARNVIDFRTFAEEAETRGATLASVAESLDLSTAAGRFVATILAAFAEMEAAAIADRVRDSRAAKAQALRWGGAPPPYGYESVPHPEGKGRALVLKADEVAVIHEMADRVLGGEALTSIALDFNRRGIARRRGTWAASTVARILRNDATVGRLTHRGAPVLGEDGLPATPWPAALPPATWRTVRAVLDENAERVAGSRRPARKRASRLLSGFLYCETCNRPLALQTYKAGPTYVCKAKANAKPCATGGSVLAERVEEEVVGQFLRAVGRLPATRVVAAGDAEAVDRLAAANAALDDLARRLRDADDDETLALLTRRATLRALVDDLGKAAATPRVREEPTGRTVGEEWESADVLARRALLGRALDHVVVRPIGRGYHRRPVADRLVVVWHPDEPTVNDAGGESRHVPARVLAASGAAAE

SEQ ID NO: 27127 - protein, 455 aa, synthetic construct
MANEIKQVALYIRVSTDQQAKHGDSLDEQQHTLNEYVSQQGNMRVFKTYIDDGISGQKLYRDEFQKLLDDVKKGRIDTILFTKLDRWFRNLRHYLNIQEILDKNNVTWLAVTQPFFNTETAMGRSFVNQSMGFAELEAQMTSERIRAVFDNKIRKGEVVSGKVPLGYEIKDKHLVPNEKAEIVKEIFQYYLETGSMRATVRHLENHFSMTRDYQSVRQMLTNRKYIGELRDNKNFCKPIIDRDVFERVQLQLSKNIRMNKKRDYMFTGLLVCSECGCNYSATAVISRYVRKDGTTNPNERHLYRCTKNRNNAKKCSNKKGIYETTLENFLLENIEKQAEELSVKMQQEPEVKKTKNTNDKIKKKIDRLKKAYLNEVITLEEYKKDREELEALLIPERDNKIAKIDLNSLHNYSTAEFRDGYKQLTISEKSSLWRQVIKNIVVYPDGNLKINFIGY

SEQ ID NO: 27128 - protein, 541 aa, synthetic construct
MGHVMNTAYAYIRFSSEKQSTGDSVRRQQALIDSWGKNNPDYILSQKIYKDEGLSAFTGKHAAGDLGRLMNDISNGSITAGDVILIESLDRLSRENISTATDRLKAILIHGVNVVTLTDQKQYTPESLNSPMDLIMSILTAQRAHEESESKSKRMREVWAKKRTEAEENGKIITKSCPRWLTVNSDRTGFDPIPDRVQTINRIFSLRVKGESLSAISKILNEEGRLTFTGKAGKWNQSTIQQLVSNRALIGYKVQSRNSVVNHPDIPNYYPVVVDLQTFQAVQQLKSDQFGKKQTSDIPALVNLFKSVLRCKECGNIMILNSVTVNRDGYYVCSMRRQGRCEAKPINRKATDEALVNGLFYNLDRLMLSKPEQNPVTALEAQKQDLTERLNNLVVALEVAPDITEIISRMNAIKGDIQAIESQIAKHKQRIQSHISETVQGLNLLVKADRVEFQLVIKRHVETILINTLKKSADIHMFNGLKLCNFPLDRVVDGAQWLEVLPLIDGDEFDFEGFTTKPRHIALEEAPEWVKETEEQPSQPL

SEQ ID NO: 27129 - protein, 558 aa, synthetic construct
MSKEKIKVYLYTRVSTSIQIDGYSLEAQKSRMKAFALYNDYEIVGEYEDAGKSGKSIEGRVQFTRMMEDIKSGKDGVSFVLVFKLSRFARNAADVLSTLQIMQDFGVNLICVEDGIDSSKDAGKLMISVLSAVAEIERENIRVQTMEGRIQKAREGKWNGGFAPYGYQLIDGKLLINEEEAIAIRTIFDQYVNTSIGANGLSKYLEKHGIRKIPRQNGKNPLFDAGLIRKILKNPVYNGKIAFGRRTLEKVHGTRNEYRQVEQEDYLVAEGIHEAIIPDELWQAAQVKLKAQAKKYEHVNKGKNMRTHLLSGIVKCPICGAGMFGNKSIKYKKDGTKYKDFYYYGCKHRLMNRGHKCTYNKQIREELLDDAVAEVIIKLVSNPKFASMIQEKINMKVDTSAIENEIDNYQKELRKSHSTKFKLIEEIDNLDVEDKHYKRRKNDLDDRLYRMYDKIEDLESQLIEAKAKKETIEAEKLTGDNIYKVLIYFDKLYKVMNDVERRQLIEALISEIQIYEEKQPNGQWLKSITFKLPIIDENLNISLDNDEQVECVALLVKA

SEQ ID NO: 27130 - protein, 664 aa, synthetic construct
MPDALAPDPFTAMAAQLTPKRAVSYIRVSTREQAQRGGSEEGFSLPAQREANKRKAQSMGALVVKEFADRGESARSANRPELQKMLAYLKEDGGIDYVIVHKLDRLARNRADDVEINRAFEQAGVRLVSTSENIDQTPGGMLLHGIMSSIAEFYSRNLANEVIKGMGEKARNGGTLGKAPLGYVNVRARDENGREVRTIALDEERAPLIRLAFTEYATGQWTTKRLAAHLHDRGLTTVPTARKPAKAVTGAQLHRMLRHPYYKGVISFQGVEYAGAHEPLVDEETWSQVQAVLDSHRFGERERQHNHHLKTTVYCSLCGARLLVQNTRNSKGDLYPYFICARRQRTHDCAFRAVLIDVVEERMSDLYRTIQLSSQDRQLVEQYVREELRHLERDKDRTIRSLTTRRTNIEDKRRRLMHAHYEGAVPLELLREEQTQLTSELDHIERQLAAYQADITEVRQRLTQALDLLEDCHRLYTAAPAHLKKLLNQVFFERVLVNPAVDEEGRVILPDDGTNDGRGKTMTDIAAGDCPIGESDDGPLQRAAAPRLLADASSDASLAADLRRPFDWLTSRRMHNVARQHRATLLQDNTQENRDNQVDCPVTNTVCNDEALTSGGERFASSSTNPDRVTHDLGLGKAIVVPPLGFEPRTLCLSDTIRGISSLL

SEQ ID NO: 27131 - protein, 560 aa, synthetic construct
MTKLYSYIRFSSMRQGEGSSYERQIKMAKEIADRYGLELVNDYQDLGVSAFKGANSKTGALSRFLDEIGRSIPVGSWLFIENLDRLSRQDIISAQELFLSIIRRGITIVTGMDNKIYSIETVTANPMDLMFSILLFIRGNEESQTKRNRTNSSALLKIKAHQQNPQSPAVAIEEIGKNMWWTDTTSGYVLPHPVYFPILQKIVKMKQEGHSTGSVLDYLNEHHTPPAPTSNKQHRKWSIAMVSRLFKTKALIGVKEVTVDGVQYELKDYYPRVLSDSEYYFLKNNLIKKAWSFGHAQEKTIPLLSGIGLLKCAHCGSPMVKRKAANGKVEQYRYTCDGEGSGRTDCLYPNWGFRASSLEGAVLQLLADKVWVAEDKANPIPEIQVQIDEISRKIDNLINLSAMTGATKELANQITDLNTQREALHEEIRLFEREMYSVDSQGWEKLAQFDLSDVQNEERLQIRLKIKGALRSIECARIDRNKNLFVLVYLDGLRQRIVIENNRGIRKGQIFVDLKTINDRQILESAGMVLHDHIDILIDEKAFYDGLPKEEDGPLSKFGI

SEQ ID NO: 27132 - protein, 558 aa, synthetic construct
MTKLYSYIRFSSMRQSDGSSYERQIRMAKEIADRYNLELVNDYQDLGVSAFKGANSKTGALSRFLDEIGRSIPVGSWLFIENLDRLSRQDIISAQELFLSIIRRGITIVTGMDNKIYSIETVTANPMDLMFSILLFIRGNEESQTKRNRTNSSALLKIKAHQQNPQNPAVAIEEIGKNMWWTDTTSGRVLPHPVYFPVLQKIVQLRQEGHSAGAILDYLNEHHEPPAPTSNKKHGKWSRAMVSRLFNTKALIGVKTVNVDGVEYELRDYYPRVLSDSEFYFLRKNIIKKAWDYNHDKEKVIPLLSGIGVLRCVHCGATMVKQTAANGKREQYRYCCDGRKSGRTDCPYPNWGFRAVTLEGAVLQLLADKIWIAEDKTNPIPEIQVKIDEISRKIDNLINLSAMMGATKELANQITDLNSQREALHEEIRLFEREMYSVDSQGWDKLAQFDLSDVQNEERLKVRMKIKGALHEIECSRIDSKKNLFVLVYLDGLRQRLVIENNRGLKKGQIFVDLKTINDRQILESAGMVLHPCIEMIIDADWKAPEEIPGLLSEEFGI

SEQ ID NO: 27133 - protein, 624 aa, synthetic construct
MIKTFIYSRVSSQEQLSGGGLDRQETDVREYVTRNGLDQYEIVAMVDRGISGYDGSNMRDGELGKWYKDAITGMYWGSHLVLEAIDRFSRRDPMLAMEDFTVLVNKGGIKVHIVKFNTFINGDNLPMLSMMMNLAHSESKQKSDRISKGWQRRRRMALDNGTAITARTPYWIDVRDNEYRLNNSSIAVVEAFAMYKQGLSCGLIAKKLNELKHYFPYMWTKTAVQHIVDGLNTSGIIDAPRAIKTIKAFYKSGFSVEDIAKKMNAEFQFMKEWNAPAVHKLLQNKSVTGLVEIQKRKLIQEFDSDGKPLELRTKSEGEKYFESIYPQIISIDDFELIQKLLESNRKVDTKTGKGQTTGGTVTQNEDGELVKQFILSSLCRCYKCGGAMFNNIVRSKRKNGKVDTYSYLRCLNERDAHCDVKALNYPVIERAIIEHVKGLNFDTMFKGTNNSELELLKTREVELLRDIATYEDAIAARKAAGKNTSPVLVTSLVDAQDDLEALQKKIRAISGVTVNAEELTSLNESVFDVAEYELRNMVELELQKIIKRITFNCTEKNIYFITIQYNTGTVLQHGLKVDKKKGVIETYELHEGNKGYVSNEEVITPALIEAAESKNIGIFEGKVM

SEQ ID NO: 27134 - protein, 558 aa, synthetic construct
MTKLYSYIRFSSMRQSDGSSYERQIRMAKEIADRYNLELVNDYQDLGVSAFKGANSKTGALSRFLDEIGRSIPVGSWLFIENLDRLSRQDIISAQELFLSIIRRGITIVTGMDNKIYSIETVTANPMDLMFSILLFIRGNEESQTKRNRTNSSALLKIKAHQQNPQSPAVAIEEIGKNMWWTDTTSGRVLPHPVYFPVLQKIVQLRQEGHSAGAILDYLNEHHEPPAPTSNKKHGKWSRAMVSRLFHTKALIGVKAVNVDGVEYELRDYYPRVLSDSEFYFLRKNIIKKAWDYSHDKEKVIPLLSGIGVLRCVHCGATMVKQTAANGKREQYRYCCDGRKSGRTDCPYPNWGFRAVTLEGAVLQLLADKIWIAEDKTNPIPEIQVKIDDISRKIDNLINLSAMTGATKELANQITDLNSQREALHEEIRLFEREMYSVDSQGWDKLAQFDLSDVQNEERLKVRMKIKGALHEIECSRIDSKKNLFVLVYLDGLRQRLVIENNRGLKKGQIFVDLKTINDRQILESAGMVLHPCIEMIIDADWKAPEEIPGLLSEEFGI

SEQ ID NO: 27135 - protein, 558 aa, synthetic construct
MTKLYSYIRFSSMRQSDGSSYERQIRMAKEIADRYNLELVNDYQDLGVSAFKGANSKTGALSRFLDEIGRSIPVGSWLFIENLDRLSRQDIISAQELFLSIIRRGITIVTGMDNKIYSIETVTANPMDLMFSILLFIRGNEESQTKRNRTNSSALLKIKAHQQNPQNPAVAIEEIGKNMWWTDTTSGRVLPHPVYFPVLQKIVQLRQEGHSAGAILDYLNEHHEPPAPTSNKKHGKWSRAMVSRLFATKALIGVKTVNVDGVEYELRDYYPRVLSDSEFYFLRKNIVKKAWDYNHDKEKVIPLLSGIGVLRCVHCGATMVKQTAANGKREQYRYCCDGRKSGRTDCPYPNWGFRAVTLEGAVLQLLADKIWIAEDKTNPIPEIQVKIDEISRKIDNLINLSAMMGATKELANQITDLNSQREALHEEIRLFEREMYSVDSQGWDKLAQFDLSDVQNEERLKVRMKIKGALHEIECSRIDSKKNLFVLVYLDGLRQRLVIENNRGLKKGQIFVDLKTINDRQILESAGMVLHPCIEMIIDADWKAPEEIPGLLSEEFGI

SEQ ID NO: 27136 - protein, 558 aa, synthetic construct
MTKLYSYIRFSSMRQSDGSSYERQIRMAKEIADRYNLELVNDYQDLGVSAFKGANSKTGALSRFLDEIGRSIPVGSWLFIENLDRLSRQDIISAQELFLSIIRRGITIVTGMDNKIYSIETVTANPMDLMFSILLFIRGNEESQTKRNRTNSSALLKIKAHQQNPQSPAVAIEEIGKNMWWTDTTSGRVLPHPVYFPVLQKIVQLRQEGHSAGAILDYLNEHHEPPAPTSNKKHGKWSRAMVSRLFNTKALIGVKTVNVDGVEYELRDYYPRVLSDSEFYFLRKNIIKKAWDYSHDKEKVIPLLSGIGVLRCVHCGATMVKQTAANGKREQYRYCCDGRKSGRTDCPYPNWGFRAVTLEGAVLQLLADKIWIAEDKTNPIPEIQVKIDEISRKIDNLINLSAMMGATKELANQITDLNSQREALHEEIRLFEREMYSVDSQGWDKLAQFDLSDVQNEERLKVRMKIKGALHEIECSRIDSKKNLFVLVYLDGLRQRLVIENNRGLKKGQIFVDLKTINDRQILESAGMVLHPCIEMIIDADWKAPEEIPGLLSEEFGI

SEQ ID NO: 27137 - protein, 557 aa, synthetic construct
MTKLYSYIRFSSMRQSEGSSYERQIAMARRVAEEHGLELVNDYQDLGVSAFKGANSRTGALSRFLDEIGRSIPVGSWLFIENLDRLSRADIVTAQELFLSIIRRGITIVTGMDNKIYSLETVNANPLDLLISIMMFTRGNEESQTKRNRTNASALLKVKAHQQNPQSPAVAIEEIGKNMWWTDTTSGRVLPHPVYFPVLQKIVQMKMEGHSTGSVLNYLNEHHEPPPAQSNKKHSKWSIAMISRLFQTRALIGVKEVSIDGVTYELKDYYPRVMSDTDFYFLKKNMITKSWSFGKEIDHIIPLLTGIGVLRCAHCGSAMIKQKGANGKPDHYRYTCDGSRSGRVDCPYPNWGFRGATLDAAVLRLIADKIWINEDKTNPIPEIRVKIDDISRKIDNLINLSAMTGATKELADQITTLNSQREALHEEIRLYERESYSVDSEGWEKLAEFDLNDVYNEERLKVRLKIKSALRTIECMRVNKKFNLFTLEYIDGKKQRVVIENGRGVRAGQTFVDLKTINDKQIIESGGMVLHPCIDMLIVPNWKPEEEQAGPLQEFGI

SEQ ID NO: 27138 - protein, 624 aa, synthetic construct
MIKIFIYSRVSSQEQLSGGGLDRQETDVREYVTRNGLDQYEIVAMVDRGISGYDGSNMRDGELGKWYKDAITGMYWGSHLVLEAIDRFSRRDPMLAMEDFTVLVNKGGIKVHIVKFNTFINGDNLPMLSMMMNLAHSESKQKSDRISKGWQRRRRMALDNGTAITARTPYWIDVRDNEYRLNNSSIAVVEAFAMYKQGLSCGLIAKKLNELKHYFPYMWTKTAVQHIVDGLNTSGIIDAPRAIKTIKAFYKSGFSVEDIAKKMNAEFQFMKEWNAPAVHKLLQNKSVTGLVEIQKRKLIQEFDSDGKPLELRTKSEGEKYFESIYPQIISIDDFELIQKLLESNRKVDTKTGKGQTTGGTVTQNEDGELVKQFILSSLCRCYKCGGAMFNNIVRSKRKNGKVDTYSYLRCLNERDAHCDVKALNYPVIERAIIEHVKGLNFDTMFKGTNNSELELLKTREVELLRDIATYEDAIAARKAAGKNTSPVLVTSLVDAQDDLEALQKKIRAISGVTVNAEELTSLNESVFDVAEYELRNMVELELQKIIKRITFNCTEKNIYFITIQYNTGTVLQHGLKVDKKKGVIETYELHEGNKGYVSNGEVITPALIEAAESKNIGIFEGKVM

SEQ ID NO: 27139 - protein, 558 aa, synthetic construct
MTKLYSYIRFSSMRQSDGSSYERQIRMAKEIADRYNLELVNDYQDLGVSAFKGANSKTGALSRFLDEIGRSIPVGSWLFIENLDRLSRQDIISAQELFLSIIRRGITIVTGMDNKIYSIETVTANPMDLMFSILLFIRGNEESQTKRNRTNSSALLKIKAHQQNPQSPAVAIEEIGKNMWWTDTTSGRVLPHPVYFPVLQKIVQLRQEGHSAGVILDYLNEHHEPPAPTSNKKHGKWSRAMVSRLFATKALIGVKTVNVDGVEYELRDYYPRVLSDSEFYFLRKNIVKKAWDYSHDKEKVIPLLSGIGVLRCVHCGATMVKQTAANGKREQYRYCCDGRKSGRTDCPYPNWGFRAVTLEGAVLQLLADKIWIAEDKTNPIPEIQVKIDEISRKIDNLINLSAMMGATKELANQITDLNSQREALHEEIRLFEREMYSVDSQGWDKLAQFDLSDVQNEERLKVRMKIKGALHEIECSRIDSKKNLFVLVYLDGLRQRLVIENNRGLKKGQIFVDLKTINDRQILESAGMVLHPCIEMIIDADWKAPEEIPGLLSEEFGI

SEQ ID NO: 27140 - protein, 558 aa, synthetic construct
MTKLYSYIRFSSMRQSDGSSYERQIRMAKEIADRYNLELVNDYQDLGVSAFKGANSKTGALSRFLDEIGRSIPVGSWLFIENLDRLSRQDIISAQELFLSIIRRGITIVTGMDNKIYSIETVTANPMDLMFSILLFIRGNEESQTKRNRTNSSALLKIKAHQQNPQNPAVAIEEIGKNMWWTDTTSGRVLPHPVYFPVLQKIVQLRQEGHSAGAILDYLNEHHEPPAPTSNKKHGKWSRAMVSRLFHTKALIGVKTVNVDGVEYELRDYYPRVLSDSEFYFLRKNIIKKAWDYSHDKEKVIPLLSGIGVLRCVHCGATMVKQTAANGKREQYRYCCDGRKSGRTDCPYPNWGFRAVTLEGAVLQLLADKIWIAEDKTNPIPEIQVKIDEISRKIDNLINLSAMMGATKELANQITDLNSQREALHEEIRLFEREMYSVDSQGWDKLAQFDLSDIQNEERLKVRMKIKGALHEIECSRIDSKKNLFVLVYLDGLRQRLVIENNRGMKKGQIFVDLKTINDRQILESAGMVLHPCIEMIIDSDWKTPEEIPGLLSEEFGI

SEQ ID NO: 27141 - protein, 558 aa, synthetic construct
MTKLYSYIRFSSMRQSDGSSYERQIRMAKEIADRYNLELVNDYQDLGVSAFKGANSKTGALSRFLDEIGRSIPVGSWLFIENLDRLSRQDIISAQELFLSIIRRGITIVTGMDNKIYSIETVTANPMDLMFSILLFIRGNEESQTKRNRTNSSALLKIKAHQQNPQSPAVAIEEIGKNMWWTDTTSGRVLPHPVYFPVLQKIVQLRQEGHSAGVILDYLNEHHEPPAPTSNKKHGKWSRAMVSRLFATKALIGVKTVNVDGVEYELRDYYPRVLSDSEFYFLRKNIVKKAWDYSHDKEKVIPLLSGIGVLRCVHCGATMVKQTAANGKREQYRYCCDGRKSGRTDCPYPNWGFRAVTLEGAVLQLLADKIWIAEDKTNPIPEIQVKIDEISRKIDNLINLSAMTGATKELANQITDLNSQREALHEEIRLFEREMYSVDSQGWDKLAQFDLSDVQNEERLKVRMKIKGALHEIECSRIDSKKNLFVLVYLDGLRQRLVIENNRGLKKGQIFVDLKTINDRQILESAGMVLHPCIEMIIDSDWKAPEEIPGLLSEEFGI

SEQ ID NO: 27142 - protein, 558 aa, synthetic construct
MTKLYSYIRFSSMRQSDGSSYERQIRMAKEIADRYNLELVNDYQDLGVSAFKGANSKTGALSRFLDEIGRSIPVGSWLFIENLDRLSRQDIISAQELFLSIIRRGITIVTGMDNKIYSIETVTANPMDLMFSILLFIRGNEESQTKRNRTNSSALLKIKAHQQNPQNPAVAIEEIGKNMWWTDTTSGRVLPHPVYFPVLQKIVQLRQEGHSAGVILDYLNEHHEPPAPTSNKKHGKWSRAMVSRLFNTKALIGVKTVNVDGVEYELRDYYPRVLSDSEFYFLRKNIIKKAWDYSHDKEKVIPLLSGIGVLRCIHCGATMVKQTAANGKREQYRYCCDGRKSGRTDCPYPNWGFRAVTLEGAVLQLLADKIWIAEDKTNPIPEIQVKIDEISRKIDNLINLSAMMGATKELANQITDLNSQREALHEEIRLFEREMYSVDSQGWDKLAQFDLSDVQNEERLKVRMKIKGALHEIECSRIDSKKNLFVLVYLDGLRQRLVIENNRGLKKGQIFVDLKTINDRQILESAGMVLHPCIEMIIDADWKAPEEIPGLLSEEFGI

SEQ ID NO: 27143 - protein, 558 aa, synthetic construct
MTKLYSYIRFSSMRQSDGSSYERQIRMAKEIADRYNLELVNDYQDLGVSAFKGANSKTGALSRFLDEIGRSIPVGSWLFIENLDRLSRQDIISAQELFLSIIRRGITIVTGMDNKIYSIETVTANPMDLMFSILLFIRGNEESQTKRNRTNSSALLKIKAHQQNPQSPAVAIEEIGKNMWWTDTTSGRVLPHPVYFPVLQKIVQLRQEGHSAGAILDYLNEHHEPPAPTSNKKHGKWSRAMVSRLFNTKALIGVKTVNVDGVEYELRDYYPRVLSDSEFYFLRKNIIKKAWDYNHDKEKVIPLLSGIGVLRCVHCGATMVKQTAANGKREQYRYCCDGRKSGRTDCPYPNWGFRAVTLEGAVLQLLADKIWIAEDKTNPIPEIQVKIDEISRKIDNLINLSAMMGATKELANQITDLNSQREALHEEIRLFEREMYSVDSQGWDKLAQFDLSDVQNEERLKVRMKIKGALHEIECSRIDSKKNLFVLVYLDGLRQRLVIENNRGLKKGQIFVDLKTINDRQILESAGMVLHPCIEMIIDADWKAPEEIPGLLSEEFGI

SEQ ID NO: 27144 - protein, 558 aa, synthetic construct
MTKLYSYIRFSSTRQADSSSFERQKRTAKEIAEKYGLELVTSYQDLGVSAFKGANSKTGALSRFMEEIGRSVPIGSWLVVENLDRLSRQSIIEAQELFLSIIRRGITIVTGMDGKVYSKESVNANPLDLLLSVMMFARANEESQTKRNRTNSSALLKIKAHQQNPQSPAVAIEEIGKNMWWTDTTSGRVLPHPVYFPVLQKIVQLRQEGHSAGVILDYLNEHHEPPAPTSNKKHGKWSRAMVSRLFNTKALIGVKTVNVDGVEYELRDYYPRVLSDSEFYFLRKNIIKKAWDYSHDKEKVIPLLSGIGVLRCVHCGATMVKQTAANGKREQYRYCCDGRKSGRTDCPYPNWGFRAVTLEGAVLQLLADKIWIAEDKTNPIPEIQVKIDEISRKIDNLINLSAMMGATKELANQITDLNSQREALHEEIRLFEREMYSVDSQGWDKLAQFDLSDVQNEERLKVRMKIKGALHEIECSRIDSKKNLFVLVYLDGLRQRLVIENNRGLKKGQIFVDLKTINDRQILESAGMVLHPCIEMVIDADWKAPEEIPGLLSEEFGI

SEQ ID NO: 27145 - protein, 480 aa, synthetic construct
MKAAIYLRVSTEEQAKEGFSIRAQHERLEMFARSQDWETVDYYVDEGRSAKDTGRPELQRMLNDISECKIEVVLVYKLDRLTRSVMDLYHLLERFEKHGCMFKSATEVFDTTTPTGRLFITLVAAVAQWERENLADRVKLGMEQMVEEGRWPGGPAPFGYKLDKHSRLQINPDELSLYEYMYDLYEDFKGDNAISIILNHGLKKKTRLGNSFSAKTVRDILKNPIAYGALQWGGKVYEGFCDGIVSKERYERLMDLRSAKSKVSAKAVSSTYIFTGTLKCGRCGASLKGRMRKTTNQTTYTYLVCTNQRERKCDLPIISEQNVEKRFLNELQLLLVSQFDEANEIAASVDQENSGVNQRVAQIRKQMQAIKERKKKWQMAYADDVISLNDLREHMNQDRKRYEELENELLRVEAKPPLNHSPVQVVAILSNFLTNWNQLEPMEKKQAVMLLLERFEVNAENGKRRTHSKRVLALSNFIFR

SEQ ID NO: 27146 - protein, 558 aa, synthetic construct
MTKLYSYIRFSSMRQSDGSSYERQIRMAKEIADRYNLELVNDYQDLRVSAFKGANSKTGALSRFLDEIGRSIPVGSWLFIENLDRLSRQDIISAQELFLSIIRRGITIVTGMDNKIYSIETVTANPMDLMFSILLFIRGNEESQTKRNRTNSSALLKIKAHQQNPQSPAVAIEEIGKNMWWTDTTSGRVLPHPVYFPVLQKIVQLRQEGHSAGVILDYLNEHHEPPAPTSNKKHGKWSRSMVSRLFATKALIGVKTVNVDGVEYELRDYYPRVLSDSEFYFLRKNIVKKAWDYSHDKEKVIPLLSGIGVLRCVHCGATMVKQTAANGKREQYRYCCDGRKSGRTDCPYPNWGFRAVTLEGAVLQLLADKIWIAEDKTNPIPEIQVKIDEISRKIDNLINLSAMMGATKELANQITDLNSQREALHEEIRLFEREMYSVDSQGWDKLAQFDLSDVQNEERLKVRMKIKGALHEIECSRIDSKKNLFVLVYLDGLRQRLVIENNRGLKKGQIFVDLKTINDRQILESAGMVLHPCIEMIIDADWKAPEEIPGLLSEEFGI

SEQ ID NO: 27147 - protein, 558 aa, synthetic construct
MTKLYSYIRFSSMRQSDGSSYERQIRMAKEIADRYNLELVNDYQDLGVSAFKGANSKTGALSRFLDEIGRSIPVGSWLFIENLDRLSRQDIISAQELFLSIIRRGITIVTGMDNKIYSIETVTANPMDLMFSILLFIRGNEESQTKRNRTNSSALLKIKAHQQNPQNPAVAIEEIGKNMWWTDTTSGRVLPHPVYFPVLQKIVQLRQEGHSAGAILDYLNEHHEPPAPTSNKKHGKWSRAMVSRLFATKALIGVKTVNVDGVEYELRDYYPRVLSDSEFYFLRKNIIKKAWDYSHVKEKVIPLLSGIGVLRCVHCGATMVKQTAANGKREQYRYCCDGRKSGRTDCPYPNWGFRAVTLEGAVLQLLADKIWIAEDKTNPIPEIQVKIDEISRKIDNLINLSAMMGATKELANQITDLNSQREALHEEIRLFEREMYSVDSQGWDKLAQFDLSDVQNEERLKVRMKIKGALHEIECSRIDSKKNLFVLVYLDGLRQRLVIENNRGLKKGQIFVDLKTINDRQILESAGMVLHPCIEMIIDADWKAPEEIPGLLSEEFGI

SEQ ID NO: 27148 - protein, 558 aa, synthetic construct
MTKLYSYIRFSSMRQSDGSSYERQIRMAKEIADRYNLELVNDYQDLGVSAFKGANSKTGALSRFLDEIGRSIPVGSWLFIENLDRLSRQDIISAQELFLSIIRRGITIVTGMDNKIYSIETVTANPMDLMFSILLFIRGNEESQTKRNRTNSSALLKIKAHQQNPQSPAVAIEEIGKNMWWTDTTSGRVLPHPVYFPVLQKIVQLRQEGHSAGVILDYLNEHHEPPAPTSNKKHGKWSRAMVSRLFNTKALIGVKTVNVDGVEYELRDYYPRVLSDSEFYFLRKNIVKKAWDYSHDKEKVIPLLSGIGVLRCVHCGATMVKQTAANGKREQYRYCCDGRKSGRTDCPYPNWGFRAVTLEGAVLQLLADKIWIAEDKTNPIPEIQVKIDEISRKIDNLINLSAMTGATKELANQITDLNSQREALHEEIRLFEREMYSVDSQGWDKLAQFDLSDVQNEERLKVRMKIKGALHEIECSRIDSKKNLFVLVYLDGLRQRLVIENNRGLKKGQIFVDLKTINDRQILESAGMVLHPCIEMIIDSDWKAPEEIPGLLSEEFGI

SEQ ID NO: 27149 - protein, 624 aa, synthetic construct
MIKTFIYSRVSSQEQLSGGGLDRQETDVREYVTRNGLDQYEIVAMVDRGISGYDGSNMRDGELGKWYKDAITGMYWGSHLVLEAIDRFSRRDPMLAMEDFTVLVNKGGIKVHIVKFNTFINGDNLPMLSMMMNLAHSESKQKSDRISKGWQRRRRMALDNGTAITARTPYWIDVRDNEYRLNNSSIAVVEAFAMYKQGLSCGLIAKKLNELKHYFPYMWTKTAVQHIVDGLNTSGIIDAPRAIKTIKAFYKSGFSVEDIAKKMNAEFQFMKEWNAPAVHKLLQNKSVTGLVEIQKRKLIQEFDSDGKPLELRTKSEGEKYFESIYPQIISIDDFELIQKLLESNRKVDTKTGKGQTTGGTVTQNEDGELVKQFILSSLCRCYKCGGAMFNNIVRSKRKNGKVDTYSYLRCLNERDAHCDVKALNYPVIERAIIEHVKGLNFDTMFKSTNNSELELLKTREVELLRDIATYEDAIAARKAAGKNTSPVLVTSLVDAQDDLEALQKKIRAISGVTVNAEELTSLNESVFDVAEYELRNMVELELQKIIKRITFNCTEKNIYFITIQYNTGTVLQHGLKVDKKKGVIETYELHEGNKGYVSNGEVITPALIEAAESKNIGIFEGKVM

SEQ ID NO: 27150 - protein, 520 aa, synthetic construct
MRKTVYCYARVSSKGQAKDGYGMSRQQAMLRDYVASYNDSQHSRGYELGDISWLYAEGVSAYSGKNIEDGSVLKTFIDDVLQKKITNSVLVIENLDRFSRAAPNRAAGLFLSLINAGCDIHEVETEMIHHQYSDLNIISGGLQRAHNESKRKARLSIKNWDERIKNTIEGKSVLTHRVPSWIEIKNNKYVIKKGESEKYNLIFKMYADGFGPAAIRDELKKRGMQINEREPTINHLMKIIKDQRLIGRFNSTGRKILDGMPIYPVIVDPELFESVNDLRKQRNPLGKINLKANNLFAGLCICMNCGRYVQVNSVDKKGDTYFRCGGSLAKIDKCKERGFKYKIVENALLEHLRNFDFSMLRSEDNEIQVKINYLSMELVAKEKYGNEILTDLEKEDIPDPNDRRILKNIQRRISEIRTEIAILKQSNIGYKTFDDLKDSYNDDLLDPKNTTLRLDFNVKVKRVIKNIKMKRYDDTVMLVVSYVGINEKQAMVIKIKTGEVVFMAVQNDDLKSVEYLINDK

SEQ ID NO: 27151 - protein, 624 aa, synthetic construct
MIKTFIYSRVSSQEQLSGGGLDRQETDVREYVTRNGLDQYEIVAMVDRGISGYDGSNMRDGELGKWYKDAITGMYWGSHLVLEAIDRFSRRDPMLAMEDFTVLVNKGGIKVHIVKFNTFINGDNLPMLSMMMNLAHSESKQKSDRISKGWQRRRRMALDNGTAITARTPYWIDVRDNEYRLNNSSIAVVEAFAMYKQGLSCGLIAKKLNELKHYFPYMWTKTAVQHIVDRLNTSGIIDAPRAIKTIKAFYKSGFSVEDIAKKMNAEFQFMKEWNAPAVHKLLQNKSVTGLVEIQKRKLIQEFDSDGKPLELRTKSEGEKYFESIYPQIISIDDFELIQKLLESNRKVDTKTGKGQTTGGTVTQNEDGELVKQFILSSLCRCYKCGGAMFNNIVRSKRKNGKVDTYSYLRCLNERDAHCDVKALNYPVIERAIIEHVKGLNFDTMFKGTNNSELELLKTREVELLRDIATYEDAIAARKAAGKNTSPVLVTSLVDAQDDLEALQKKIRAISGVTVNAEELTSLNESVFDVAEYELRNMVELELQKIIKRITFNCTEKNIYFITIQYNTGTVLQHGLKVDKKKGVIETYELHEGNKGYVSNGEVITPALIEAAESKNIGIFEGKVM

SEQ ID NO: 27152 - protein, 558 aa, synthetic construct
MTKLYSYIRFSSMRQSDGSSYERQIRMAKEIADRYNLELVNDYQDLGVSAFKGANSKTGALSRFLDEIGRSIPVGSWLFIENLDRLSRQDIISAQELFLSIIRRGITIVTGMDNKIYSIETVTANPMDLMFSILLFIRGNEESQTKRNRTNSSALLKIKAHQQNPQNPAVAIEEIGKNMWWTDTTSGRVLPHPVYFPVLQKIVQLRQEGHSAGVILDYLNEHHEPPAPTSNKKHGKWSRAMVSRLFATKALIGVKTVNVDGVEYELRDYYPRVLSDSEFYFLRKNIIKKAWDYNHDKEKVIPLLSGIGVLRCVHCGATMVKQTAANGKREQYRYCCDGRKSGRTDCPYPNWGFRAVTLEGAVLQLLADKIWIAEDKTNPIPEIQVKIDEISRKIDNLINLSAMMGATKELANQITDLNSQREALHEEIRLFEREMYSVDSQGWDKLAQFDLSDVQNEERLKVRMKIKGALHEIECSRIDSKKNLFVLVYLDGLRQRLVIENNRGLKKGQIFVDLKTINDRQILESAGMVLHPCIEMIIDADWKAPEEIPGLLSEEFGI

SEQ ID NO: 27153 - protein, 541 aa, synthetic construct
MPKAISYIRFSTKIQSVGDSTKRQSKYINDWLKRNPDYYLDESLRFQDLGISGFSGANAKSGAFGEFLAAVESGYIEAGSVLLVESLDRVSRQDIDTAGEQLRKILRSGVEVVTLVDNEWYTKESLKDSLSMIKAMLVMERAHEESAMKSTRLRSVWAAKRERAAKGEIMSKRCAAWLKVSEDRSHFEFIPENVKAVQRVFQLRLEGLSHIKIAKQMNDEGFYTLNQHKSVKGGWSQSSVTELLSNRSVIGFKVPSKSMAVKGVSEIPNYYPSIITDEQFYAVQQLKQGSGRKPSSDLPLLTNLFKGVLRCSECGFIVVVAGVSAKRSGIYKCSMKSEGRCNSVGFSRLQTDKALVQGLLYNTNRLSLNRDSGSAIGTLQSELEQLHKQRERLIKLAMLADDTESMAKDLKALNSQIKDAEKAVSEVHQREQSSQLETISHLDLTVKKDRIEAQIIIKRIVKEIRLNTAGKKCDVFLHNGLKLLNFPLDRVVDGAQWLEVLPLIDGDEFDFEGFTTKPRHLVLEEAPEWVKEIEAQPNQPL

SEQ ID NO: 27154 - protein, 558 aa, synthetic construct
MTKLYSYIRFSSSRQADSSSYERQKRTAKEIADRYGLELVTSYQDLGVSAFKGANSKTGALSRFLDEIGKSVPVGSWLVVENLDRISRQSIIEAQELFLSIIRRGITIVTGMDGKVYSKESVNANPLDLLLSVMMFARANEESQTKRNRTNSSALLKIKAHQQNPQSPAVAIEEIGKNMWWTDTTSGRVLPHPVYFPVLQKIVQLRQEGHSAGVILDYLNEHHEPPAPTSNKKHGKWSRSMVSRLFATKALIGVKTVNVDGVEYELRDYYPRVLSDSEFYFLRKNIVKKAWDYSHDKEKVIPLLSGIGVLRCVHCGATMVKQTAANGKREQYRYCCDGRKSGRTDCPYPNWGFRAVTLEGAVLQLLADKIWIAEDKTNPIPEIQVKIDEISRKIDNLINLSAMMGATKELANQITDLNSQREALHEEIRLFEREMYSVDSQGWDKLAQFDLSDVQNEERLKVRMKIKGALHEIECSRIDSKKNLFVLVYLDGLRQRLVIENNRGLKKGQIFVDLKTINDRQILESAGMVLHPCIEMIIDADWKAPEEIPGLLSEEFGI

SEQ ID NO: 27155 - protein, 558 aa, synthetic construct
MTKLYSYIRFSSMRQSDGSSYERQIRMAKEIADRYNLELVNDYQDLGVSAFKGANSKTGALSRFLDEIGRSIPVGSWLFIENLDRLSRQDIISAQELFLSIIRRGITIVTGMDNKIYSIETVTANPMDLMFSILLFIRGNEESQTKRNRTNSSALLKIKAHQQNPQSPAVAIEEIGKNMWWTDTTSGRVLPHPVYFPVLQKIVQLRQEGHSAGVILDYLNEHHEPPAPTSNKKHGKWSRAMVSRLFATKALIGVKTVNVDGVEYELRDYYPRVLSDSEFYFLRKNIVKKAWDYSHDKEKVIPLLSGIGVLRCVHCGATMVKQTAANGKREQYRYCCDGRKSGRTDCPYPNWGFRAVTLEGAVLQLLADKIWIAEDKTNPIPEIQVKIDEISRKIDNLINLSAMTGATKELANQITDLNSQREALHEEIRLFEREMYSVDSQGWDKLAQFDLSDVQNEERLKVRLKIKGALHEIECSRIDSKKNLFVLVYLDGLRQRLVIENNRGLKKGQIFVDLKTINDRQILESAGMVLHPCIEMIIDADWKAPEEIPGLLSEEFGI

SEQ ID NO: 27156 - protein, 558 aa, synthetic construct
MTKLYSYIRFSSMRQSDGSSYERQIRMAKEIADRYNLELVNDYQDLGVSAFKGANSKTGALSRFLDEIGRSIPVGSWLFIENLDRLSRQDIISAQELFLSIIRRGITIVTGMDNKIYSIETVTANPMDLMFSILLFIRGNEESQTKRNRTNSSALLKIKAHQQNPQSPAVAIEEIGKNMWWTDTTSGRVLPHPVYFPVLQKIVQLRQEGHSAGVILDYLNEHHEPPAPTSNKKHGKWSRAMVSRLFNTKALIGVKTVNVDGVEYELRDYYPRVLSDSEFYFLRKNIIKKAWDYSHVKEKVIPLLSGIGVLRCVHCGATMVKQTAANGKREQYRYCCDGRKSGRTDCPYPNWGFRAVTLEGAVLQLLADKIWIAEDKTNPIPEIQVKIDEISRKIDNLINLSAMTGATKELANQITDLNSQREALHEEIRLFEREMYSVDSQGWDKLAQFDLSDVQNEERLKVRLKIKGALHEIECSRIDSKKNLFVLVYLDGLRQRLVIENNRGLKKGQIFVDLKTINDRQILESAGMVLHPCIEMIIDSDWKAPEEIPGLLSEEFGI

SEQ ID NO: 27157 - protein, 624 aa, synthetic construct
MIKTFIYSRVSSQEQLSGGGLDRQETDVREYVTRNGLDQYEIVAMVDRGISGYDGSNMRDGELGKWYKDAITGMYWGSHLVLEAIDRFSRRDPMLAMEDFTVLVNKGGIKVHIVKFNTFINGDNLPMLSMMMNLAHSESKQKSDRISKGWQRRRRMALDNGTAITARTPYWIDVRDNEYRLNNSSIAVVEAFAMYKQGLSCGLIAKKLNELKHYFPYMWTKTAVQHIVDGLNTSGIIDAPRAIKTIKAFYKSGFSVEDIAKKMNAEFQFMKEWNAPAVHKLLQNKSVTGLVEIQKRKLIQEFDSDGKPLELRTKSEGEKYFESIYPQIISIDDFELIQKLLESNRKVDTKTGKGQTTGGTVTQNEDGELVKQFILSSLCRCYKCGGAMFNNIVRSKRKNGKVDTYSYLRCLNERDAHCDVKALNYPVIERAIIEHVKGLNFDTMFKGTDNSELELLKTREVELLRDIATYEDAIAARKAAGKNTSPVLVTSLVDAQDDLEALQKKIRAISGVTVNAEELTSLNESVFDVAEYELRNMVELELQKIIKRITFNCTEKNIYFITIQYNTGTVLQHGLKVDKKKGVIETYELHEGNKGYVSNGEVITPALIEAAESKNIGIFEGKVM

SEQ ID NO: 27158 - protein, 558 aa, synthetic construct
MTKLYSYIRFSSMRQSDGSSYERQIRMAKEIADRYNLELVNDYQDLGVSAFKGANSKTGALSRFLDEIGRSIPVGSWLFIENLDRLSRQDIISAQELFLSIIRRGITIVTGMDNKIYSIETVTANPMDLMFSILLFIRGNEESQTKRNRTNSSALLKIKAHQQNPQSPAVAIEEIGKNMWWTDTTSGRVLPHPVYFPVLQKIVQLRQEGHSAGVILDYLNEHHEPPAPTSNKKHGKWSRAMVSRLFNTKALIGVKTVNVDGVEYELRDYYPRVLSDSEFYFLRKNIIKKAWDYSHDKEKVIPLLSGIGVLRCVHCGATMVKQTAANGKREQYRYCCDGRKSGRTDCPYPNWGFRAVTLEGAVLQLLADKIWIAEDKTNPIPEIQVKIDEISRKIDNLINLSAMTGATKELANQITDLNSQREALHEEIRLFEREMYSVDSQGWDKLAQFDLSDVQNEERLKVRMKIKGALHEIECSRIDSKKNLFVLVYLDGLRQRLVIENNRGLKKGQIFVDLKTINDRQILESAGMVLHPCIEMIIDADWKAPEEIPGLLSEEFGI

SEQ ID NO: 27159 - protein, 638 aa, synthetic construct
MKPKLYSYVRFSSVKQREGNSLERQQDTALKIAARYNLELDTTAFHDLGMSAFKGRNAHEGKLSEFIKQIGVKVPVGSWLVVENLDRISRDDAWTALDIFKSILSKGIVVVTGMDEKVYKYADVKNNPTDLIISLLMFTRAHDESLTKKNRVEAQARSLIRYNLTRKAGTPAKAIESVGQNVWWVDTKSGYVTPHPMYFPAAQKIIELKQNGETLLGIQRYLNEHYPAPKKRIYKDQTGQALKPKTEQWGKHLIRTFLNPTVYGQKVFTLDKRDESGVVIYDPDSEHPLKETFVIPDYYPALISEIDYLTLSKLDRHRAVTRSSSKYPEGNPEPEIPLLSGIGILFCGKCGSFMFKSGSNENKYRYICGSKIVQGKPCGKKGFTSYQLEHTILQLIADHVWNNHQEDKTAWYESEIEKASESIDKLLKLATLTDSLEELAEQIRSYKHKKATLEREFQQYKISRSEIQTTGWDQFRNFDIHDTKNPDRKRIRLKIKQAIKRINCYDIDGRHGHFEVTFADEAKQRIVIKFNRNRSPGVSYVEAQTVNDHDLLKMQGFVMHSFIDELISPDKFAQQIKDKHEVSILNPTFITKLEDGVNRDEGNGLAIKVDSTTSKSYATVNGIKYEINSLEDLEKLSQ

SEQ ID NO: 27160 - protein, 558 aa, synthetic construct
MTKLYSYIRFSSTRQADSSSFERQKRTAKEIAEKYGLELVTSYQDLGVSAFKGANSKTGALSRFMEEIGRSVPVGSWLVVENLDRLSRQSIIEAQELFLSIIRRGITIVTGMDGKVYSKESVNANPLDLLLSVMMFARANEESQTKRNRTNSSALLKIKAHQQNPQNPAVAIEEIGKNMWWTDTTSGRVLPHPVYFPVLQKIVQLRQEGHSAGAILDYLNEHHEPPAPTSNKKHGKWSRAMVSRLFHTKALIGVKTVNVDGVEYELRDYYPRVLSDSEFYFLRKNIIKKAWDYSHDKEKVIPLLSGIGVLRCVHCGATMVKQTAANGKREQYRYCCDGRKSGRTDCPYPNWGFRAVTLEGAVLQLLADKIWIAEDKTNPIPEIQVKIDEISRKIDNLINLSAMTGATKELANQITDLNSQREALHEEIRLFEREMYSVDSQGWDKLAQFDLSDVQNEERLKVRMKIKGALHEIECSRIDSKKNLFVLVYLDGLRQRLVIENNRGLKKGQIFVDLKTINDRQILESAGMVLHPCIEMIIDSDWKAPEEIPGLLSEEFGI

SEQ ID NO: 27161 - protein, 558 aa, synthetic construct
MTKLYSYIRFSSMRQSDGSSYERQIRMAKEIADRYNLELVNDYQDLGVSAFKGANSKTGALSRFLDEIGRSIPVGSWLFIENLDRLSRQDIISAQELFLSIIRRGITIVTGMDNKIYSIETVTANPMDLMFSILLFIRGNEESQTKRNRTNSSALLKIKAHQQNPQNPAVAIEEIGKNMWWTDTTSGRVLPHPVYFPVLQKIVQLRQEGHSAGAILDYLNEHHEPPAPTSNKKHGKWSRAMVSRLFATKALIGVKTVNVDGVEYELRDYYPRVLSDSEFYFLRKNIVKKAWDYSHDKEKVIPLLSGIGVLRCVHCGATMVKQTAANGKREQYRYCCDGRKSGRTDCPYPNWGFRAVTLEGAVLQLLADKIWIAEDKTNPIPEIQVKIDEISRKIDNLINLSAMTGATKELANQITDLNSQREALHEEIRLFEREMYSVDSQGWDKLAQFDLSDVQNEERLKVRLKIKGALHEIECSRIDSKKNLFVLVYLDGLRQRLVIENNRGLKKGQIFVDLKTINDRQILESAGMVLHPCIEMIIDADWKAPEEIPGLLSEEFGI

SEQ ID NO: 27162 - protein, 558 aa, synthetic construct
MTKLYSYIRFSSMRQSDGSSYERQIRMAKEIADRYNLELVNDYQDLGVSAFKGANSKTGALSRFLDEIGRSIPVGSWLFIENLDRLSRQDIISAQELFLSIIRRGITIVTGMDNKIYSIETVTANPMDLMFSILLFIRGNEESQTKRNRTNSSALLKIKAHQQNPQSPAVAIEEIGKNMWWTDTTSGRVLPHPVYFPVLQKIVQLRQEGHSAGVILDYLNEHHEPPAPTSNKKHGKWSRAMVSRLFNTKALIGVKTVNVDGVEYELRDYYPRVLSDSEFYFLRKNIIKKAWDYSHDKEKVIPLLSGIGVLRCVHCGATMVKQTAANGKREQYRYCCDGRKSGRTDCPYPNWGFRAVTLEGAVLQLLADKIWIAEDKTNPIPEIQVKIDEISRKIDNLINLSAMTGATKELANQITDLNSQREALHEEIRLFEREMYSVDSQGWDKLAQFDLSDVQNEERLKVRMKIKGALHEIECSRIDSKKNLFVLVYLDGLRQRLVIENNRGLKKGQIFVDLKTINDRQILESAGMVLHPCIEMIIDADWKAPEEIPSLLSEEFGI

SEQ ID NO: 27163 - protein, 558 aa, synthetic construct
MTKLYSYIRFSSMRQSDGSSYERQIRMAKEIADRYNLELVNDYQDLGVSAFKGANSKTGALSRFLDEIGRSIPVGSWLFIENLDRLSRQDIISAQELFLSIIRRGITIVTGMDNKIYSIETVTANPMDLMFSILLFIRGNEESQTKRNRTNSSALLKIKAHQQNPQNPAVAIEEIGKNMWWTDTTSGRVLPHPVYFPVLQKIVQLRQEGHSAGVILDYLNEHHEPPAPTSNKKHGKWSRAMVSRLFNTKALIGVKTVNVDGVEYELRDYYPRVLSDSEFYFLRKNIVKKAWDYSHDKEKVIPLLSGIGVLRCVHCGATMVKQTAANGKREQYRYCCDGRKSGRTDCPYPNWGFRAVTLEGAVLQLLADKIWIAEDKTNPIPEIQVKIDEISRKIDNLINLSAMTGATKELANQITDLNSQREALHEEIRLFEREMYSVDSQGWDKLAQFDLSDVQNEERLKVRLKIKGALHEIECSRIDSKKNLFVLVYLDGLRQRLVIENNRGLKKGQIFVDLKTINDRQILESAGMVLHPCIEMIIDSDWKAPEEIPSLLSEEFGI

SEQ ID NO: 27164 - protein, 560 aa, synthetic construct
MTKLYSYIRFSSMRQGEGSSYERQIKMAKEIADRYGLELVNDYQDLGVSAFKGANSKTGALSRFLDEIGRSIPVGSWLFIENLDRLSRQDIISAQELFLSIIRRGITIVTGMDNKIYSIETVTANPMDLMFSILLFIRGNEESQTKRNRTNSSALLKIKAHQQNPQSPAVAIEEIGKNMWWTDTTSGYVLPHPVYFPILQKIVKMKQEGHSTGSVLDYLNEHHTPPAPTSNKQHRKWSIAMVSRLFKTKALIGVKEVTVDGVQYELKDYYPRVLSDSEYYFLKNNLIKKAWSFGHAQEKTIPLLSGIGLLKCAHCGSPMVKRKAANGKVEQYRYTCDGEGSGRTDCLYPNWGFRASSLEGAVLQLLADKVWIAEDKANPIPEIQVQIDEISRKIDNLINLSAMTGATKELANQITDLNTQREALHEEIRLFEREMYSVDSQGWEKLAQFDLSDVQNEERLQIRLKIKGALRSIECARIDRNKNLFTLVYLDGLRQRLVIENNRGIRKGQIFVDLKTINDRQILESAGMVLHDHIDILIDEKAFYDGLPKEEDGPLSKFGI

SEQ ID NO: 27165 - protein, 560 aa, synthetic construct
MTKLYSYIRFSSSRQADSSSYERQKRTAKEIAEKYGLELVTSYQDLGVSAFKGANSKTGALSRFLDEIGKSVPVGSWLVVENLDRISRQSIIEAQELFLSIIRRGITIVTGMDGKVYSKESVNANPLDLLLSVMMFARANEESQTKRNRTNSSALLKIKAHQQNPQSPAVAIEEIGKNMWWTDTTSGYVLPHPVYFPILQKIVKMKQEGHSTGSVLDYLNEHHTPPAPTSNKQHRKWSIAMVSRLFKTKALIGVKEVNVDGVQYELKDYYPRVLSDSEYYFLKNNLIKKAWSFGHAQEKTIPLLSGIGLLKCAHCGSPMVKRKAANGKVEQYRYTCDGEGSGRTDCLYPNWGFRASSLEGAVLQLLADKVWIAEDKANPIPEIQVQIDEISRKIDNLINLSAMTGATKELANQITDLNTQREALHEEIRLFEREMYSVDSQGWEKLAQFDLSDVQNEERLQIRLKIKGALRSIECARIDRNKNLFTLVYLDGLRQRIVIENNRGIRKGQIFVDLKTINDRQILESAGMVLHDHIDILIDEKAFYDGLPKEEDGPLSKFGI

SEQ ID NO: 27166 - protein, 558 aa, synthetic construct
MTKLYSYIRFSSMRQSDGSSYERQIRMAKEIADRYNLELVNDYQDLGVSAFKGANSKTGALSRFLDEIGRSIPVGSWLFIENLDRLSRQDIISAQELFLSIIRRGITIVTGMDNKIYSIETVTANPMDLMFSILLFIRGNEESQTKRNRTNSSALLKIKAHQQNPQSPAVAIEEIGKNMWWTDTTSGRVLPHPVYFPVLQKIVQLRQEGHSAGAILDYLNEHHEPPAPTSNKKHGKWSRAMVSRLFHTKALIGVKTVNVDGVEYELRDYYPRVLSDSEFYFLRKNIIKKAWDYSHVKEKVIPLLSGIGVLRCVHCGATMVKQTAANGKREQYRYCCDGRKSGRTDCPYPNWGFRAVTLEGAVLQLLADKIWIAEDKTNPIPEIQVKIDEISRKIDNLINLSAMMGATKELANQITDLNSQREALHEEIRLFEREMYSVDSQGWDKLAQFDLSDVQNEERLKVRMKIKGALHEIECSRIDSKKNLFVLVYLDGLRQRLVIENNRGLKKGQIFVDLKTINDRQILESAGMVLHPCIEMIIDADWKAPEEIPGLLSEEFGI

SEQ ID NO: 27167 - protein, 522 aa, synthetic construct
MKRTFDHIKHVAIYLRISQEKRGENVETLENHRQILCDFCKENGYTYEEYGEVISGGKSEIEQRKELQRLLEDIEKFDAILCFELTRLSRNGLISQTVKQYCIDYDKPILTPYQSYDLANSETDRLLYDVGSMISSHEHGTIGKRSKANKKQMSKAGLHVSGNVPFGYRRNNETKKLEIYEEEAKVVRYIFKLHSEGLGSFKIRDILNAEGYKSATGKAFELPTIKRIIKNPTYKGTIVFNDRKKVKKNGKFVYEPVETIQVDNAHPAIIPPDEWDRANRERISRAKQAAVIREKPASTTGTTMLKDLVYCGVCGRKMRIFFDDKSSTGYVIQRCYHLYNGEKCPNRGIKLELVEKEVTKALPNFKSLLEKSVQRLQQEKEAGVETDIKRKIKQQERKLNDLNEQQDKLIDLALKGIFNEEEIRNKKQELIDEIKYTESAIVDLKEKIGNIDLNDHINSLMNIIELIEKLPNMEPGEVNQSLKTFISKIVYTRVLPPELLKKSTRNKQRKEYPFEIEIEFIE

SEQ ID NO: 27168 - protein, 563 aa, synthetic construct
MNREGKKCVLYPRVSTEMQVDGYSLEGQKNSLKRFADREEMEIVGVYEDAGKSGKSIEGRPAFKKMLSDIKNGLEIDYILVYKLSRFGRNAADILNSLEFVQSYGINLICIEEGIDSSQTSGKLLISVLSAVAEIERENIIEQTMNGRREKARQGGWNGGFAPYGYYLENNQLLIEETEAKAIRIIFEKFGNSDIGLGGVAKYLNLQGIKKIPRQNGKLETWSSHFIRQILDNPVYCGKIAYGRRTREKVKGTKNEYKQVHTDDYILEDGQHEGIVSAELWEKVRAKRIATGIKQPSKVGKDRSHLLTGVLKCPMCGSSMYTNKHAWTNKDGTYKEVYYYICGRNKQERGHHCDYKASLRKTDIEPLVIEAVKELVSDKYFAREIKSRIGIQTDTGNVDKEIANYESKLKEVDLNKARLEREIDNLPADARYRERKIHDMTLRLDGLYDTIVELEERIEDAKLRRSSIEMEAITLENVYKIMKNFGKLYAIMSDEEKKSVISYLIKEIQIYPNGESEMPLKSIEFNFPIYRDGKEVRKVLWERGNTVERVVSKSIKSDINPNN

SEQ ID NO: 27169 - protein, 521 aa, synthetic construct
MKKITKIEGNTANSFIKPKTRVVAYCRVSTGSDEQLVSLQAQKAHYESYIKANPEWEYAGLYYDEGISGTKKENRSDLLRMLSDCETGRIDLIITKSISRFARNTTDCLEMVRKLIDLGVHIYFEKENINTGSMESELMLSILSGLAESESISISENTKWAIQRRFQNGTFIISYPPYGYQNIDGQMKVIPKQAEIVKYIFAEVLSGKGTQKVANNLNQKGIPSKRGGRWTATTIRGILTNEKYTGDVILQKTYTDSHFNRHTNYGEKNMYLVENHHEAIISYEDFEAVDAILNQRAKEKGIEKRNSKYLNRYAFSSKIICSECGSTFKRRIHSSGPRKYIAWCCSKHISNITECSMQFIRDDDTKTAFVTMMNKLIFGQKFILRPLLNGLRNQNNAASFRRIEELETKIENNMEQSQMLTDLMAKGYLEPALFNKEKNSLEAERERLLAEKDQLTRSVNGNFAKVDEVDRLLKFATKSKMLTAYEDELFENYVEKIIVFSREEVGFELKCGITLKERLVN

SEQ ID NO: 27170 - protein, 523 aa, synthetic construct
MAVSRNVTVIPAIKRVGNNKNSESKSKIRVAAYCRVSTDSEEQASSYDIQIEHYTNYIKKNKEWELAGIFADDGITGTNTKKRDEFNRMIEECMAGNIDMIITKSISRFARNTLDCLKYIRQLKDKNVAVFFEKENINTMDSKGEILLTIMASLAQQESQSLSQNVKLGIQYRYQQGEVQVNHKRFLGYTKDENKQLVIEPKGAEVVKRIYREYLEGASLLQIARGLETDGILTAAGKAKWRPETLKKILQNEKYIGDALLQKTYTVDFLSKKRVKNNGIVPQYYVENSHEPIIPRELFMQVQEEMVRRANLRGGKGGKKRVYSSKYALSSIVYCGHCGDIYRRVHWNNRGYKSIVWRCVSRLEEKGSECTAPTINEETLQTAVVRAINELLANKEPFLSTLQKNIDTIFNEESDNDTDELDSKLEELQIELLKQAKSKNDYDNVADEIYRLREMKQNSLVENAEREGKRQRIAEMTAFLNEQSHELEEYDEQLVRRLIEKVTIRDDRIEVEFKSGVKIEEMI

SEQ ID NO: 27171 - protein, 541 aa, synthetic construct
MPKAISYIRFSTKIQSVGDSTKRQSKYINDWLKRNPDYYLDESLRFQDLGISGFSGANAKSGAFGEFLAAVESGYIEAGSVLLVESLDRVSRQDIDTAGEQLRKILRSGVEVVTLVDNEWYTKESLKDSLSMIKAMLVMERAHEESAMKSTRLRSMWAAKRERAANGEIMSKRCAAWLKVSDDRSHFEFIPENVKAVQRVFQLRLEGLSHVKIAKQMNDEGFSTLNQFKSVTGGWSQSSVTELLSNRSVIGFKVPSKSMAVKGVSEIPNYYPSIITDEQFYAVQQLKQGSGRKPSSDLPLLTNLFKGVLRCSECGFIVVVAGVSAKRSGIYKCSMKSEGRCNSVGFSRLQTDRALVQGLLYNTNRLSLNRDNGSAIGTLQSELEQLQKQRERLIKLAMLADDTESMAKDLKALNSQIKDAEKAVSEVHQREQSSQLETISHLDLTVKKDRVEAQIIIKRIVKEIRLNTAGKKCDVFLHNGLKLLNFPLDRVVDGAQWLEVLPLIDGDEFDFEGFTTKPRHIALEEAPDWVKEMDEQSNQPL

SEQ ID NO: 27172 - protein, 576 aa, synthetic construct
MKPKAYSYVRMSTDVQLKGDSLRRQTEESKRYCDENGLELVEDFKLQDIGISAYHGKNVAQGALGRFLALAQDGSIPKGSFLIVESLDRISREKPETATALFLQILQSGIHIVTLTDRHVYKSGSGNFTDIIVSVVIMARAYEESQTKSLRVGAAWENKRKNIHEKKLTQVAPAWLRLSEDRKAYDVIPERLAVLQAIFNHADNGKGSYQIARKLNLDSVPTFAPSQGWHESYVSKLLTNRAVLGEFQPHRYIEAKRTQAGDPIADYFPAVISRDQFERIQAGRAVRRNRGSGRKGRNNINLFSGVATCGYCNGKTMIVDKGAGPKGGIYIRCDNARRGNECWAGLWPLKHLETAFLFFVKELDLKSLIVDSSAKDARLLAEGQVAAISNELVTKKKMRDGAFELLSDDSIGSDYIKVRIADLSGEIQRLEIELAELNTRAKRELASQADSDLDDQILIDAISAGPKDNLDSRIAVADWIRRNVQQMKIYPDGRDGPQREIDRMKVSLDPEVAQLLNASISYAKRHDALIDGSHRHFSVAFEGHRFRAVEVDRDDPTKHIVMTFADDDTWGTDRAS

SEQ ID NO: 27173 - protein, 624 aa, synthetic construct
MIKTFIYSRVSSQEQLSGGGLDRQETDVREYVTRNGLDQYEIVAMVDRGISGYDGSNMRDGELGKWYKDAITGMYWGSHLVLEAIDRFSRRDPMLAMEDFTVLVNKGGIKVHIVKFNTFINGDNLPMLSMMMNLAHSESKQKSDRISKGWQRRRRMALDNGTAITARTPYWIDVRDNEYRLNNSSIAVVEAFAMYKQGLSCGLIAKKLNELKHYFPYMWTKTAVQHIVDGLNTSGIIDAPRAIKTIKAFYKSGFSVEDIAKKMNAEFQFMKEWNAPAVHKLLQNKSVTGLVEIQKRKLIQEFDSDGKPLELRTKSEGEKYFESIYPQIISIDDFELIQKLLESNRKVDTKTGKGQTTGGTVTQNEDGELVKQFILSSLCRCYKCGGAMFNNIVRSKRKNGKVDTYSYLRCLNERDAHCDVKALNYPVIERAIIEHVKGLNFDTMFKGTNNSELELLKTREVELLRDIATYEDAIAARKAAGKNTSPVLVTSLVDAQDDLEALQKKIRAISSVTVNAEELTSLNESVFDVAEYELRNMVELELQKIIKRITFNCTEKNIYFITIQYNTGTVLQHGLKVDKKKGVIETYELHEGNKGYVSNGEVITPALIEAAESKNIGIFEGKVM

SEQ ID NO: 27174 - protein, 544 aa, synthetic construct
MTKRVAVYVRVSTVRQAVNDVSIPDQIRQAEDYCQQKGWELVEQYIEAGASATNDRRPAFQRMIADACVSPSPYDIILVHSLSRFSRDAIDQGLYKRKLEQHDVLLKSMTQDFGEGAQADLISTIIGACDQHQSAETAKHVSRSMIENARQGFWNGARPPLGYVTYVSEKRGEKAKKKLKIDPKSSEIVKLIFSLYLEGIDDLGPMGIKSITDYLNRRGYKTATGSDFYIGQVHKILGRTSYMGMHYYNQRDNKTGKLKSRDEWVPMAVPVIIEPEIFQRVQDKLASRKPEVQAPRISNSKVLLTGAAYCESCGSPLMLTTGKSGRYRYYSCSGKHLKGDSSCERPIRVPEQNLDQLVSEQVVHRVLAPSRLKGLVGAVLDNHTQTKSKLHTEAKELRRQLRDVDRKLDRLFDAVSEGVVTDSSAFRRSQNKLEAEREELMRLIAIKDRRLQVGLKRISTRQLELFGKKLQKMLLSGPFAFRKEYLHLLVDQIEVGKEQVTIKGSKAALAASMQSVKMGDEKVPNYIREWRTSKEKLRTAFSRH

SEQ ID NO: 27175 - protein, 521 aa, synthetic construct
MENRGSEKSVIYARVSSKEQEREGFSIPAQKKVLREYALKHGLTVAKVFEEAETAKSSGRKQFSKMVHFLRDNPDIKHLLVEKTDRLYRNFHDYVELDFESLGVTIHLVKENEILSRDSRSHEKFVHGIKMLMAKNYIDNLSEEVKKGQTEKAAQGIWPSNAPIGYINKLENKTIVPDPKKAPLIAKAFEMAATGQYSLAKLKRRLYEMGLRSPRAGKELGKEAMSRVLKNPIYYGPFKWKDKIYQGVHFPIISKELFDKAQFTMGFAQKPKLTKRDFSFAGIMTCGHCGCAITAEQKRKKSGKTYTYYHCTNGKGSCENVTYLREEKIDEAFADALLRIQLNDEIIEFTRTALIDSSKDEREFRETQIKALNERYTKLESYISQCYQDKLDGHLEPDEWQSKTAVWKSEQEELSNRLNALREANTNYMLEGVKLMELANRASELFKVMTPEEKRETLGLVLSNSRVVNGSVEYDYKKPFDMFVNVTDLSKWRDLRVLNISRNLKHHFGSISQSHTLPTGS

SEQ ID NO: 27176 - protein, 558 aa, synthetic construct
MTKLYSYIRFSSMRQSDGSSYERQIRMAKEIADRYNLELVNDYQDLGVSAFKGANSKTGALSRFLDEIGRSIPVGSWLFIENLDRLSRQDIISAQELFLSIIRRGITIVTGMDNKIYSIETVTANPMDLMFSILLFIRGNEESQTKRNRTNSSALLKIKAHQQNPQSPAVAIEEIGKNMWWTDTTSGRVLPHPVYFPVLQKIVQLRQEGHSAGAILDYLNEHHEPPAPTSNKKHGKWSRAMVSRLFNTKALIGVKTVNVDGVEYELRDYYPRVLSDSEFYFLRKNIIKKAWDYNHDKEKVIPLLSGIGVLRCVHCGATMVKQTAANGKREQYRYCCDGRKSGRTDCPYPNWGFRAVTLEGAVLQLLADKIWIAEDKTNPIPEIQVKIDEISRKIDNLINLSAMTGATKELANQITDLNSQREALHEEIRLFEREMYSVDSQGWDKLAQFDLSDVQNEERLKVRMKIKGALHEIECSRIDSKKNLFVLVYLDGLRQRLVIENNRGLKKGQIFVDLKTINDRQILESAGMVLHPCIEMIIDADWKAPEEIPGLLSEEFGI

SEQ ID NO: 27177 - protein, 547 aa, synthetic construct
MKLLVTYIRWSTKEQDSGDSLRRQTNLIDAFYSKHKNDYYLLPAHRYVDKGKSGFHQQHKNQGSDFRRMFENVMSGAIPEGSLIVVENFDRFSRADIDTAIDDVRQILRKGVSILTLGDGELYDKSALTDPVKLIKHIIIAERAHQESLVKQKRIAQVWNHKTQLARELKKPMGKQAPGWLELSEDGSHYIVDEDKASLVNIIYDKRLSGMSMFAICKWLNEQGYPTINQRKVRISKTKKPDGNWSALSVKHILTSRSVLGYLPAKISTEDRKTVLREEIEGFYPQIVTDSKFYAVQQLLEETGKGKTSSGEHWLYVNILKGLIRCKCGLVMTPTGIRKPVYQGTYRCNGNKESRCSYGTVSRKLLDTQLCSRLFSKLSQLHDEATDTAKLDELQRRLNAVDGELEKLTETLIQLPNITQIQEALRVKQEEKDELIVQLSREKARVKSVSSLDLSGLDMESVEGRTEAQIIIKRLVKEIVVSGNEKLVDIYLHNGNMIRGFPLDGKDDHTLTLEEATDEMQPLDDMLIFGEPVTRIYPAGDMEEVDA

SEQ ID NO: 27178 - protein, 547 aa, synthetic construct
MKLLVPYIRWSTKEQDSGDSLRRQTNLIDAFYSKHKEEYYLLPAHRYVDKGKSGFHQQHKAQGSDFRRMFENVMSGTIPEGSLIVVENFDRFSRADIDTAIDDVRQILRKGVSILTLGDGELYDKSALTDPVKLIKHIIIAERAHQESLVKQKRIAQVWNHKTQLARELKKPMGKQAPGWLELSEDGSHYIVDEDKASLVNIIYDKRLSGMSMFAICKWLNEQGYPTINQRKVRISKTKKPDGNWSALSVKHILTSRSVLGYLPAKISTEDRKTVLREEIESFYPQIVTDSKFYAVQQLLEETGKGKTSSGEHWLYVNILKGLIRCKCGLVMTPTGIRKPVYQGTYRCNGNKESRCSYGTVSRKLLDTQLCSRLFSKLSQLHDEATDTAKLDELQRRLNTVDGELEKLTETLIQLPNITQIQEALRVKQEEKDELIVQLSREKARVKSVSSLDLSGLDMESVEGRTEAQIIIKRLVKEIVVSGNEKLVDIYLHNGNMIRGFPLDGKDDHTLTLEEATDEMQSLDDMLIFGEPVTRIYPAGDMEEVDA

SEQ ID NO: 27179 - protein, 547 aa, synthetic construct
MKLLVTYIRWSTKEQDSGDSLRRQTNLIDAFYSKHKNDYYLLPAHRYVDKGKSGFHQQHKAQGSDFRRMFENVMSGAIPEGSLIVVENFDRFSRADIDTAIDDVRQILRKGVSILTLGDGELYDKSALTDPVKLIKHIIIAERAHQESLVKQKRIAQVWNHKTQLARELKKPMGKQAPGWLELSEDGSHYIVDEDKASLVNIIYDKRLSGMSMFAICKWLNEQGYPTINQRKVRISKTKKPDGNWSALSVKHILTSRSVLGYLPAKISTEDRKTVLREEIEGFYPQIVTDSKFYAVQQLLEETGKGKTSSGEHWLYVNILKGLIRCKCGLVMTPTGIRKPVYQGTYRCNGNKESRCNYGTVSRKLLDTQLCSRLFSKLSQLHDEATDTAKLDELQRRLNTVDGELEKLTETLIQLPNITQIQEALRVKQEEKDELIVQLSREKARVKSVSSLDLSGLDMESVEGRTEAQIIIKRLVKEIVVSGNEKLVDIYLHNGNMIRGFPLDGKDDHTLTLEEATDEMQSLDDMLIFGEPVTRIYPAGDMEEVDA

SEQ ID NO: 27180 - protein, 574 aa, synthetic construct
MTPTNQTTKQPNPTKQQQPLAHSYIRFSSSAQEKGDSINRQIASAQSWAERNGIPLSDVVYRDLGISAFKKVERPGLRQLTESIRSGHIKKGDYVLLERLDRLSRKDLDIAQEEIKSILRMGVNIVAIEDGLALTPNSVNDLNALVNIIFLAESAHRQSREKSERIKAAYASARQRARDGKAVKRRLPCWLEVKGDVYTFHPVYLPIVQRIIDLRRQGRGYSSIAKTLNAEGLPGRIGKSGSGTSKGWTGGSVREIVTSRALYGFYQPNITVEQERDDGTTKRVLQPDGDPIVDHYPPVIRYREWLAIQPDTATATAKNRVPAGGYNKTDRLSGVARCGVCGGRVALRIYRRPSKKAQGGMKDYRHWVCVAGYSSGTCPVTRAFPDLDLMIIKSIGHLEVVSTPVPSTCSTSAVDTIRATIDANKERAEQLQALLVDPEGGSVSFVYNALSTLQARIKELEQELEQLEKVEVDSGATTQEDIDRLAGYVDDVELFNHELRKIISAIRVQHFGKKGFRGVIEQVNGRRVGFVSTAPANPRRGHAKERIEFFARGLGIPEPGDVEQDLYPWEQDQD

SEQ ID NO: 27181 - protein, 567 aa, synthetic construct
MTSQQPKVHSYVRFSSKIQEMGASVARQMEITRRWAESKGLEMSDLRFNDLGISGFKNVSRPGLEELQGAIKVGAIRVGDWVAIERLDRLSRGTLSDVQGIIVSILKQNVNIVAVADGLELTRNSLDQLADVIRLATLSDIAHKQSVEKSLRVRDAKRRQCDAARNGAKAVRRRLPLWLERRPDDSGYTFNNYKDTVELIIKLRQRGRGWHGIATQLNEEHRAARWGKGWSDTTVRTIITNHALYGAWRTGKQNIDTDNKFFHGEIIPDHYPALISKYEWLELQPKPKSKNQPAGGRSRVNPIAHVARCAGCGGALIYKKSTRKSGDSTREYHSWVCRNAADGRCDVAGKSGFRDLGKFVIQAVSQFQHITPNRINVSEAQEKIQNEIVQYKERLAELRSALSKPRAGSVSALLDGIEDAERALELLYKQLDGLVVEDSTAEDIVRLGTLADDPELFNNLLRKLVKQILVTRKGRLSYSFTVEQVNGFTFRVEVIRVKQRGEPEVTYWTEGSLYPEKLFDSELREGIADLDDEGYLQQERIKALKSSRTGRLYTKQQRPQRFAFHRV

SEQ ID NO: 27182 - protein, 585 aa, synthetic construct
MTNNHQTPSPRSTSTTTRTPPQVVSYSRYSTKKQSKGFSLERQDENLKRWSDANGIPISELSFADLGISAFSGTAVREGLANMLEAVRQGAVPQGWWIAFERIDRLSRRGITETRRLIDQILQHGVNIVCIGEGIELRPDDDANDELKGSLMVAIHAHLAREQSAKASERIRSTAAAKRRRARETGAPIKKRLPYWLELSPDGSKYQFKAGRIETVRYIVKRRLEGRGFHGICAELNAMNTPPLTRMSKQWNDMAIAATVRNVALFGQYQPAITNEVEKVDSDGRRKMVWVAIPDGEPLDNYFPAVVDRATWDQIQSDSRTKMKAGRRGDNPVSGLTFCRHCGGTLPMKPASKTSTNGTRHTYRYWTCRGAVDGKCDHGKGIKDLDHFVVKACRRIVPRTLGQGDGGQDPAAAFEYQSLLERRGKVTTQIATLDAAMADPELGAAALKHIARQIDVATANLEQVDAAIATVEARQKADQDTTPEAVEKLKQLEGDPVAYNLHLKTLVHRIVAGAVQLDDGSWSDVALLFRFTVELLNGQRIDVTVSRRNRWDKDPVEFYSHSEDATSTGGEGDLFPWETDDGQDD

SEQ ID NO: 27183 - protein, 562 aa, synthetic construct
MSTIKAYSYLRFSTTRQVRGDSARRQLELARDYAKRKGLELQELALADMGVSAFKGANRDAALGVFLRLVQDGKIPKGAYLLVESHDRLSRQNVEDALMQFMEIIRAGIVVVTLTDEIEYRQGQLDMSKLMLSLVYMSRANEESEMKSRRAKAVWEQSRKAAVESKTLIRNAYLPQWLKWEGDRVAIIPERAAIVQRMFALAMQGYGYTRIAAILNSEGHTGFRKNNPWRPSGVGSLLRNRRVIGEYQNFTKVDGQRQPIGEPIPEYYPAIVSISDFQEVQLQIATRNKHSGSARRGRFDNLFSGILRCQCGASMVYNDKGKKGAPRYYLVCPMREANNCDMPMLRYDAFEPQALVAISHLKPVMDARSAKSTQLWQLQNDIAKLTDQVNAQKARKRRALTLALESDDPMYNESLSNIHNDLCLMESQLDELTVLQKQLLTANRSIQLLKATEMLTMESRQLFNTQLHQSLNTMQLVLHRDFIAVAYYSKELDERPLLEQAFTVGLASSEVMEADGEMVCRTIKSPPYIDTSWFSELEMKPSESYEAIDDPEGFCVQELYDS

SEQ ID NO: 27184 - protein, 575 aa, synthetic construct
MTSPQTPTKQRPNPSTTRQTPLAHSYIRFSSIAQEKGDSISRQIASATSWSEKRGIPLSDVVYRDLGISAFKKVDRPGLRQLTESIRAGIIRQGDYILLERLDRLSRKDLDIAQEEIKSILRMNVNVVAIEDNLELTPESVNDAQALIRIIILAENAHRQSREKSERIKAAYASARQRARDGKAVKRRLPCWLEVAPDGNTYTFHPVYLPIVQRIIELRHAGRGYSSIAKTLNAEGLPGRIGKSGTTSKGWTGGSVREIVTSRALYGFYQPHITVEKERDDGTTKRVLQPDGDPIVDHYPPVLGYREWLAIQPDTTVTAKNRVPAGGYNKTDRLSGVARCGVCGGRVALRIYRRPSKKAQGGMKDYRHWVCVAGYSSGTCPVTRAFPDLDLMIIKSIGHLEVVSTPVPSTCSTSAVDSIRATIDANKERAEQLKSLLVDPEGGDVGFVYNALSTLQARIKELEAELEQLEKVEVDGCGNTTQEDIDRLAGYVDDVELFNHELRKIISAIRVQHFGKKGFRGVIEQVNGRRVGFVLTAPENPKRGHAKERIEFFARGLGIPEPDVELFPWETEQDD

SEQ ID NO: 27185 - protein, 558 aa, synthetic construct
MTKLYSYIRFSSMRQSDGSSYERQIRMAKEIADRYNLELVNDYQDLGVSAFKGANSKTGALSRFLDEIGRSIPVGSWLFIENLDRLSRQDIISAQELFLSIIRRGITIVTGMDNKIYSIETVTANPMDLMFSILLFIRGNEESQTKRNRTNSSALLKIKAHQQNPQNPAVAIEEIGKNMWWTDTTSGRVLPHPVYFPVLQKIVQLRQEGHSAGVILDYLNEHHEPPAPTSNKKHGKWSRAMVSRLFTTKALIGVKTVNVDGVEYELRDYYPRVLSDSEFYFLRKNIIKKAWDYNHDKEKVIPLLSGIGVLRCVHCGATMVKQTAANGKREQYRYCCDGRKSGRTDCPYPNWGFRAVTLEGAVLQLLADKIWIAEDKTNPIPEIQVKIDDISRKIDNLINLSAMTGATKELANQITDLNSQREALHEEIRLFEREMYSVDSQGWDKLAQFDLSDVQNEERLKVRMKIKGALHEIECSRIDSKKNLFVLVYLDGLRQRLVIENNRGLKKGQIFVDLKTINDRQILESAGMVLHPCIEMIIDADWKAPEEIPGLLSEEFGI

SEQ ID NO: 27186 - protein, 520 aa, synthetic construct
MTEKNIMVIPARKRVGSTAAKEKIKKLRVAAYCRVSTETEEQNSSYEVQVAHYTEFIKKNNEWEFAGIFADDGISGTNTKKRDEFNRMIAECMDGNIDMVITKSISRFARNTLDCLQYIRQLKDKNISVYFEKENINTMDAKGEVLLTIMASLAQQESQSLSQNVKLGLQYRYQQGKVQVNHKRFMGYTKDEDGNLIIVPEEAEVIKRIYREYLEGQSLVGIGRGLEKDGILTAAGKPKWRPESVKKILQNEKYIGDALLQKTVTVDFLTKKRVKNEGHVPQYYVENSHEAIIPKELFLQVQEEIHRRSNIYTGEGKNKRIYSSKYALSAITFCGDCGDIYRRTYWNIHGRKEFVWRCVTRIEQGPEVCKNRTVKEDELYGAVMTAINRLLAGGNNMIKTLEENIHAVIGETTEYQISEINNLLEEKQKEIIKLANMGQGYEHLAEEIDELRDKRQTLLVEDASLSGENERINELIEFIRKNIFRTLEYDDKLVRKIIQSVTVYEDHFVIAFKSGFEMEV

SEQ ID NO: 27187 - protein, 499 aa, synthetic construct
MNVVIWTRVSSREQKEGYSIDAQLRVTREKAQRLGWNVVREFELDESAKRGAERKIFNEMLRWLAKNAKREKIKAILCHKLDRACRNMRDAVRLQELEDACGVQLSFVENEFGPGAAGTFSFNVMAAVAQYYSDNLREEVIKGLDEKVRQGWPTGLAPYGYINVDDRDEPIVPHPEKSKTLIRIFDLYSSGSHTFKSLADRLASEGHEFRDSQSRFNRTALSHILNNRFYIGELHRNGHVFEGRYQRVIHRATFDACQDILSGRKRRTGTYHLPLAGGLFRCEYCGQSITGERIRRKLKGGGIREHIYYRCCNNNRGPDHPKVRWKARDLEEAIAEDLEKMRMPTLEVADWFRKELWAAVHDLTGYRRQQATSFAKRKTELANMQDRLLNAYLAGTIDEEAYKAKSNELKAETASADESLDKLGDVDPARGELAVTLFDWTQKAAEIWRGSNNTVRRDILDAVCLNRVVSDVNLVLEKRKPFDTLAERPDLENSRGDRI

SEQ ID NO: 27188 - protein, 511 aa, synthetic construct
MNVVIWTRVSSREQKEGYSIDAQLRVTREKAQRLGWNVVREFELDESAKRGAERKIFNEMLRWLAKNAKREKIKAILCHKLDRACRNMRDAVRLQELEDACGVQLSFVENEFGPGAAGTFSFNVMAAVAQYYSDNLREEVIKGLDEKVRQGWPTGLAPYGYLNVDDREEPVVPHPEKAKSLIRIFDLYSSGSHTFKSLADRLASEGHVFRDSQSRFNRTALSHILNNRFYIGELHRNGHVFEGRYQRVIHRATFDACQEILCGRKRRTGTYHLPLAGGLFRCEYCGQSITGERIRRKLKGGGIREHIYYRCCNNNRGPDHPKVRWKAQDLEEAIAADLEKMRMPTLEVAEWFRKELGAAVHDLTGYRRQQAASFAKRKTELANMQDRLLNAYLAGTIDDDAYKAKSNELKAEAASADESLDKLGDVDPARGELAVTLFDWTQKAAEIWRGSNNTVRRDILDAVCLNRVVSDVNLVLEKRKPFDELAERPDLENSRDDRIRTCDPRLPKPVL

SEQ ID NO: 27189 - protein, 447 aa, synthetic construct
MPIRRLTWLRSVPSEGLFSTYGICFENDIIEIKYQNPQSILEDFMLKTKFGLNPNPRVVIYARMSSSKQNPRSPEQQITTIKDTLKRLGLNWQVVAVYRDDAISGRYFRKRPGFQKMLRELKSGVLRADYVLVDTFERLSRSENNAEIRRMLLKAGTLVLTADSQFADPNSVSGRALSFMEAYRASEECRTKAHNVLRGKKDAIREGKWPGSSPPFGFYLKNVMVIRHGVEELDHRILVPIPELKWIVEFIFTLSAQENFGPVRICKKLNSHPDIPSHLKPFTEATVASILRNELYYGEMVWGKNCTGIEDDVRVKQSIPEEEWVVNSEFCEPIISKELWQQSMQMIESRRRRVTAPDPDADHSGLRPRGVALKYPLSGLVVCSSCGRAMVSSASSAYTTKAGEVHSYASYGCPGYRSGACDNDRRVPESWLRETVIQLVKDRLFPQ

SEQ ID NO: 27190 - protein, 481 aa, synthetic construct
MKTMNKVAIYVRVSTTNQVEEGYSIDEQKDKLSSYCDIKDWNVYKVYTDGGFSGSNTDRPALESLIKDAKKRKFDTVLVYKLDRLSRSQKDTLHLIEDVFIKNGIEFLSLQENFDTSTPFGKAMIGLLSVFAQLEREQIKERMQLGKIGRAKAGKSMMWAKTSYGYDYHRDTGTITINPAQALAIKFIFESYLRGRSITKLRDDLNEKYPKHVPWSYRAVRTILDNPVYCGFNQYKGEIYPGNHEPIISKEEYDKTQSELKIRQRTAAENVNPRPFQAKYILSGIAQCGYCGAPLKIMLGVKRKDGSRLKKYECHQRHPRTLRGVTTYNDNKKCDSGFYYKDKLEAYVLKEISKLQDDADYLDKIFSGDNAETIDRESYKKQIEELSKKLSRLNDLYIDDRITLEELQSKSAEFISMRGTLETELENDPALRKNKRKADMRKLLNAEKVFSMDYEGQKVLVRGLINKVQVTAEDIVINWKI

SEQ ID NO: 27191 - protein, 507 aa, synthetic construct
MFFKETETQEIIKYEDYPYAVYARVSSEKDEQVTSIANQIDICHHWIEKNNYEWKDEAIQLDDGISGTVLLDRKAMQLILDKAQKRKLKMVVFKSISRLARDLKDALEIREVLLAHGVRVVTLEEGYDSLYEGKNSMKFEMFSMFAAQYPQTISVAASGALAAKARRGEHSGRVPFGFKKEGKFLAINEEEAKVVRFIFDLHNNHGYGHKRIVLKLNEELALGNIVKPQKTEFWQLSTVQTILKNPIYCGVFIANRHTQVKIGGRKKFIRNPKEKWTVYKDWCPKIISEEEYEKANNKEHKMRKKRFNPRNELRGMMKCGVCGCNMVVLPSYKYNQKREKKEFNYLKCSAYRRGGTALCVNHAPMQYKDLRAFVIKTLKQKGKKLKLDVKSDFEEQKKNRIKRTKIEIENAENKKKRLIELYLEDQLITKAEFQAKRKELEEQIEKLNDKLFMLEREEEETIDISNIKNAFAQLERTDQDLFEAFSALIDKLVIYEDGTVDFHYKFK

SEQ ID NO: 27192 - protein, 516 aa, synthetic construct
MKARKEIKDYEGTKAFLIARVSDPRQVDALPAQELRLNEYADRYKFSKELHRFDETAFKEDRAKFIEIVDEAIKYPKYFVMVFDKIDRLTRDVSSDVVRTLKNLVKEGRCELHFPSDGLIYHQHSPAHDKTRLDMGMVFGGYYSMAISDNVKRKIEQKLHDGEYPGKACIGYKNIKWEDTSGKVVKNIIPDPDRKQYISKAFELRLEGKSYRTIAKILREDGLRSNTKKQGIVGQSQIETMLKNPFYYGVMKYDGGLYPHKYEPIIDKSTFDKVQRINDQRTNEKTKTNTKQIFTFSGILKCATCGCTISSYEQKGHVYMRCTKAKVGVACDQPHIAEADILPQVTELLEKLNISEGIVNQVLELMKNEHDNIQLFYKNAITQTRAEYLRLEKKLGILYDDRLDGRITVNEYDKYVMKYKTEMEDLDRKLVEYTNNDTSFQLTSAYLLELASKAKNIFECSQPEQKNKILRMLLANPTLKAKRLQLPLLKPFASILDNSNSQNWLRQLGSNQRPNG

SEQ ID NO: 27193 - protein, 558 aa, synthetic construct
MTKLYSYIRFSSMRQSDGSSYERQIRMAKEIADRYNLELVNDYQDLGVSAFKGANSKTGALSRFLDEIGRSIPVGSWLFIENLDRLSRQDIISAQELFLSIIRRGITIVTGMDNKIYSIETVTANPMDLMFSILLFIRGNEESQTKRNRTNSSALLKIKAHQQNPQNPAVAIEEIGKNMWWTDTTSGRVLPHPVYFPVLQKIVQLRQEGHSAGAILDYLNEHHEPPAPTSNKKHGKWSRAMVSRLFATKALIGVKTVNVDGVEYELRDYYPRVLSDSEFYFLRKNIIKKAWDYNHDKEKVVPLLSGIGVLRCVHCGATMVKQTAANGKREQYRYCCDGRKSGRTDCPYPNWGFRAVTLEGAVLQLLADKIWIAEDKTNPIPEIQVKIDEISRKIDNLINLSAMMGATKELANQITDLNSQREALHEEIRLFEREMYSVDSQGWDKLAQFDLSDVQNEERLKVRMKIKGALHEIECSRIDSKKNLFVLVYLDGLRQRLVIENNRGLKKGQIFVDLKTINDRQILESAGMVLHPCIEMIIDADWKAPEEIPGLLSEEFGI

SEQ ID NO: 27194 - protein, 560 aa, synthetic construct
MTKLYSYIRFSSMRQGEGSSYERQIKMAKEIADRYGLELVNDYQDLGVSAFKGANSKTGALSRFLDEIGRSIPVGSWLFIENLDRLSRQDIISAQELFLSIIRRGITIVTGMDNKIYSIETVTANPMDLMFSILLFIRGNEESQTKRNRTNSSALLKIKAHQQNPQSPAVAIEEIGKNMWWTDTTSGYVLPHPVYFPILQKIVKMKQEGHSTGSVLDYLNEHHTPPAPTSNKQHRKWSIAMVSRLFKTKALIGVKEVTVDGVQYELKDYYPRVLSDSEYYFLKNNLIKKAWSFGHAQEKTIPLLSGIGLLKCVHCGSPMVKRKAANGKVEQYRYTCDGEGSGRTDCLYPNWGFRASSLEGAVLQLLADKVWIAEDKANPIPEIQVQIDEISRKIDNLINLSAMTGATKELANQITDLNMQREALHEEIRLFEREMYSVDSQGWEKLAQFDLSDVQNEERLQIRLKIKGALRSIECARIDRNKNLFTLVYLDGLRQRLVIENNRGIRKGQIFVDLKTINDRQILESAGMVLHDHIDILIDEKAFYDGLPKEEDGPLSKFGI

SEQ ID NO: 27195 - protein, 520 aa, synthetic construct
MKKITKIDELPQGQLPNTKLRVAAYARVSTDSDEQLESLKAQREHYERYIKSNPEWVFAGLYYDEGISGTKMEKRTELLRMIRDCKQGRIDFIITKSISRFARNTVDCLELVRKLIDIGVYIYFEKENLNTGDMESELMLSILSGFAAEESASISQNSTWSIQKRFQNGSYVGTPPYGYTNIDGEMVIVPEEAEIIKRIFAECLSGKGGGTIARGLNKDKIPASRGNHWSAGTVIDMLRNEKYMGDVLLQKTYTDSNYNRHPNTGEKDQYYYKDNHEPIVSREDFAKVQDLIDERAKMKCKGMKKNVYLNRYALSGKMVCGECGRNFRRKTNYSVGRSYIAWSCIGHIEDKESCSMLFLRDGEIKATFTTMMNKLAFSNKLILEPLFKSISQIDEESDRERMDAIDKRMEQLMEERNTLITLMAKGFLEPALFNQERNVLDSEMKNLSTEKTNLVSNSASGVLRANEIKDLINYVSADNFNGDYTEELFEEFVVNIIVNSRDELTFNLKCGLSLKEKVVR

SEQ ID NO: 27196 - protein, 558 aa, synthetic construct
MTKLYSYIRFSSMRQSDGSSYERQIRMAKEIADRYNLELVNDYQDLGVSAFKGANSKTGALSRFLDEIGRSIPVGSWLFIENLDRLSRQDIISAQELFLSIIRRGITIVTGMDNKIYSIETVTANPMDLMFSILLFIRGNEESQTKRNRTNSSALLKIKAHQQNPQNPAVAIEEIGKNMWWTDTTSGRVLPHPVYFPVLQKIVQLRQEGHSAGVILDYLNEHHEPPAPTSNKKHGKWSRAMVSRLFNTKALIGVKTVNVDGVEYELRDYYPRVLSDSEFYFLRKNIVKKAWDYSHVKEKVIPLLSGIGVLRCVHCGATMVKQTAANGKREQYRYCCDGRKSGRTDCPYPNWGFRAVTLEGAVLQLLADKIWIAEDKTNPIPEIQVKIDEISRKIDNLINLSAMMGATKELANQITDLNSQREALHEEIRLFEREMYSVDSQGWDKLAQFDLSDVQNEERLKVRMKIKGALHEIECSRIDSKKNLFVLVYLDGLRQRLVIENNRGLKKGQIFVDLKTINDRQILESAGMVLHPCIEMIIDADWKAPEEIPGLLSEEFGI

SEQ ID NO: 27197 - protein, 531 aa, synthetic construct
MTIQNTLPHAFAEVFRDDETINVYSYVRFSSKAQSLGFSEVRQIEQINRFFEQYPSARQVERYEDLGVSAFKGKNLKSGQLAKFVERIKSKEIQPNALLLVESFDRISRVGGYDALELIISIIQSNCAIYTLFDNRLYSKRKINSSSDINLIQNILERANHESRNKSDRISDAKARNLEKGEHGGIITKRCPFWIDFSDGKFVLNEHAKAVKKATELCFDMGFQSIAKELNKESTTRKYSDSSVGKLLHKPAIYGSFLAMKNDENGRRTIVNKEIKNYYPAVISESEFHRISAKLKERQDPKLAGRKATDFKNVLRGLVFCACGSTFRFHAQKAMYVDLVCHSSASGQCEYAKKKMGVRHRYARIEEIFFAYQNKMPFNLITTKNEDIKALEKEHNEITGQIILKEKALENTFAMLEKTSESAQKYISIKIDELSSELDKLKTDEHKINLKISSIHLSSKSDINTKEIFRLLISEKGRMKINNFLHSQSVKLIITPLRKKYYSIDIFHADKHLDTIDVTPDGYTARRGIHA

SEQ ID NO: 27198 - protein, 559 aa, synthetic construct
MKTKLYSYIRFSSMRQNDGSSYERQIRMAREVAAKYDLELVNDYQDLGVSAFKGANSKTGALSRFLDAIGRSVPVGSWLFIENLDRLSRADIVSAQELFLSIIRRGITIVTGMDNKIYSLDTVTANPMDLMFSILLFIRGNEESQTKRNRTNSSALIKIKSHQENPQNPAVAIEEVGKNMWWTDTTSGYVLPHPTYFPVVQEIVELRKNGRSTAEILDHLNETYTPPPAVSNKKHSKWSRAMVERLFHTRALIGIKEVSVDGVNYELKDYYPRVIDDATFYHLKKNIGARAWNFGDKEEVKPIPLLSGIGLLKCDHCGCAMVKVKGTNKRSDQYRYTCDATRSRRLDCEHPNWSFRGDQLEKAVLQLLADKIWIAEDKANPVPALKVQVDEISRKIDNLIALSAMTGATKELADQITTLNSERETLYNQIKMAEEEMYSVDSQGWEKLAEFDLEDVYNEERLKVRFKIKQALKRIGCSRIDRNKNLFVLEYIDGKTQRVVIENSRGTRKGRIFIDLKTINDRQILESNGLVLHPCLDMLTDKNWKPEEEIPGPLQEFGI

SEQ ID NO: 27199 - protein, 558 aa, synthetic construct
MTKLYSYIRFSSMRQSDGSSYERQIRMAKEIADRYNLELVNDYQDLGVSAFKGANSKTGALSRFLDEIGRSIPVGSWLFIENLDRLSRQDIISAQELFLSIIRRGITIVTGMDNKIYSIETVTANPMDLMFSILLFIRGNEESQTKRNRTNSSALLKIKAHQQNPQSPAVAIEEIGKNMWWTDTTSGRVLPHPVYFPVLQKIVQLRQEGHSAGSILDYLNEHHEPPAPTSNKKHGKWSRAMVSRLFATKALIGVKTVNVDGVEYELRDYYPRVLSDSEFYFLRKNIIKKAWDYNHDKEKVIPLLSGIGVLRCVHCGATMVKQTAANGKREQYRYCCDGRKSGRTDCPYPNWGFRAVTLEGAVLQLLADKIWIAEDKTNPIPEIQVKIDEISRKIDNLINLSAMTGATKELANQITDLNSQREALHEEIRLFEREMYSVDSQGWDKLAQFDLSDVQNEERLKVRMKIKGALHEIECSRIDSKKNLFVLVYLDGLRQRLVIENNRGLKKGQIFVDLKTINDRQILESAGMVLHPCIEMIIDADWKAPEEIPGLLSEEFGI

SEQ ID NO: 27200 - protein, 452 aa, synthetic construct
MKAAIYIRVSTQEQVENYSIQAQTEKLTALCRSKDWDVYDIFTDGGYSGSNMNRPALNEMLSKLHEIDAVVVYRLDRLSRSQRDTITLIEEYFLKNNVEFVSLSETLDTSSPFGRAMIGILSVFAQLERETIRDRMVMGKIKRIEAGLPLTTAKGRTFGYDVIDTKLYINEEEAKQLQMIYDIFEEEKSITTLQKRLKKLGFKVKSYSSYNNWLTNDLYCGYVSYADKVHTKGVHEPIISEEQFYRVQEIFSRMGKNPNMNRDSASLLNNLVVCGKCGLGYVHRRKDTVSRGKKYHYRYYSCKTYKHTHELEKCGNKIWRADKLEELIIDRVNNYSFASRNVDKEDELDSLNEKLKTEHAKKKRLFDLYISGSYEVSELDAMMSDIDAQINYYEAQIEANEELKKNKKIQENLADLATVDFDSLEFREKQLYLKSLINKIYIDGEQVTIEWL

SEQ ID NO: 27201 - protein, 580 aa, synthetic construct
MDISRVAIYARVSTEEQVKEGFSIAAQLQTLRQYAQIYNWEVIDEYVDEGISGKSVKGRPEMKRLIKDVENERFDAVIVWKISRLSRNMLETLMILDKFEKYNVKFISYSENFDTSSPIGRLVLQIMASIAEMERNTLAENVKLGMKQRALEGRWNGGVVFGYDTVKKELVINEKEAEVVQLIYHMYANGKGLRAISNHLNKAGYKTKRNRYFSINGVAQILDNVIYNGKISWLKFENWDSKRRKGKNPNPILVEGKHEPIISDELWSVVRARRKSKSFKQRQSNEPFLLSGLLRCPDCGQGMVPSITTHTRKDGTKRKHRYYVCSDFHNKGSAACKANSIKAYKAEETVIKKIEHFSSNKKRLYKTITDISSSSAHSISKLNKELEKIEIRLKEIEQLQAKYMDAFEKNTLPVDILQERLQKVSNDKRGLEQKKNEIIIQLGSIDSKVIQPDLIENLLKKFLSVYRKTSRENKKQLLQLLIDNISIKQIDKSRTIKNIELEFDFTELNISKTFILIHLLYRETDNEHTFSIPASDKELPPYLQQFLPLFVVRFPPINPKAPVHLLQEDQAHELVGEGHF

SEQ ID NO: 27202 - protein, 425 aa, synthetic construct
MRVRVIKPIAAKEKKLKVCAYARVSTDSLKQEDSLENQTSTYERIITSNPAYEYVGIYADQGISGYSENRPAFKSMIEKARAGEIDLIITKSVSRFARNTVTVLKVARELKELGVGIFFEEQNINTLSGDGEMMLTVLASFAQEESRSMSENNKWTMKKKFERGEIMVNTKRFMGYDKNEYGELIINPEEAKIVQRIFDMYLQGIGSFKIAAKLNEEGVQTITGKKWQDTTIRGMLKNEKYKGDCLLQKYYTPENMRGRTVRNNGEVQAYYIEENHPAIVSTEDWEKVQELMERRKKKRKIGAGGVEKYKNRYPLSGMLICPHCGKTLRRKQVYNKRIEWWCSTYITKGKSACKGIKIADEIASKKNITEQTVIEEVMIDGEKYYSYTSKTDYDRGIRNEPDAPTTENGSVLPRVNRQRRTAIKL

SEQ ID NO: 27203 - protein, 530 aa, synthetic construct
MKTCIYARRSTLKQGQAETIENQIKICERKAKELGLTIVDIKTDSASGTDDNNRPEVKELLKGAINKEYDCVIMKGISRIYRKTSKGLELIEKLDRHGVRVITVEEHFDSHARENRNGIGNLDTSRITMYLMFAEKESQKLAERIKFTQIEKAYAGEWNQASNAPIGYTYDSTTKKLSIDNSKSYVVRKIFKLYEQGMGMKAIAHYLNGDNPDKKTYPSSKGGRWSEYTVGYILKNRAYVGDVVYNKRSKKERPYKAPEALGKTSDDICIINDYNKEEDWIIAENAHEPLIERELFDKIQTMISTKSRRKGIRSNTSLFAGIAKCAKCGTGMTFKRGRKNSLGQVVSKDNYYCMNYIRYGKQYCDSHHVGARELQEAIFSDLEHILNSKDKLQRVLDKNKIVMSLDEKKAKERIVGIQKEMDSLIKKMDKLLEKNLAGDISDTQYKTFNEKYSAELDNLTEELKKARLTIANMSEQADNEMRFRQKLSNAIGIRNRAIEEQRHILLGLIDSIVINGNDIEDIVYKFERVD

SEQ ID NO: 27204 - protein, 572 aa, synthetic construct
MRFVAYLRISSYSQREKGDSIDGQREYIQRWAKSNGHEIVHWYVDEAASAFKGRRFVFDVMLHELSEQIIDANGVVVYSLSRFSRNLKNQLLAMEVLEKKGMILQSASEALPSEPSSFKFMTNILGILHEHQSRENAAVVSDRLRDTARKGFHTGGPLLFGYQSVSVKGDTSKERKKLVVKSDEAEVVKEIYSLSDIGLNGKGLGVKEIAKILNDKKITNRGKRWNKNTIHRILTNSAYKGEFEFGKTQKNEPGKNIIKIPVPKIVSKELYNRVQNKLSERQVAYNNVKSLRSSSLLTGTLRCPVCGSTMVISTGKGGKYKYYQCSLQVRQDPKLCSSKRLRKNEADNALRKALLEHVFTYKHLANIYNDTLEIVKNKKKVSDEKLRPIRNQISSLKTKVRNLVDLIADGKIEPNPAINRNMDEYNAQIALYEEKLDSYKSLASIPIKRFGKAQISSFVDNVQQYVKEANDEKLKQFLLATITEVTITEQKKLVLKGSNLALLYLISNEKVGTDYSVPTFVTIWRRDRDLNPRYAINVCRFSRPVLSTTQPSLRCGTYNREWSSRCKALNYN

SEQ ID NO: 27205 - protein, 559 aa, synthetic construct
MKTKLYSYIRFSSMRQSDGSSYERQIRMAREIAAKYDLELVNDYQDLGVSAFKGANSKTGALSRFLDAIGRSVPVGSWLFIENLDRLSRADIVSAQELFLSIIRRGITIVTGMDNKIYSLDTVTANPMDLMFSILLFIRGNEESQTKRNRTNSSALIKIKAHQENPQNPAVAIEEVGKNMWWTDTTSGYVLPHPTYFPVVQEIVELRKNGRSTAEILDHLNETYTPPPAVSNKKHSKWSRAMVERLFHTRALIGIKEVSVDGVNYELKDYYPRVIDDATFYHLKKNIGARAWNFGDKEEVKPIPLLSGIGLLKCDHCGCAMVKVKGTNKRSDQYRYTCDATRSRRLDCEHPNWSFRGDQLEKAVLQLLADKIWIAEDKANPVPALKVQVDEISRKIDNLIALSAMTGATKELADQITTLNSERETLYNQIKMAEEEMYSVDSQGWEKLAEFDLEDVYNEERLKVRFKIKQALKRIGCSRIDRNKNLFVLEYIDGKTQRVVIENSRGTRKGQIFVDLKTINDRQILESNGLVLHPCLDMLTDKNWKPEEEIPGPLQEFGI

SEQ ID NO: 27206 - protein, 514 aa, synthetic construct
MKKVYSYIRFSSTKQAFGDSHRRQSKAIQDWLANHPDHILDESLSFEDLGRSAFHGDHLKEGGALRAFLEAVKQGLIPPDSVLLVESLDRVSRQSISHAQETIRGILEQGITVVTLSDGETYNRQSLDDSLALIRMIILQERSHNESVIKSDRIKMAWSHKRQQFEQDGTKITGNCPGWLKLNSDKKSFSLIPHHIETIHRIFDEKLSGKSLHAIARDLNLENIPTITNKRVDTGWTPTRVRDLLLKESLIGVAYGVSDYFPPAISKEKFHAVQMIRGQGKGKKPTSRQPSSIDILKGICKCAECGSTLRQRNTKKTPEGRYPRGYLECRNRQLGRCNSKAFNRSLIEDILIQKVFPTLQYLSLKSNGDNISVTTLKADITSLEKGINNLISLAEKGLGDLDTLAQRITNNRVELESKKKDLRQAEAILSLMSDNDIQDSDRKTVEGRIKLQLAIKSFVKEIIFDYDKQEITIRLLNGKSFSGISVAREDKDFDHSSMFEVLQKSLLDVDGVCL

SEQ ID NO: 27207 - protein, 506 aa, synthetic construct
MRTVITYLRFSSATQGAEGADSTRRQNELFKQWLRKNSDAQVVASFSDEGLSGYKGKHLTGQFGDMLARIESGEFSEGTVLLVEAIDRIGRLEHLETEALMNRIIAHGIEIHTLQDGLIYTRDALSDDLGISIIQRVKSYVAHQESKQKSFRVSQKWKQRAKLALAGEQRLTRNVPGWIDPDTFKCNEHAETVRLIFKLLLDGESLHNIARHLQSNDIKSFSRRKDANGFSVHSVRTVLRSESVIGTLPASQRNDRPAIPNYYEAAIDAATFNKAQEILDKNRKGRTPASDNPLTINIFKGLFRCQCGASVHPTGTKNKYAGVYRCNNNPDGRCDVPPLKRKPFDKWMIDNFLGMIDVGNDGEAEGKIASLQHEVEIVTARIKKATALLLEMDDITELKAQVKGLNQKRTEIQTTIDTLKRKTSLTDKELPQLKDIDLTTKAGRVECQLILSKHLKGLTLGKDSVTVTLQNDTEITIPTNPLPLNDGSPIFEIADKELLDIDAYQL

SEQ ID NO: 27208 - protein, 547 aa, synthetic construct
MKLLVTYIRWSTKEQDSGDSLRRQTNLIDAFYAKHKEEYYLLPAHRYVDKGKSGFHQQHKAQGSDFRRMFENVMSGVIPEGSLIVVENFDRFSRADIDTAIDDVRQILRKGVSILTLGDGELYDKSALTDPVKLIKHIIIAERAHQESLVKQKRIAQVWNHKTQLARELKKPMGKQAPGWLELSEDGSHYIVDEDKASLVNIIYDKRLSGMSMFAICKWLNEQGYPTINQRKVRISKTKKPDGNWSALSVKHILTSRSVLGYLPAKISTEDRKTVLREEIESFYPQIVTDSKFYAVQQLLEETGKGKTSSGEHWLYVNILKGLIRCKCGLVMTPTGIRKPVYQGTYRCNGNKESRCSYGTVSRKLLDTQLCSRLFSKLSQLHDEATDTAKLDELQRRLNTVDSELEKLTETLIQLPNITQIQEALRIKQEEKDELIVQLSREKARVKSVSSLDLSGLDMESVEGRTEAQIIIKRLVKEIVVSGNEKLVDIYLHNGNMIRGFQIDGKDDHTLTLEEATDEMQSLDDMLIFGEPVTRIYPAGDMEEVDA

SEQ ID NO: 27209 - protein, 580 aa, synthetic construct
MKLYSYQRWSSAVQADGTSKARQSHAAEQYARDNNLEIVEIVDSGISGFRSLNSKNGALSQFLDAVDAGLIIKNSYLYVESLDRITRDEIDIALELFMGILRRGITIVTGMDNKIYTHAGIKGNPIDLLTSILLFTRAHEESKTKQQRTNGNALALIRRFQEGLPTTIKSIGSHPWWIDSSTDKFEAVRKHPILWKCAYDAVNLFLDGTSVFKVTKYLNETYPNAYKGKAWAIANVRKLRFNKAVYGTREITVDSKVYVLEHYYPALISEGQFLRLEKIRETTKYIGKVGEHTNNINLLSGMKIFRCGHCGGTMMAMRHNDTIRYLCEKGRGYNHDCKTWSLPGILVEHTLMLITTIAYINIQRKGGITREDYSHHISSTEELIADIGTKISRMTKLVSSGLGDIDEVINEMGELDKVRKQYVMELEVLQRKQLLSQDNSFEQLMMDFFTYAQYGVLQDPVHEYRNKLRDIVYSSIGEVKAWKVDRRLMISFQIKGDDEYYTFSAGDEPYNYIFYYGSPVQLGEDLTVQVAYELPADIKRRIRDYSNVYDASMKILGTANALLSVVNYPDLDGSLFWPRK

SEQ ID NO: 27210 - protein, 560 aa, synthetic construct
MSKEKIKVYLYTRVSTSIQIEGYSLEAQKSRMKAFAIYNEYEIVGEYEDAGKSGRSIEGRIQFNRMMEDIKSGKDGVSFVLVFKLARFARNAADVLSTLQIMQDYGVNLICVDDGIDSSKDAGKLMISVLSAVAEIERENIRIQTMEGRIQKAREGKWNGGFAPYGYKLEDGKLFINEEEAVAIRTIFDQYVNTTIGANGLSKYLENHGIRKIPRQNGKNPLFDAGLIRKILKNPVYNGKIAFGRRTLEKVHGTRNEYKQVEQDEYLISEGIHEAIVSDEVWQAAQVKLKSQAKKYEHVNKGKDTRTHLLSGIVKCPICGVGMFGNKCTKKKKDGTKYKDFYYYGCKHRQMIRGHKCTFSKQIREELLDDAVAEVIVKIVSNPKFASMMQEKINMKVDTSEIEKEIDNYQKELRKSHSTKFRLIEEIDNLDAEDKHYKRRKQDLDDRLYRMYDKIDELESSLIDAKAKKQTIEAEKLTGDNIYKVLIYFDKLYKVMNDVERRQLITALISEIQVYEEKQPNGQWLKSITFKLPIIDDDLNISLDNNEQVECVVLLQRSKG

SEQ ID NO: 27211 - protein, 560 aa, synthetic construct
MSKEKIKVYLYTRVSTSIQIDGYSLEAQKSRMKAFALYNDYEIVGEYEDAGKSGKSIEGRIQFTRMMEDIKSGKDGVSFVLVFKLSRFARNAADVLSTLQIMQDFGVNLICVEDGIDSSKDAGKLMISVLSAVAEIERENIRVQTMEGRIQKAREGKWNGGFAPYGYQLIDGKLLINEEEAIAIRTIFDQYVNTSIGANGLSKYLENHGIRKIPRQNGKNPLFDAGLIRKILKNPVYNGKIAFGRRTLEKVHGTRNEYRQVEQDDYLVAEGIHEAIIPDELWQAAQVKLKAQAKKYEHVNKGKNMRTHLLSGIVKCPICGAGMFGNKSIKYKKDGTKYKDFYYYGCKHRLMNRGHKCTYNKQIREELLDDAVAEVIIKLVSNPKFASMMQEKINMKVDTSAIENEIDNYQKELRKSHSTKFKLIEEIDNLDVDDKHYKRRKQDLDDRLYRMYDKIEELEGQLIEAKAKKETIEAEKLTGDNIYKVLIYFDKLYKVMNDVERRQLIEALISEIQIYEEKQPNGQWLKSITFKLPIIDEDLNISLDNDEQVECVVLLQRSKG

SEQ ID NO: 27212 - protein, 668 aa, synthetic construct
MAYAKAKKHLKIWTKKKAALYVRVSTRYQVDKDSLPFQRKKLKEYCKFLGLEDYVIFEDDGYSAKNTERPHFQEMMSRVRSGEFSHLIVWKVDRVSRNLLDFAAMYQELKDHKVTFISMNEQFDTSTAIGEAMLKIILIFAELERNMTSERVTGIMLDRAEQGLWNGARMPVGYRWNDETKFPEPDPEEVKIVQLIFDKYEEWKSSIKIARYLNNNNFKSKRGGQWTSKLIHDIIRNPFYIGTYRYNLRESGRGPLKPESEWIVRENNHPAIIDKAQFDRCNKIMDQNGSSRDTSDLRARKYVHTFSGHLVCGKCGANMIASKDRARANGWRPSMYRCAQRSRMLDCDNSRTINESYIGPFIFNYIANLARVQKNFKNIATPEKLERELLKGETFDGVAGILPEGLNLTFQALAFRQVGNGTYIPDIDFLSDSDGASDRDQIELLKSEIEKSKNAVTRLTDVYLFDPDSMTKEEFATKKKELAKKIEGMERQLADLLDDSGNDDLADMSFIKKASAFLVAQRIVSKSFVDYVGMAQELDNEILKDFIDQIVDQIVVLDGRVQSITFINGLKHEFRYTAPAELPVCKKCGGRIGSTCGCRTRTFDFSGKRYQRIKVGDLRDMLHGKKNPVCPECFAQEGRWHHWNCKIEACPICGERLAECEHGPNGKN

SEQ ID NO: 27213 - protein, 537 aa, synthetic construct
MKQQIYNTALYLRLSRDDELQGESSSITTQRSMLRLYAKEHHLNVIDEYIDDGWSGTNFDRPSFQRMIEDIEAGKINCVVTKDLSRLGRNYIMTGQYTELYFPSHNVRYIAIDDGVDSEKGESEIAPFKNIINEWVARDTSRKVKSAFKTKFAEGAHYGAYAPLGYKKHPDIKGKLLVDDETKWIIEKIFSLAYQGYGSAKITKQLRAEKVPTASWLNFTRYGTFAHIFEGKPESKRYEWTIAHVKAILKSEVYIGNSVHNMQSTVSFKSKKKVRKPESEWFRVENTHEPIIDKEVFYRVQEQIKSRRRQTKEKATPIFAGLVKCADCGWSMRFGTNKTNKTPYSYYACSYYGQFGKGNCSMHYIRYDVLYQAVLERLQYWAKAVQQDEEKVLNKIQKAGNAERIREKKKKASTLKKAENRQNEIDRLFAKMYEDRACEKITERNFVMLSSKYQKEQIELEQQITSLREELSKMEQDMIGAEKWIELIKEYSVPKELTASLLNAMIEKILIHEATTNEDNERIQEIEIYYRFIGRVE

SEQ ID NO: 27214 - protein, 537 aa, synthetic construct
MKQQIYNTALYLRLSRDDELQGESSSITTQRSMLRLYAKEHHLNVIDEYIDDGWSGTNFDRPSFQRMIEDIEAGKINCVVTKDLSRLGRNYIMTGQYTELYFPSHNVRYIAIDDGVDSEKGESEIAPFKNIINEWVARDTSRKVKSAFKTKFAEGAHYGAYAPLGYKKHPDIKGKLLVDDETKWIIEKIFSLAYQGYGSAKITKQLRAEKVPTASWLNFTRYGTFAHIFEGKPESKRYEWTIAHVKAILKSEVYIGNSVHNMQSTVSFKSKKKVRKPESEWFRVENTHEPIIDKEVFYRVQEQIKSRRRQTKEKATPIFAGLVKCADCGWSMRFGTNKTNKTPYSYYACSYYGQFGKGNCSMHYIRYDVLYQAVLERLQYWAKAVQQDEEKVLNKIQKAGNAERIREKKKKASTLKKAENIQNEIDRLFAKMYEDRACEKITERNFVMLSSKYQKEQIELEQQITSLREELSKMEQDMIGAEKWIELIKEYSVPKELTAPLLNAMIEKILIHEATTNEDNERIQEIEIYYRFIGRVE

SEQ ID NO: 27215 - protein, 558 aa, synthetic construct
MTKLYSYIRFSSMRQSDGSSYERQIRMAKEIADRYNLELVNDYQDLGVSAFKGANSKTGALSRFLDEIGRSIPVGSWLFIENLDRLSRQDIISAQELFLSIIRRGITIVTGMDNKIYSIETVTANPMDLMFSILLFIRGNEESQTKRNRTNSSALLKIKAHQQNPQSPAVAIEEIGKNMWWTDTTSGRVLPHPVYFPVLQKIVQLRQEGHSAGSILDYLNEHHEPPAPTSNKKHGKWSRAMVSRLFATKALIGVKTVNVDGVEYELRDYYPRVLSDSEFYFLRKNIIKKAWDYNHDKEKVIPLLSGIGVLRCVHCGATMVKQTAANGKREQYRYCCDGRKSGRTDCPYPNWGFRAVTLEGAVLQLLADKIWVAEDKTNPIPEIQVKIDEISRKIDNLINLSAMMGATKELANQITDLNSQREALHEEIRLFEREMYSVDSQGWDKLAQFDLSDVQNEERLKVRMKIKGALHEIECSRIDSKKNLFVLVYLDGLRQRLVIENNRGLKKGQIFVDLKTINDRQILESAGMVLHPCIEMIIDADWKAPEEIHGLLSEEFGI

SEQ ID NO: 27216 - protein, 558 aa, synthetic construct
MTKLYSYIRFSSMRQSDGSSYERQIRMAKEIADRYNLELVNDYQDLGVSAFKGANSKTGALSRFLDEIGRSIPVGSWLFIENLDRLSRQDIISAQELFLSIIRRGITIVTGMDNKIYSIETVTANPMDLMFSILLFIRGNEESQTKRNRTNSSALLKIKAHQQNPQSPAVAIEEIGKNMWWTDTTSGRVLPHPVYFPVLQKIVQLRQEGHSAGVILDYLNEHHEPPAPTSNKKHGKWSRAMVSRLFATKALIGVKTVNVDGVEYELRDYYPRVLSDSEFYFLRKNIIKKAWDYSHVKEKVIPLLSGIGVLRCVHCGATMVKQTAANGKREQYRYCCDGRKSGRTDCPYPNWGFRAVTLEGAVLQLLADKIWIAEDKTNPIPEIQVKIDEISRKIDNLINLSAMMGATKELANQITDLNSQREALHEEIRLFEREMYSVDSQGWDKLAQFDLSDVQNEERLKVRMKIKGALHEIECSRIDSKKNLFVLVYLDGLRQRLVIENNRGLKKGQIFVDLKTINDRQILESAGMVLHPCIEMIIDSDWKAPEEIPGLLSEEFGI

SEQ ID NO: 27217 - protein, 578 aa, synthetic construct
MKATFYARVSTDSDEQKNSIISQVDYFKKYIEQNKYDVIDEGVFFKRDGSFETTNGYYVDEGFSGAKSNKYRKAFQQMMKDARTRRFDIIFTKSISRFGRNTKELLAAIDELREYNIAVYFEDLKINTLDRADDFKLTIFAAQAQEESRSKSESVQFGKMQGYKRGIWGGREPYGFNIENGKLIKNGNEALVVKRVFDMYLNECLGLRSIAMKLNADKIPTKSGKALWGQDLISKILKNVIYKGEIRLHRTKKVDINQNLVKKIPADKHIVLQDENLRIIDDKTFELVQIEKQKRFKEFGDFKYTNIVTHDEDNKKIEKNVRSIIRGDTRHSSKHLFSNILKCGNCGGSLRKKIQNNKNRTFHYWLCRNNDQYGKERCRFRNLQYEDNLIDFVKSEIIKYKDNYELHDRDLQLLIYTNYNNEGAEEKVTQINETLEDLKADREANFKLYSRQRITDEEYEQRNERISIDIKDAESNLSRFLYMEDEINRLKIMHTQFIKSFEEINLDNLTNASLRKIISKVIVTTSGETFTERFQVRPFNPNEIIVEWNFITGITQHKVVSDYSDRLIANIESNENMG

SEQ ID NO: 27218 - protein, 502 aa, synthetic construct
MTLAFSYARFSTKSQAIGTSLERQLNASRLFCSERGLTLSPKGYHDLGVSGFKQVKRPELEQMLHAIQSGDIPSGSYILIEAIDRLSRKGISHTQDVLKQILQYKVKVAFVGEDAKTLNGQVLDEHSLNDLSSVILVALAADLAHKESVRKSKLVKAAKLIIRKKATEGHKVRGHTMFWIDWSDKKQDFVLNDRVKDVQTIIQLRREGQGPRKIAKTMNELGIKGPRGNLWNHMSVTIVLKSPVLYGAYQTHQIIEGQKIPDVLLENHYPALLTKEEYIKIQADSSKANKGRPSKANPFSGVLRCECGQAMLFSKRTNLDKNGDPLEYEYHFCIGSTEGRCKNKKRIRDLVPLLASIMDKLVINQTPKKNLNTELIKATEQKIEKLNNMLVELDNPPMSVLKTIQKLEQELDILLNTHVEEPIQADVKTLSSISDAQEYNQHLKRLVKQIVVYQINGPKNLRIKVHKTDGHYQNFLVKDNKILFKSDTKALKELIDEFNKAR

SEQ ID NO: 27219 - protein, 505 aa, synthetic construct
MPIAVPYLRFSRVEQADGDSHRRQRDKVENWLARHPEYTEYEHTFEDLGLSGYDGLHVTEGALGRLLDAVEKGYVPSGSVVLVEALDRFSRLEPLDTLNRLKTIVQAGVHLVTLEDGQRFDDSSLQGHGLLYLAMKAQAAHDYSARLSNRITESYKGRAVAAKAGAPIKRRNPFWLTSEGKLNDKKAVIEQAFLLFIGGTPLKSIHVQLSEHFKTRQSLKHALKNPAAIGHWQRVKVVKENGKNRQIPGELIQDVFEPAVTDEVFYQAQKLLNDLSEQAPTVARKFPLAGLLVCGECGANMVLLRAGENGKTDAVRCYKRMANSANCTNQKTVPVPVVGWFFSEVMRPHALRAYQRTKLPETQRQRIKLEGEIAHIEKQQASLWKLVEMDPENQNAQERYGELVSEKARLKTELASLPTTGDVEKVPVLEFQRFLSSGPFKVTNLLQLDGFRIICHRDGTIEENKSADDNPPQSVQYIGYSRKHKRWSIQYPDGDVISVDRHANQ

SEQ ID NO: 27220 - protein, 558 aa, synthetic construct
MTKLYSYIRFSSMRQSDGSSYERQIRMAKEIADRYNLELVNDYQDLGVSAFKGANSKTGALSRFLDEIGRSIPVGSWLFIENLDRLSRQDIISAQELFLSIIRRGITIVTGMDNKIYSIETVTANPMDLMFSILLFIRGNEESQTKRNRTNSSALLKIKAHQQNPQNPAVAIEEIGKNMWWTDTTSGRVLPHPVYFPVLQKIVQLRQEGHSAGVILDYLNEHHEPPAPTSNKKHGKWSRAMVSRLFATKALIGVKTVNVDGVEYELRDYYPRVLSDSEFYFLRKNIVKKAWDYSHDKEKVIPLLSGIGVLRCVHCGATMVKQTAANGKREQYRYCCDGRKSGRTDCPYPNWGFRAVTLEGAVLQLLADKIWIAEDKTNPIPEIQVKIDEISRKIDNLINLSAMTGATKELANQITDLNSQREALHEEIRLFEREMYSVDSQGWDKLAQFDLSDVQNEERLKVRMKIKGALHEIECSRIDSKKNLFVLVYLDGLRQRLVIENNRGLKKGQIFVDLKTINDRQILESAGMVLHPCIEMIIDADWKAPEEIPGLLSEEFGI

SEQ ID NO: 27221 - protein, 498 aa, synthetic construct
MIRYEDYPYAVYARVSSEKDSQTTSIQNQIDICHHWIEKNNYEWKDEAIQLDDGISGTILLDRKAMQLILNKAKNHKLKMVVFKSISRLARDLKDALDIKEVLLAHGVRVVTLEEGYDSLYEGKNSMKFEMFSMFAAQYPQTISVSASSALAAKARRGEHSGRVPYGYKKNGKFLEIYEEQAKVIRMIFDLYNNHGYGQKRVVHKLNEELLLGNIPKPQQNERWQLSTVQRILQNPIYCGVFIANRYTQVKIGGRKKFIRNPEEKWTIYKDWAPKIITLEDYEKANNKKHVLKKRRFNPKNELRGLMKCGVCGANMVILFSYRRRKKDGVKVEHNYVKCSAYRRGGKNMCISHPPIQYKDLREIVIEKLKEKGRKLKLNVKSDYEEKKKRRIRETKVQIEAAEKKHKRLLELFLEDQMISKAEFQSKRKEIEDQLEQLNDKLFLLEREEEESIDITNIKIAFSLLKKKDQDLYEAFHALIEKLVIHEDGTVDFHYKFQ

SEQ ID NO: 27222 - protein, 538 aa, synthetic construct
MTNQSTNNLKITALYVRLSNDDEREGESNSIVNQKKMLSKYASDHNLRKTTFYIDDGVSGTTFNRKGFQAMISDIEAGIVGTVVVKDMSRFGRDYLQVGMYTDIMFPEHDIHFIAINDGVDSEQGDNEFTPFRNIINEWYAKDTSKKIRAVFKAKGMTGAPLTTNPPYGYIKAPDNPTQWLIDDYSATIVRRMFQLTLEGYGPTQIAKKFQAEKILVPTHYAISQGRKTNTVPSQSPYYWSDRTIAKLLEKPEYLGHTVNFRTTRKSYKDKRKIERDKKDWVIFENTHEAIIEQSVFDTVQELRKHKRRPTKQKELPLFSGLLFCADCGGKLYFCRGKGVTRNQENYICSSYRRRTTECTSHYIRSVVLEEVVTNNLRKTMTYIQANGKSFFCDVLKGDQQAKKKEAQQKQKQLHDAQKRITELDTIFPQLYEDMVSGRINSERFDKLSSSYEEEQILLKQQVVDISKEIQTELDVNVYIRELRKFVHKHVNFDSLTPELLHEMIDKIIVHTGKKIEVHYKFGLGELGNLVNEHIIKK

SEQ ID NO: 27223 - protein, 462 aa, synthetic construct
MKRAGIYIRVSTQEQANEGYSIGAQTDRLTKYVEAKEYKLYKKYVDAGYSGSKIDRPAMKELIEDVCNNTLDVIIVYKLDRLSRSQKDTMYLIEDIFRPNNVELISMQESFDTSTAFGNATVGMLSVFAQLERKSISERMITGRVERAKKGMYHTGGQSRPPAGYEFQNKKLVVNEYEAAAIRDLFRLFNEGLGRRSISDYLQKNYPGRNKWLPCSIDRMLKNDLYIGKVKFSGESFEGIHKPIIDDVTFFKTQKEIKKRKANNSQKYDYVALLGGLCECGICGAKMANRRSVGRKGKVYRYYRCYSKKGSPKHMMKISDCPSSAQQQDFIDEAVITKLKTLDIDSEIKKRTTPKVNNESIEKQIENINNQINKLIELFQVDSIPMEVLTKKIDKLNSEKESMKALIDKSQTVNINEFRSRLKVLENFDWDNSEKSEKRKIIEMLIHKVIVYETHIEIILIE

SEQ ID NO: 27224 - protein, 452 aa, synthetic construct
MKAAIYIRVSTQEQVENYSIQAQTEKLTALCRSKDWDVYDIFIDGGYSGSNMNRPALNEMLSKLHEIDAVVVYRLDRLSRSQRDTITLIEEYFLKNNVEFVSLSETLDTSSPFGRAMIGILSVFAQLERETIRDRMVMGKIKRIEAGLPLTTAKGRTFGYDVIDTKLYINEEEAKQLQMIYDIFEEEKSITTLQKRLKKLGFKVKSYSSYNNWLTNDLYCGYVSYADKVHTKGVHEPIISEEQFYRVQEIFSRMGKNPNMNRDSASLLNNLVVCGKCGLGYVHRRKDTVSRGKKYHYRYYSCKTYKHTHELEKCGNKIWRADKLEELIIDRVNNYSFASRNVDKEDELDSLNEKLKTEHAKKKRLFDLYISGSYEVSELDAMMSDIDAQINYYEAQIEANEELKKNKKIQENLADLATVDFDSLEFREKQLYLKSLINKIYIDGEQVTIEWL

SEQ ID NO: 27225 - protein, 521 aa, synthetic construct
MKKADLYIRVSTDEQADKGYSQRDQEERLKRFCATNKITVGQVVYEDHSAKTFNRPEWIKLLNNLKKKNSKTNLVLFTKWDRFSRNAGDAYQMINTLTKLGVEPQAVEQPLDLSIPENKMMLAIYLAAPEVENDRRALNTFYGMRRARKEGRLMGRAPFGYINRSKEDGRKYVAIQDPEASAMRWAFNEVAKGVFAADQVRQKMNAQSPTKLSRSAFHVAIRNPLYYGKIFIAKFQDEEAHLVEGQHEPLISEELFQKVQFILDGNKRVERPNTKILSDTNLPLRGFLVCPECGRNLTGSASKGRTNRYYYYHCVSSCGFRQKAEVANDIFEKGMRQFELNGTAIGIVKKLVLNNYKKFVQNPFDEKKRIAQEIDKLNAKLSVARNKLLSETIDDDEYLEIKKECRDRIESLEEQLSKDGSDTKKVNIEKSLDRALRYIESVPQMYSEGEINTRRAVIGSIFPEKLEFDGKTYRTARMNVIANYIFQINNELPQNKNRRNDSQNHFSCLVAPTGIEPISKV

SEQ ID NO: 27226 - protein, 509 aa, synthetic construct
MRRAISYIRFSSERQLKGDSVRRQSKLVTDWLDKNPEFYLDSSLSFKDLGKSAFSGKHLKGGLGDFLTAIEKGLVKAGDTLLIESLDRLSRQDIDIASELLRRILRAGVDVVTLSDGEHYTKESLKDPLSLIKSILIMQRAHEESLRKSERVQAAWNRKKELISEGIKISRRCPAWLKLNDDRRTFTIIPDKVEVVKRAFDLRLQGLSFWAITRTLNDEGHLSLNQYTPKQKGWSDTAVKKLLRNRAVIGCFTPAGREEVQGYYPAIISESLFYRVQQLNTGQYGRASVSSNPLSVNLFRGIIKCSECGATIVLGGYALKRFGMYRCPNRSANRCSAKAISRKQTDATILYMLALCDRFETENTDTIDSLKLQREDLQRKISKMAELAIELDDMTIITEKLRDMKNALSKLNHDIEEETKRIKAITTGSLKDIDRTTKEGMIETQLLIKGVLKEIVIDAAKRRCKVTFHNGRIIDLPITENPSEDVTEAIQSLSEVTERGLIDVDEVII

SEQ ID NO: 27227 - protein, 509 aa, synthetic construct
MKRAISYIRFSSERQLKGDSLRRQTRMVNDWLSKNPEYYLDQDLSFRDLGKSAFSGKHLKGGLGDFLTAIEKGLVKAGDTLLIESLDRLSRQDIDIASELLRRILRADVAVVTLADGECYTKESLRDPLALIKSILIMQRAHEESLRKSERVSAAWNRKKELISEGIKVSKRCPAWLRLNDDRRTFTIIPERVEVVKRAFDLRLQGLSFWAITRALNDEGHLSLNQYNPKPQGWSDTAVKNLLRNRAVIGCFKPAGREEVRDYYPAIISESLFYRVQQLNTGQYGRASVSSNPLSVNLFRGIIKCSKCGATVVIGGYDSKRFGMYRCPNRSANRCSAKAISRKQTDATILYMLALCDRFEAENTDTIDSLKLQREDLQRKISKMAELAVELDDMTVITDKLREMKNALSKLDHDIEEETKRLKSITTGNLKDIDRTTKEGMVETQLLIKGVLKEIVLDTSKRRCRVTFHNGKVIDLSIVENPAQDITEAEKSLTEIAEKGLLDVDAFQL

SEQ ID NO: 27228 - protein, 525 aa, synthetic construct
MKRAIIYARVSDRKQFDEGISIDAQIEVCTAHAARLGASVVRVFRDEGISGRFTKQRTAFKAALAFCETGMVDYFVTWSTSRFARNAVDLWVQSDHIKSLGTRLECLNADIDDETDAGFINKMFHGAMDQMVSRQISRDTLRSMKKLAADGFFTGGRVPFGYRTELDGQRNRMLIHDEEAIVVQKAFGMALQGLGAQVIAKALNDAGQLKRGERWKKTTLNYMLKSEVYTGLKTFNRANKRTGKVKPRDQWIQVAAHPGLVTQVDFDKVQLMMEERTPPRPQGGAARSIFVFAGLMKCGICGGALQVVNGTSRAGTLYNYYGCCAHKKGAVRCLFRNVRADLFDDWLLGEVFARVVTVEAMTLAVRELTDLGSQWARDREAQRIELVRTLRDLEARRGKLFDLLEVKGLDTPDLADVRDRLQLRNAEIRATQARLERLEEAPAPKKAARIDPAIAVEVMKEVVMAGDAEKKRAFMGALLGSITVTVDKVLLEYKTEALVSLGHPNGVRNEVYWLPDLDSNQGPAD

SEQ ID NO: 27229 - protein, 568 aa, synthetic construct
MTNAALAPSETGAVQPALRAALYLRVSSPRSAESDLSIPDQRRQTSSYCHSNGWEVAAEFVEPGVSGTDDRRPAFQEMIDAALERPSPFDVIVVHSFSRFFRDQFQFEFYLRKLAKNGVQLVSITQILGDDPMSEMMRKIMTLFDEYQSKENGKHTLRAMNENARQGFWNGARPPIGYRAVAAEQRGAKIKKKLEIDPLHAETVRRIFRLALEGADGRGPIGVMAIACWLNENNIRTRYGGRWGKGMVHQVLTRTTYIGEHRFNTYDVKKGRAKPETEHAIMEVPPIITVAEFEAVQRSLKARSPKMMPPRAVGGSTLLTGICFCACCGGAMTLRTGTSRSGQEYRYYTCATKATKGKTGCPGVSLPMDRLNEAVIEHLEKRLLDPARLEVLMDQLIARRDEWVTERRQHVAEMERRATEVETKLSRLYEAIENGLVDMGDPSLKARIAELTTIRDQARGDAERAVAHIERISPEITVESLHAFALVAKRKLRHDDGSYARNHIRAVAQRVEVHSKTDVRICGTRTELLRTLTAVSGVEAAVLGTRAFGPKWCPGEDSNLHALSSAAT

SEQ ID NO: 27230 - protein, 564 aa, synthetic construct
MSTKAYSYIRISSLEQRKGHGEQRQLEAAQAYAEKHGLELDDSLRDLGKSGYHGDHVKTGALGRFLELVATGKIAVGSYLLVENLDRLSRQTPIDAQAQFIALLQAGIRIVTLQDGQIYERGRDFTQMIISLTIMSRSHEESARKSYNSKKNNDANRRDMLAGKPRFYSGCVYWIDQTRIEGSKDFKFTLNDHAKTVRRIFELADQGVGSLSIARLLNESRTPCLQLASAKWWNSTIIKILKNETAIGTLHLYETVDGKSVPHGEPIKNYYPAAVSEELFWRVQRNRNAAPAAGRKGKTLANLFLNITRCSHCGGTLVLNKSSKYNTKYYRCQNRYQSMPCDGPAKMYPYEKLEDAILDHVTDFYHDSRLGNSSKSVSRDALVEQARIADSELAELEKRRKNAMLISEMADDDQTRADYLARYRELRVEIEQRKAKSNEAHMALKAIDDQSEKLVDVSDMIASERKLWETGSDQEIFVSRAKVAQSIRRFVSQIQVDFEQQNAMVYVAGYTRRYLFTRTGELSTVLNGVKMPFSEVEKVMRMDNATDAQIAQAKEAHAILAAVR

SEQ ID NO: 27231 - protein, 575 aa, synthetic construct
MTKRKLYSYVRWSSDRQSKGTSLERQTAKAKEFAHSHNLELVELLDAGLSAYRGKNTTQGALGGFIQAVESGAIPNDSYLFVENLDRLSRQDTLTANKLFSHLLELGLTVVTGMDGRIYTRQSVTANPTDLMLSILLFSRANEESATKQKRVYGNIAALVERHKAGLPTTIKTAGSHVWWVDASGDKHTAVQPHPTLWQAARKAVELFLDGYSAHAVCDYLNEHYDAPPIRVTKATNNPDNLGKWSYPLLRRMKTSRTLIGERTINAGDITYTLENYYPPLCSPTEFAQLQDLNENNKLTQGPRKTRITLLSGLGVLKCGHCGGAMTFMIGSGGKIRYMCANGKDRIGNCKAWSIGLDILERTLVPALVRGYMDYTLGGNAKGDDIKESIQSAQEALQVIESQIENITDAITLGGNLAPLVERMGALSKEKDYKLLEVERLNRLALLSESESGAIDKITDFILQIRPNVLTDLNHPLRLQLREAVRAVIESCTVHKREDRGLAIVYTIKGSPFRTVHAFVAANKGHYKETVVSIGSDGQPLPDVGDSHKFDVAITKIVDEMGLPPIDGGLMWARR

SEQ ID NO: 27232 - protein, 596 aa, synthetic construct
MSKIIPHLYCRVSTSHQLQGSGMDDQSRVVTEYVKSKPEVFDVSKMTLLKDEGLSAYKGEHLQGDGALRGFVDDVESGVIPSGSALIVYSLDRLSRLNPWVGSHLISTLISKGIEIHSVSENSVLKSDDPIGSIISGIYLLRANNESVLKSERAKDGYKARLQKSILNKTILTKQMPRWLFDDNGSYGVKKDMKEAIDYIFDSYIDGLSSGHIAKELNTKGLKNNNTSWTGSYVAKLIRDRRLIGEHIRLSAQIKGVKREIIEKIPEFYPVVVDKDRFNLANNMLDNVAKNIRGRTRLTYGDTSVLKNLFSGVIKCGLCNGMTTVVKNSKPVKLPDGSRKYVAGTTFIRCRAKYEYKSCKQGDVKYETIEKAILEHLMGLDIPALLAKPVDKKLDIWKSELNLCISDRNDYKRLIDERKALGKRASVESLEALQEVTDRIEELTSLIESHVDEDFVPVFDAIDLERITDITNVKERGLIKKSINSLVEKITYKTVSGFVMLEFTYLYRSIKHVIIINKTESKVVVNFSVESGDDVVEFVCNQFMMRYYKYNNEFDVMGSSLIDYSHMVNFVDYLEDDVSRLAKEFLVKNMDRMVLL

SEQ ID NO: 27233 - protein, 503 aa, synthetic construct
MIEAFSYVRFSTKSQATGTSLERQLNASRLFCTQHGLRLSNQSYHDLGISGFKNVRRPELEQMFEAIQTGVIPAGSFILIEAIDRLSRKGISHTQDILKKILQHDIKVAFVGEDAKTLQGQVLNKDSLNDLSSVIMVALAADLAHKESLRKSKLVRESKAIAREKAQNGVILPGKSMFWLDYDKEQRHYVLNDRATIAKEIIELRLLGHGPRKIAKILNERQIPGPTGKEWYQPSIKRIITSPVLYGAYQSHQVIEGQYIPVALVENYYPALIDYNLFSQIQFDNKNASKGRPSRVNPFGGVFYCECGNAICFKKSYSKTAKNDKHEYHYHYCIAAREGRCKNTKSIPNLTPILINLLDKLEIKNTSTKNIRSESIITKRNKIEQLNEMLLKLDTPPVSVLKTIGNLEKELQTLLEQPEVIAPRQEDIVVLSTINDPSKYNMHLKRLVKRITVYQINGPKNLRIKVDKTDGHHQNFLIKDGQTIFKSDTERLKKSLAGFKDGF

SEQ ID NO: 27234 - protein, 507 aa, synthetic construct
MKRAISYIRFSSEKQSRGDSLRRQAKMVTDWLKAHPEYYLDESLTFRDLGVSGFTGKHLQGGLGDFLTAIEKGLVKAGDTLLIESLDRLSRQDVDQASELLRNILRSGVDVVTLSDGEHYTRESLKDPLALIKSILIMQRSHEESLRKSERIQAAWDAKKEAAKAGIKISRRCPAWLKLNDDRKTFSVIPEKVETVRRCFQLRLEGKSIWEIVRTLNDEGHQTLNQYKAGKFGQTSVQDLLKNRSVIGYFTPKGCEEIAGYFPPIIPETDFYKVQQLSYSRYGRKPASDKPLSVNLFKGVIRCSECGHALIITGFSDTRSGIYRCPSRNENRCNAKGLSRKQTDSTLLALLSRLDRFDSDMTNTVDTLKLHREHISNNIEKLVQLSLEIEDLSAITSKLKQLKGELSQVDADIEKETQRLKSIDVGCLFDCDLTTKAGRIEAQLIIKSAVKEVVLNTAKRRCKVTFHNGKVIDLPITENPSEDVTEAIQSLSEVTERGLIDVDEVII

SEQ ID NO: 27235 - protein, 561 aa, synthetic construct
MRSAKAYSYVRFSTPKQAQGDSYRRQLQQARDYCTTHNLVLDDKTIEDFGVSAFRGSNRTDGALGRFIDAVKSGEIEKGSYLLVESVDRLSRQAIEEALTQFLEIVREGIVIVTLSDNQVFRSGEVDFTKLIVSIVYMARANDESEMKSRRSRAAWSNGRQQARENNKVIANSRLPSWLTLEGDKIVPIPERVAIVNEMFQMVRSGQGYQQIAKVFRDKDYKTFGQGKAWRPAGIQSVVKSRAVIGEFQPHIIYEGKRVPDGDPLFGYYPTVVSPAIFAEVQHIVDKRNNHSGSYRKGLYNNLFSGVIRCQCGELLRFHNKGSRGLVRNYLVCPMEGVTGCQLPYLLYNKIEPQLLQAISKLSVVMKQRMPQKEKTSLLKDELAVLRGQLEIETRKSKKAAQAMLELDDDAVFRSLYEECKANCQSLEKKILQIENEIVGLELSARTLFQLLSPEDLSTTEQRQRFNSQLKLAVKIEFIYEHYGLVAVIKNLEDELLLEQAFGHKLMNSIVHDFEGHVVVKTISDSPYIDPSWADEEREEYTKGISVEFDQCGDFNIDNFK

SEQ ID NO: 27236 - protein, 514 aa, synthetic construct
MKKVYSYIRFSSTKQAFGDSHRRQSKAIQDWLANHPDHILDESLSFEDLGRSAFHGDHLKEGGALRAFLEAVKQGLISPDSVLLVESLDRVSRQSISHAQETIRGILEQGITVVTLSDGETYNRQSLDDSLALIRMIILQERSHNESVIKSDRIKKAWSHKRQQFEQDGTKITGNCPGWLKLNSDKKSFSLIPHHIETIHRIFDEKLSGKSLHAIARDLNLENIPTITNKRVDTGWTPTRVRDLLLKESLIGVAYGVSDYFPPAISKEKFHAVQMIRGQGKGKKPTSRQPSSIDILKGICKCAECGSTLRQRNTKKTPEGRYPRGYLECRNRQLGRCNSKAFNRSLIEGILIQKVFPTLQYLSLKSNGDNISVTTLKADITSLKKGINNLISLAEKGLGDLDTLAQRITNNRVELESKKKDLRQAEAILSLRSDNDIQDSDRKTVEGRIKLQLAIKSFVKEIIFDNDKQEITIRLLNGKSFSGISVAREDKDFDHSSMFEVLQKSLLDVDGVCL

SEQ ID NO: 27237 - protein, 560 aa, synthetic construct
MTKLYSYIRFSSMRQGEGSSYERQIRMAKEIADRYDLELVNDYQDLGVSAFKGANSKTGALSRFLDEIGRSIPVGSWLFIENLDRLSRQDIISAQELFLSIIRRGITIVTGMDNKIYSIETVTANPMDLMFSILLFIRGNEESQTKRNRTNSSALLKIKAHQQNPQSPAVAIEEIGKNMWWTDTTSGYVLPHPVYFPILQKIVKMKQEGHSTGSVLDYLNEHHEPPAPTSNKQHRKWSIAMVSRLFKTKALIGVKEVNVDGVQYELKDYYPRVLSDSEYYFLKNNLIKKAWSFGHAQEKTIPLLSGIGLLKCAHCGSPMVKRKAANGKVEQYRYTCDGEGSGRTDCLYPNWGFRASSLEGAVLQLLADKVWIAEDKANPIPEIQVQIDEISRKIDNLINLSAMTGATKELANQITDLNTQREALHEEIRLFEREMYSVDSQGWEKLAQFDLSDVLNEERLQIRLKIKGALRSIECARIDRNKNLFTLVYLDGLRQRIVIENNRGIRKGQIFVDLKTINDRQILESAGMVLHDHIDILIDEKAFYDGLPKEEDGPLSKFGI

SEQ ID NO: 27238 - protein, 559 aa, synthetic construct
MKTKLYSYIRFSSMRQSDGSSYERQIRMAREIAAKYDLELVNDYQDLGVSAFKGANSKTGALSRFLDAIGRSVPVGSWLFIENLDRLSRADIVSAQELFLSIIRRGITIVTGMDNKIYSLDTVTANPMDLMFSILLFIRGNEESQTKRNRTNSSALIKIKAHQENPQNPAVAIEEVGKNMWWTDTTSGYVLPHPVYFPVVQEIVELRKNGRSTAEILDHLNETYAPPPAVSNKKHSKWSRAMVERLFHTRALIGIKEVSVDGVNYELKDYYPRVIDDATFYHLKKNIGARAWNFGDKEEVKPIPLLSGIGLLKCDHCGCAMVKVKGTNKRSDQYRYTCDATRSRRLDCEHPNWSFRGDQLEKAVLQLLADKIWIAEDKANPVPALKVQVDEISRKIDNLIALSAMTGATKELADQITTLNSERETLYNQIKMAEEEMYSVDSQGWEKLAEFDLEDVYNEERLKVRFKIKQALKRIGCSRIDRNKNLFVLEYIDGKTQRVVIENSRGTRKGQIFVDLKTINDRQILESNGLVLHPCLDMLTDKNWKPEEEIPGPLQEFGI

SEQ ID NO: 27239 - protein, 558 aa, synthetic construct
MTKLYSYIRFSSMRQSDGSSYERQIRMAKEIADRYNLELVNDYQDLGVSAFKGANSKTGALSRFLDEIGRSIPVGSWLFIENLDRLSRQDIISAQELFLSIIRRGITIVTGMDNKIYSIETVTANPMDLMFSILLFIRGNEESQTKRNRTNSSALLKIKAHQQNPQSPAVAIEEIGKNMWWTDTTSGRVLPHPVYFPVLQKIVQLRQEGHSAGVILDYLNEHHEPPAPTSNKKHGKWSRAMVSRLFATKALIGVKTVNVDGVEYELRDYYPRVLSDSEFYFLRKNIIKKAWDYSHDKEKVIPLLSGIGVLRCVHCGATMVKQTAANGKREQYRYCCDGRKSGRTDCPYPNWGFRAVTLEGAVLQLLADKIWIAEDKTNPIPEIQVKIDEISRKIDNLINLSAMMGATKELANQITDLNSQREALHEEIRLFEREMYSVDSQGWDKLAQFDLSDVQNEERLKVRMKIKGALHEIECSRIDSKKNLFVLVYLDGLRQRLVIENNRGLKKGQIFVDLKTINDRQILESAGMVLHPCIEMIIDSDWKAPEEIPGLLSEEFGI

SEQ ID NO: 27240 - protein, 558 aa, synthetic construct
MTKLYSYIRFSSMRQSDGSSYERQIRMAKEIADRYNLELVNDYQDLGVSAFKGANSKTGALSRFLDEIGRSIPVGSWLFIENLDRLSRQDIISAQELFLSIIRRGITIVTGMDNKIYSIETVTANPMDLMFSILLFIRGNEESQTKRNRTNSSALLKIKAHQQNPQNPAVAIEEIGKNMWWTDTTSGRVLPHPVYFPVLQKIVQLRQEGHSAGVILDYLNEHHEPPAPTSNKKHGKWSRAMVSRLFATKALIGVKTVNVDGVEYELRDYYPRVLSDSEFYFLRKNIVKKAWDYSHVKEKVIPLLSGIGVLRCVHCGATMVKQTAANGKREQYRYCCDGRKSGRTDCPYPNWGFRAVTLEGAVLQLLADKIWIAEDKTNPIPEIQVKIDEISRKIDNLINLSAMMGATKELANQITDLNSQREALHEEIRLFEREMYSVDSQGWDKLAQFDLSDVQNEERLKVRLKIKGALHEIECSRIDSKKNLFVLVYLDGLRQRLVIENNRGLKKGQIFVDLKTINDRQILESAGMVLHPCIEMIIDADWKAPEEIPGLLSEEFGI

SEQ ID NO: 27241 - protein, 547 aa, synthetic construct
MKLLVTYIRWSTKEQDSGDSLRRQTNLIDAFYSKHREEYYLLPAHRYVDKGKSGFHQQHKNQGSDFRRMFENVMSGGIPEGSLIVVENFDRFSRADIDTAIDDVRQILRKGVSILTLGDGELYDKSALTDPVKLIKHIIIAERAHQESLVKQKRIAQVWNHKTQLARELKKPMGKQAPGWLELSDDGSHYIVDEDKASLVNLIFDKRLSGLSMFAICKWLNEQGYPTINQRKVRISKTKKPDGNWSALSVKHILTSRSVLGYLPAKVSTEDRKTVLREEIEGFYPQIVTDSKFYAVQQLLEETGKGKTSGGEHWLYVNILKGIVRCKCGLVMTPTGIRKPVYQGTYRCNGNKESRCNYGTVSRKLLDTQLCSRLFSKLSQLHNEATDTARLDELQRRLTTVDSELEKLTETLIQLPNITQIQEALRVKQEEKDELIAKLSREKARVKSVSSLDLSGLDMESVEGRTEAQIIIKRLVKEIVVSGNEKLVDIYLHNGNMIRGFPLDGKDDHTLTLEEAIDEMQPLDDMLIFGEPVTRVYPAGDMEEVDA

SEQ ID NO: 27242 - protein, 560 aa, synthetic construct
MTKLYSYIRFSSMRQGEGSSYERQIKMAKEIADRYGLELVNDYQDLGVSAFKGANSKTGALSRFLDEIGRSIPVGSWLFIENLDRLSRQDIISAQELFLSIIRRGITIVTGMDNKIYSIETVTANPMDLMFSILLFIRGNEESQTKRNRTNSSALLKIKAHQQNPQSPAVAIEEIGKNMWWTDTTSGYVLPHPVYFPILQKIVKMKQEGHSTGSVLDYLNEHHEPPAPTSNKQHRKWSIAMVSRLFKTKALIGVKEVTVDGVQYELKDYYPRVLSDSEYYFLKNNLIKKAWSFGHAQEKTIPLLSGIGLLKCAHCGSPMVKRKAANGKVEQYRYTCDGEGSGRTDCLYPNWGFRASSLEGAVLQLLADKVWVAEDKANPIPEIQVQIDEISRKIDNLINLSAMTGATKELANQITDLNTQREALHEEIRLFEREMYSVDSQGWEKLAQFDLSDVQNEERLQIRLKIKGALRSIECARIDRNKNLFTLVYLDGLRQRLVIENNRGIRKGQIFVDLKTINDRQILESAGMVLHDHIDILIDEKAFYDGLPKEEDGPLSKFGI

SEQ ID NO: 27243 - protein, 527 aa, synthetic construct
MSKKKSKEKVVEFSKLTNKVAAVWTRVSTERQADTNGSLESQRRICTEYAESHAIRIKKYYGGTNESAKVEGKLYREMIAEVARDKEINIILVYSFDRFSRAGYEAMMTKAYLKAKGIYVVSATQATDPDSAAGGFMEDVIFLFNQFENNLRKDKCITGMVECLRNGNWYSKPPLGYDKLKVGREHVLTVNEKGKILRNAFVWKATEGIGDIEIVQRLKGLGLVIDRKHLNKILHNPFYCGFIQHSLLGDEVIKGNQEILIDEATFNKVNSISNAGYEHKEITEPFPLKRHIICSDCGGYLTGYTVKARGRDYYKCNKKGCKSNHSTEKLHQKYINLLNGYNIPDEFIPILTDVLRKVFEEYNQSKGEIKKVLLKRKTECENRINAVKVRFGLGEINSEIYTATMSELNSRLTEIRRDLEDAGKNLSNMMNYINQTIEISCKLGSLWRDSDFSNRQKIQNLVYPGGIYFDKKNDDYRTENENEVFRIFRRFTAVCKGGKEKATNNFHCLSPSLGMRRLERPTPTSRT

SEQ ID NO: 27244 - protein, 667 aa, synthetic construct
MEKIAKQEKSKSKCCILLVRVSTEKQDYSPQLRELKKYAQSLGYSKFKEIATKESGFLNFEKKDGFKQVVEYINQNPDFNTIIIAEMSRLSRQKVVLEQIKIYLTINRIQLIIKDINFTLFDSDGKISLNTDVLFSLFASFAESEMKTKIERFGRTKKYLSAQGVSLSGKRLFGYDRKRLETGKNTYVINKKESECIKTLYDWYLNGVNGDKTKCSVRKLTLECIAHNFPTYLHSTRNVNKTLKEEAYTGYKITNNRRKNSAYWKFGDDNAPKYIACSTEMKYPQILDIDLFNAVQKKMENNNCVTDKSSKHITLLSKLILCDCEHYYNGEYQIKDGFKRAKYLCKQAKQPVRKCYVNKGTFSMYMADSVIWSFCLQHIDKILEYKSREEAKINTDSLKDEIKNLNREIKEIEKKIDIENTIFRKTGNSKEYEKRINDLDIEKSKLIVQIDKRSSIIDSIENKKEENLKREIVEHIEEIESRKDLLSLYIHKLITKIKVLYNSRLYIVFQVYYNIDTNEDYSFSNYIVVKRSTRDNYKIYYFQDELFSFEDEYFTFKFNDIRSKFHISDIFLEYHPEMVEMAKWMQNIYNLSFLFNSIGQLNDKEKLEIFERNGVKSVDELIEKNNLIKSDSIHNIEEKLSTLPIWITEMKMLKYRKLKIYDEDFKK

SEQ ID NO: 27245 - protein, 604 aa, synthetic construct
MIKIIGYARVSTTKQDLSRQKLKIKEFCENNNYELIEIIEDFGISGVVADRKGYIELQSKTYKDADMIVISELSRLSRQEDVTETVYNIQQIINKGLSVILLDSPSKIYEANKLLDITEILILTIKAWAAAQERLDIKKKNQDGKQALFQAYPYAVVDQKIPYGYKAVPNPNGKRPKYILEEVPEEVENIKRLFALVNSGKTLGAVARYFNERNITFRGYYSTVAILSNYIHSDIYRGIRRRTQRLGREEPYTIEVRIKPIISEEDFMKAQELIKNNYKNTPTGKVNHNPLKGIIRCRCGRAMTVKDKKPAAGISKLTYRCSCVDRKSHPDFCKYNIDEVSYDLTNEILYSLFKSMHTAEYINFFRNQTDNRVTELQEEIAGIEKRLSALYLDKENLSNESQDNANKFLLTTNPTLLNIIQEKQNQLDEKIKSIDKEIIRYKKSQSKKMADIERIKDNNGKEKLQNLSIEEQGELYHKYLERVNYIPVTTMQGYYIVQFLNGIKFYIAITKVRSIAMASLLLDNWTIDEKGIITANYDTLKSSDMKNFSIEMIRKTKTMTLQEYLKSDLAKERALHLDLSYRERYLEELHKAGLDGRLRPLKKE

SEQ ID NO: 27246 - protein, 509 aa, synthetic construct
MKRAISYVRFSSEKQSRGDSLRRQTRMVNDWLSKNPEYYLDQDLSFRDLGKSAFSGKHLKGGLGDFLTAIEKGLVKAGDTLLIESLDRLSRQDIDIASELLRRILRADVAVVTLADGECYTKESLRDPLALIKSILIMQRAHEESLRKSERVLAAWNRKKELISEGIKVSKRCPAWLRLNDDRRTFTIIPERVEVVKRAFDLRLQGLSFWAITRALNDEGHLSLNQYNPKPQGWSDTAVKNLLRNRAVIGCFKPAGREEVRDYYPAIISESLFYRVQQLNTGQYGRASVSSNPLSVNLFRGIIKCSKCGATVVIGGYDSKRFGMYRCPNRSANRCSAKAISRKQTDATILYMLALCDRFEAENTDTIDSLKLQREDLQRKISKMAELAVELDDMTVITDKLREMKNALSKLDHDIEEETKRLKSITTGNLKDIDRTTKAGMVETQLLIKGVLKEIVLDTSKRRCRVTFHNGKVIDLSITENPAQDITEAEKSLTEIAEKGLLDVDAFQL

SEQ ID NO: 27247 - protein, 507 aa, synthetic construct
MKRAISYIRFSSEKQSRGDSLRRQSKMVTDWLKAHPEYYLDQDLSFRDLGVSGFTGKHLKGGLGDFLTAIEKGLVKAGDTLLIESLDRLSRQAVDRASELLRNILRSGVDVVTLSDGEHYTSESLKDPLALIKSILIMQRAHEESLRKSERIQAAWDAKKEAAKAGIKVSKRCPAWLKLNDDRKSFSVIPEKVETVKRCFQLRLEGKSIWEIVRTLNAEGHRSMNQYKPGKFGQTSVQDLLKNRSVIGYFTPKGCEEIAGYYPSVIDETTFYKVQQLSHSRYGRKPVSDKPLSVNLFKGVIRCSECGHALIITGFSDTRSGIYRCPLRNENRCSAKGLSRKQTDGTLLTLLSRLDRFDSDMTNTIDTLKLHREHISSNIEKLVQLSLEIEDLNAITNKLKQLKNELSQVDADIEKETQRLKSIDTGSLSDCDLSTKAGRIEAQLIIKSAVKEVVLNTAKRRCKVTFHNSKSITLPITENPSEDVTEAIQSLSEVTERGLIDVDEVII

SEQ ID NO: 27248 - protein, 561 aa, synthetic construct
MTKLYSYIRFSSMRQSDGSSYERQIRMAKEIADRHGLELVNDYQDLGVSAFKGANSKTGALSRFLEEIGRSVPVGSWLFIENLDRLSRQDIISAQELFLSIIRRGITIVTGMDNKIYSLDTVTANPMDLMFSILLFIRGNEESQTKRNRTNSSALIKIKAHQQNPQSPAVAIEEIGKNMWWTDTTSGYVLPHPVYFPILQKIVQMKQDGHSTGSVLAYLNENHEPPAPTSNKQHRKWSIAMVSRLFQTKALIGIKTVNVDGVEYELKDYYPRVLSDSDFYFLKANLSKKAWDYQKRSGEKVIPLLTGIGLLRCMHCGSTLIKQKAANGKKEHYRYTCDGTRSGRYECAYPNWGFRASTLEGAVLQLLADKIWIAGDKTNPIPEIQVKLDEISRKIDNLINLSAMTGATRELAEQITALNSQREELHGEIKRFEAELYSVDSQGWEKLAQFDLSDVENEERLKVRLKIKGALREIECSRLDKQKNLFVLVYLDGMRQRIVIENARGVRAGRVFVDVKTVNDRQILESSGLYLHDHIDVLIDEKAFYEGLPKEEEGLLQDFGI

SEQ ID NO: 27249 - protein, 558 aa, synthetic construct
MTKLYSYIRFSSTRQADSSSFERQKRTAKEIAEKYGLELVTSYQDLGVSAFKGANSKTGALSRFMEEIGRSVPVGSWLVVENLDRLSRQSIIEAQELFLSIIRRGITIVTGMDGKVYSKESVNANPLDLLLSVMMFARANEESQTKRNRTNSSALLKIKAHQQNPQNPAVAIEEIGKNMWWTDTTSGRVLPHPVYFPVLQKIVQLRQEGHSAGAILDYLNEHHEPPAPTSNKKHGKWSRAMVSRLFATKALIGVKTVNVDGVEYELRDYYPRVLSDSEFYFLRKNIIKKAWDYSHVKEKVIPLLSGIGVLRCVHCGATMVKQTAANGKREQYRYCCDGRKSGRTDCPYPNWGFRAVTLEGAVLQLLADKIWIAEDKTNPIPEIQVKIDEISRKIDNLINLSAMMGATKELANQITDLNSQREALHEEIRLFEREMYSVDSQGWDKLAQFDLSDVQNEERLKVRMKIKGALHEIECSRIDSKKNLFVLVYLDGLRQRLVIENNRGLKKGQIFVDLKTINDRQILESAGMVLHPCIEMIIDADWKAPEEIPGLLSEEFGI

SEQ ID NO: 27250 - protein, 558 aa, synthetic construct
MTKLYSYIRFSSTRQADSSSFERQKRTAKEIAEKYGLELVTSYQDLGVSAFKGANSKTGALSRFMEEIGRSVPVGSWLVVENLDRLSRQSIIEAQELFLSIIRRGITIVTGMDGKVYSKESVNANPLDLLLSVMMFARANEESQTKRNRTNSSALLKIKAHQQNPQSPAVAIEEIGKNMWWTDTTSGRVLPHPVYFPVLQKIVQLRQEGHSAGAILDYLNEHHEPPAPTSNKKHGKWSRAMVSRLFNTKALIGVKTVNVDGVEYELRDYYPRVLSDSEFYFLRKNIIKKAWDYSHVKEKVIPLLSGIGVLRCVHCGATMVKQTAANGKREQYRYCCDGRKSGRTDCPYPNWGFRAVTLEGAVLQLLADKIWIAEDKTNPIPEIQVKIDEISRKIDNLINLSAMMGATKELANQITDLNSQREALHEEIRLFEREMYSVDSQGWDKLAQFDLSDVQNEERLKVRMKIKGALHEIECSRIDSKKNLFVLVYLDGLRQRLVIENNRGLKKGQIFVDLKTINDRQILESAGMVLHPCIEMIIDADWKAPEEIPGLLSEEFGI

SEQ ID NO: 27251 - protein, 560 aa, synthetic construct
MTKLYSYIRFSSMRQGEGSSYERQIKMAKEIADRYGLELVNDYQDLGVSAFKGANSKTGALSRFLDEIGRSIPVGSWLFIENLDRLSRQDIISAQELFLSIIRRGITIVTGMDNKIYSIETVTANPMDLMFSILLFIRGNEESQTKRNRTNSSALIKIKAHQQNPQSPAVAIEEIGKNMWWTDTTSGYVLPHPVYFPILQKIVKMKQEGHSTGSVLDYLNEHHTPPAPTSNKQHRKWSIAMVSRLFKTKALIGVKEVTVDGVQYELKDYYPRVLSDSEYYFLKNNLIKKAWSFGHAQEKTIPLLSGIGLLKCAHCGSPMVKRKAANGKVEQYRYTCDGEGSGRTDCLYPNWGFRASSLEGAVLQLLADKVWVAEDKANPIPEIQVQIDEISRKIDNLINLSAMTGATKELANQITDLNTQREALHEEIRLFEREMYSVDSQGWEKLAQFDLSDVQNEERLQIRLKIKGALRSIECARIDRNKNLFVLVYLDGLRQRIVIENNRGIRKGQIFVDLKTINDRQILESAGMVLHDHIDILIDEKAFYDGLPKEEDGPLSKFGI

SEQ ID NO: 27252 - protein, 558 aa, synthetic construct
MTKLYSYIRFSSMRQSDGSSYERQIRMAKEIADRYNLELVNDYQDLGVSAFKGANSKTGALSRFLDEIGRSIPVGSWLFIENLDRLSRQDIISAQELFLSIIRRGITIVTGMDNKIYSIETVTANPMDLMFSILLFIRGNEESQTKRNRTNSSALLKIKAHQQNPQSPAVAIEEIGKNMWWTDTTSGRVLPHPVYFPVLQKIVQLRQEGHSAGAILDYLNEHHEPPAPTSNKKHGKWSRAMVSRLFHTKALIGVKTVNVDGVEYELRDYYPRVLSDSEFYFLRKNIIKKAWDYSHDKEKVIPLLSGIGVLRCVHCGATMVKQTAANGKREQYRYCCDGRKSGRTDCPYPNWGFRAVTLEGAVLQLLADKIWIAEDKTNPIPEIQVKIDDISRKIDNLINLSAMTGATKELANQITDLNSQREALHEEIRLFEREMYSVDSQGWDKLAQFDLSDVQNEERLKVRMKIKGALHEIECSRIDSKKNLFVLVYLDGLRQRLVIENNRGLKKGQIFVDLKTINDRQILESAGMVLHPCIEMIIDADWKAPEEIPGLLSEEFGI

SEQ ID NO: 27253 - protein, 579 aa, synthetic construct
MPTAYAYIRYSSKAQGGADRDSVDRQMSSIEAITKHQNIELLPENIFSDTGVSGYDGSNSRTGKLKELIDRINSLEIRTGDYVFVESIDRLSRQRLLQAKELVNNILEKGIVLITTIDGQRYEKPNDVNGIDDLQQDILLSVISKRAHEESRTKSIRRKSAWNRAKANAETDQKIFNAHNPPYGIFFDKKTNSFKINEDEAKEIRQIFESLKFVGVSQTIKEINTTSKRKWTNKNVSHLFSTKYPLGYYMAQRRDEHKKKVFESYIENYYPQIISFELWQEVRNAMEGRKHRRNYGSHSLGNLNIFRHVIKCGECKASLLFEMNKNPKGIQYSYFHCHTRKEIKGKCNQPRFRFEYALGILLELVKNATENPNYIGEGYVDPDYIDVLDPDIWEARHNNFKELLADIMNDKGGAIANQQKLSTLEAELSKNLVIEQNLNKSFEAYSDGVIPDLFINRVIKVKKSITELRTEITKLKASLNTNKTDLRIYSTKDILRLYETEKGRLELNNFFTVNEISFIFEYSKENRTLVGKVLHKGVFIQWVEKKFSLHNPLVEEYGIQNINKMSETSKAIEPSQSQN

SEQ ID NO: 27254 - protein, 438 aa, synthetic construct
MPAAIPYIRFSTGKQRHGNSEERQHQMVMSWLGQNPNHTLSDLKYSDLGKSGYKGDHIKDGGGFAMLLEAVEAGAIKPGDVVLVEAIDRTGRLSPLKMLNTIISPIIEAGVSIVTLDDNVTYDSGSIAGGHLFLLVAKIQAAHGYSKQLSERVTASYGIRRQQAIEGKSIKRWAPIWLTVDGVLKEAIAPYIKQAFEWYVSGIGKTTIANRLRGSGVPELATCSGPTVEAWLRNKAAIGTWEYHKGKEDAEDIPNVYEPVVTPELFMQAQRRKKEVATKPRERTSKHFLVGLVKCGVCGSSYIIHHKDGKPNNLRCGTYHRLKKAGCTNDETIPYQVAVYIYSETATHWVDKALQKVQLTVNDKRKLVLENERDTLTASIKTLTEKAVALDIPELWNKLEEESNRRKFVDEELSVLERTPDAGGGFAAVLAQDQMVSS

SEQ ID NO: 27255 - protein, 452 aa, synthetic construct
MKAAIYIRVSTQEQIENYSIQAQTEKLTALCRSKDWDVYDIFIDGGYSGSNMNRPALNEMLSKLHEIDAVVVYRLDRLSRSQRDTITLIEEYFLKNNVEFVSLSETLDTSSPFGRAMIGILSVFAQLERETIRDRMVMGKIKRIEAGLPLTTAKGRTFGYNVIDTKLYINEEEAKQLQLIYDIFEEEKSITTLQKRLKKLGFKVKSYSSYNNWLTNDLYCGYVSYADKVHTKGVHEPIISEEQFYRVQEIFSRMGKNPNMNRDSASLLNNLVVCGKCGLGFVHRRKDTVSRGKKYHYRYYSCKTYKHTHELEKCGNKIWRADKLEELIIDRVNNYSFASRNVDKEDELDSLNEKLKTEHVKKKRLFDLYISGSYEVSELDAMMADIDAQINYYEAQIEANEELKKNKKIQENLADLATVDFDSLEFREKQLYLKSLINKIYIDGNQVTIEWL

SEQ ID NO: 27256 - protein, 452 aa, synthetic construct
MKAAIYIRVSTQEQIENYSIQAQTEKLTALCRSKDWDVYDIFIDGGYSGSNMKRPALNEMLSKLHEIDAVVVYRLDRLSRSQRDTITLIEEYFLKNNVEFVSLSETLDTSSPFGRAMIGILSVFAQLERETIRDRMVMGKIKRIESGLPLTTAKGRTFGYDVVDTKLYINEEEAKQLQMIYDIFEEEKSITFLQKRLKKLGFKVKSYSSYNNWLTNDLYCGYVSYKDKVHTKGIHEPIISEEQFYRVQEIFSRMGKNPNMNKESASLLNNLVVCSKCGLSFVHRRKDTVSRGKKYHYRYYSCKTYKHTHELEKCGNKIWRADKLEELIIDRVNNYSFASRNVDKEDELDNLNEKLKTEHTKKKRLFDLYISGSYEVSELDAVMADIDAQINYYEAQIEANEELKKNKKIQENLADLATVDFDSLEFREKQLYLKSLINKIYIDGEQVTIEWL

SEQ ID NO: 27257 - protein, 1132 aa, synthetic construct
MAGIRTENKIYEVGIYCRLSKDDGTDNESASIATQKSILTDYVKRQGWHLAKTYVDDGYSGTNFQRPSFQNMIKDIENGLINCVITKDLSRLGRNYLDCGLYLEVFFPEHNVRYIAVNDGVDTLNKSAMDITPFRNILNEMYSADVSVKIKSAYRARFQQGKFMGTTAPYGYVKDPADHNHLLIDDKVAHVVREIFDLALAGNGIAKIRKHINKQHILRPAAYAVEQGATGYERYFEDNEENRYIWSENSVRGILRSPIYAGNLAGYKRIAANMKSKKRPSKLPEEWEVIPDTHEGIVTQEEFDTVQQLMTSRRREQNAGGFENIFSGVIKCADCGYAMRAASANRRKRPDIIDCVQYTCNNYGRYGNVMCTAHSIEARDLFNAVLADINRFADMAVNDEKAVRAIERRLTETDQSRAKSLEKEKKKLNKRLAELDRLFSSLYEDKVMERITERNFEMMSGKYQKEQLEIEARLKEVTETLNDSYEKSQGVRDFLSLIRNYQGLKELDATIINALIDKILVSEREKLADGTVRQEIKIYYKFIGFVGELHITPTKRWTALKPKNCTVCGVEYVPSSGISKYCPACAKRIQREKSNESKRRSRERNRRACIELSAKNDRLMLIAEKQAEQKSLKMNLIFDKTLPAYLIGDVIHIKQILLNLINNAVKYTKEGQIDIKVSKNAEETKLIFEVKDTGIGIKEENLPVLFDAFMRVDSKKNKKIKGTGLGLAIAKQLAEQMDGMIWVESVYGKGSSFFVQLPMKKVSDGKISNVEWKETDERKRRSFVAPQAKILIVDDNPENLMVTRSLLKRTAVFVDTAASGEECVHKVRQNIYDLILLDYMMPQMDGIDTIRELKKDVQFHIPVIALTADVTKGIEQTFLREGFCAYLSKPVMWSKLEDLLMKYLRDDLVFIREDLKEEQKIKDEEFKQLKGQLKENDIKIEEGLRLLDGDFMQYRKLMEFFMEYQEEYMRQMQQLMTQNEVKVDEITRMMHTLKSNAKAIGAIHLYEIAKEMEDRGKQKDMEYIMSAYDLLKLEWGRVFKASREFIEQTKNVLFDQKKEEEKDKQSKEEIKEKLKIFITRYQAKEAKEQIQYYRKGKISEEERNILKEMEIRIDQLDFDEAEILMKRWEGME

SEQ ID NO: 27258 - protein, 541 aa, synthetic construct
MQVDGYSLDAQRDKLRKYAAYEDMIIAGEYSDEGFSGKNIQGRQDFQRMLNDIQDGKDDVSYVLVFKLSRFGRNAADVLNSLQLMQDFGVNLICVEDGIDSSKDAGKLMISVLSAVAEIERENIRTQTMAGREQKAREGKWNGGFAPYGYKLENGNLVIAEDEVEVIRVIYDRYIHTNEGVAGVAKYLNRNGYVKKLRQNNTIPGFSRDFVKNVLYNPVYMGKIAYGRRRTEKKQGTRNEMHVVEQSEFPVYEGQHEAIISEEDWYLAQEKRKINSFKREKVNNPDHAHILSGILKCPCCGKSMYGNIAKAHSKDKKTRYYYYCKNTVTPTGHECSFRLNIEQTEINKFVAKIISAMVNNPRFVEAIQAKIGTAVDTEDMEKQIAVLQGQLKQAFGTKSRLERQMDTLDINDAHYDRKILDLQRRYDEQYDTIEEIEVQIGELQSQIRSIQQEKISGDNIYRLLLAFDEVYHSATEAEQKEFMKAFIERIEMFPEKRKDGSWIKKIVFNFPVPIDGEEVKELPLETETTVETMVLLQRRDI

SEQ ID NO: 27259 - protein, 597 aa, synthetic construct
MEVEVIKAKNKFDDSAKQRYKDRLRVAAYCRVSTDDKEQEKSYNSMIKHYTALIQENKLWTFAGIYADPAVTGTKVDKRDEFHRMIQDCKAGKIDMIIVKNIPRFARNTLDTLKYVRMLKEINVAVYFEKENIHTIRDGEFLIAVLGSIAQQEVENTSANVKMGLKMKMKRGEMVGFNNCLGYDYDKELKTISINPEGAKVVRYIFERYIAGAGSTMIARELNEKEIHTIRGNKWTASSIMGVINNEKYKGDLLLGKTFTVDPISKRRLENFGEEDKYYVRNHHEPIISEDMFEKAQAMRSRRNGGKLSVVPGKRDKYSRKYAFSSLLECGFCGGHLTRRQWHSNSIYKKSIWQCIAASKNGKYNCPDSKGIPEQVIEEAFLESYRLLCRDNKEVVDEFIKRAEQTLGKQNLEKEIKKCKKKINEIKKQRQKLLDNYMNNIIAQDMYEENETTLVRELSDVNIQLAQLLEKQKDQKSLEERISDFKEALLNDEIITEFDRVVFESIIEKVIVGGFDENGNKDPYKLTFIYKTGFTNEVKDAKKRFAKKDSIIDKTKKMCSYIADEMQGLCSYVSNGTCGDSSTAFPQKARRTYQRKS

SEQ ID NO: 27260 - protein, 540 aa, synthetic construct
MKQPYNTTIYNTALYLRLSRDDELQGESGSIQTQRMMLRQYAAEHGLTVVDEYIDDGWSGTNFERPSFQRMIDDIEDGKINCVVTKDLSRLGRNYILTGQYTEIYFPSKGVRYIAINDNVDTINGESELAPFLNILNEMHARQTSKKVKAAMHTRFANGAHYGAYAPLGYVKDPDKKGHLLIDPETRWIVEKIFDLAVHGRGAASITRILVEEKVPTPGWLNYERYGTFANIYAGAPAEKAYAWTIAQVKSILKEETYIGHSIHNKQSNISFKNKKKVRKPQEEWYRVENTHEAIISEEVFQKVQELIASRRRKRRNGTTQIFAGLIKCADCGWSLAYGENKQNKNPYGYYHCSKNGQGLRQCSMHYIRYDVLYAYVLARLQYWSMLAQKDEDKLLKRLLNASDRERNSAKKKQAAELKKAEKRKAEVDGLFAKMYEDWSAGRITEYNFNMLSEKYQNEQKELETKIRQLHEMMEAAVQTAADAEKWIALMKQYVNPVELTAELLNTLIEKITVHEAVKGEDGSREQEVEIYYRFIGKID

SEQ ID NO: 27261 - protein, 558 aa, synthetic construct
MKRVIGYIRVSTDNQDLERQRVLIRKYCENKGYSLLRIEEDYAISGTVSNRNGLNSILNITNSVADMVVVSELSRLSRQDDIFETLTQIHTIIRNVDLVILDEPDKVYEAGKTIILSDFLMLAIKAYGAADERKKIVSRMTTGKDSKVQAFPLMLTDSNIPTGFKAVPNPNYIKGATPKMLLVEDEERMQLVRDIFNYVANGLSLGKTAEKLNMLGYRTARNKPFYEQSIRTIINDSIYNGVRYWKGIKLELPVKFISDEIWNLAHKKVQENKNYSGEAQKHYNPLKGIIKCPCGQTSMYGRTSSCITYRCLDRIKMGIKSPCTNVGIKAETLIYAVWKDVRLRTLDETYQAKSNEKIAEIEAENIKLTQSIKEKDSEIAKLQSDLKTVIDNVMASTNITIVKALNGKADSIDSQIKSIEAEKTAIDEEIASNNRRIADEIKSQSRKELDSLSLEGKGEMFRELLSKVVYYSVSLNSGFIVITYKNDLETIIAYHNRNKPFLWALPITFRFNKVKRTVIVPTLPEQPKMTSFVLERIKEKEYTFKQLQESFNLEEYKI

SEQ ID NO: 27262 - protein, 609 aa, synthetic construct
MTKIIGYARVSTTKQDLSRQKLKIKEFCENNNYELIEIIEDFGISGVVADRKGYIELQSKTYKDADMIVISELSRLSRQEDVTETVYNIQQIINKGLSVILLDSPSKIYEANKLLDITEILILTIKAWAAAQERLDIKKKNQDGKQALFQAYPYAVVDPKIPYGYKAVPNPNGKRPKYILEEVPEEVENIKRLFALVNSGKTLGAVARYFNERNITFRGYYSTVAILSNYIHSDIYRGIRRRTQRLGREEPYTIEVRIKPIISEEDFMKAQELIKNNYKNTPTGKVNHNPLKGIIRCRCGRAMTVKDKKPAAGISKLTYRCSCVDRKSHPDFCKYNIDEVSYDLTNEILYSLFKSMHTAEYINFFRNQTDNRVTELQEEIDGIEKRLSVLYLDKENLSNESQDNANKFLLTTNPTLLNIIQEKQNQLDEKIKSIDKEIIRYKKSQSKKMADIERIKDNNGKEKLQNLSIEEQGELYHKYLERVNYIPVTTMQGYYIVQFLNGIKFYIAITKVRSIAMASLLLDNWTIDEKGIITANYDTLKSSDMKNFSIEMIRKKKTMTLQEYLKSDLAKERALHLDLSYRERYLKELHKAGLDGRLRPLKKEYLHPF

SEQ ID NO: 27263 - protein, 563 aa, synthetic construct
MREVQVLQATKTAPNSRGRNSNYAVQIDRIRVAAYCRVSTDGDEQLGSFESQKLYYEEKIRKNKEWAMAGIFADEAITGTKIDKREGFQEMIRKCLNGEIDMILTKSISRFSRNTPDTIKYVRMLRDKNIAIMFEKENINTLDMNGEMLLTILSSLAQEEVESLSSNVKMGLQMKMKRGELVGFNGCFGYDYHQDTKTITVNETEAETVRLIYDMYLQGNGCGTIAKRLVELGIKNKRGTVEWHDHGVMGMIKNEKYKGDVLLGKTFTVDPISKRRLANMGEENQYYIRDHHEAIVSREIWDKAEEIRLKRAKPKLMQTTGNRERYTRQFTFSSMLECGYCGHKLSRRTRHQTTTTKKPVWQCMNATKNGIDNCPNCKAVDEVIIENAFLEAFRLLADSFDDVLQSVLNTIEDILKDDTELKRVKQLEKDISTIESKKSRLTDLLIDGKIEQEDYDEKKLSFQRKLHKITEEKAYLEENIGQQKNISRRMSQLRQTLENENALDEFDRIVFESIVEKVIVGGYDAEGNPTPYKLTFVLKCNQTLKVDNAKADYRANQKGKKVS

SEQ ID NO: 27264 - protein, 604 aa, synthetic construct
MTKIIGYARVSTTKQDLSRQKLKIKEFCEKNNYELIEIIEDFGISGVVANRKGYLELQCKTYKDADMIVISELSRLSRQEDVTETVYNIQQIINKGLSVILLDSPNKIYEANKLLDITEILILTIKAWAAAQERLDIKKKNQDGKQALFQANPYAVVDQKIPYGYRAIPNPNGKRPKYILEEVPEEVENIKKLFDLVNSGKTLGAVARYFNERNITFRGYYSTVAILSNYIHSDIYRGIRRRTQKLGREEPYTIEVRIKPIISEEDFMMAQELVKRNYKSTPTGKVNHNPLKGILRCRCGRAMTVKDKKPAAGISKLTYRCSCVERKSHPDFCKYNIDEVSYDLTNEILYSLFKSMHTAEYINFFKNQTDYKITELQEEITGIEKRLTTLYLDKENLSNESKENVKKFLTTTNSTLLKSIQEQQNIIDEKIKSIDKEIAKYQKSQSKKIADIERIKDYNAKEKLQNLTIEEQGELYHKYLERVNYIPVTTMKGYYIVQFLNGVKFYIAITKVRSIAMASLLLDNWTIDEKGIVTANYYTFKSNDMKNFNMEMINKTKTMTIQEYLKSDLAKERALHLDLSYRERYLEKLHEAGLDGRVRTLKKE

SEQ ID NO: 27265 - protein, 540 aa, synthetic construct
MKQPYNTTIYNTALYLRLSRDDELQGESGSIQTQRLMLRQYAAEHGLTVVDEYIDDGWSGTNFERPSFQRMIDDIEDGKINCVVTKDLSRLGRNYILTGQYTEIYFPSKGVRYIAINDNVDTINGESELAPFLNILNEMHARQTSKKVKAAMHTRFANGAHYGAYAPLGYIKDPDKKGHLLIDPETRWIVEKIFDLAVHGRGAASITRILVEEKIPTPGWLNYERYGTFANIYAGAPTEKAYAWTIAQVKSILKEETYIGHSVHNKQSNISFKNKKKVRKPQEEWYRVENTHEAIISEEVFQKVQELIASRRRRQKNGTTQIFSGLVKCADCGWSLAYGVNSQNKNPYAHYHCSKYGQGLRQCSMHYIRYDVLYAYVLARLQYWSMMIQKDEDKLLKRLLNASDRERNSAKKKQAAELKKAEKRKAEVDGLFAKMYEDWSAGRITEYNFNMLSEKYQNEQKELETKIRQLHETMEAAVQTAADAEKWIALMKQYVNPVELTAELLNTLIEKITVHEAVKGEDGSREQEVEIYYRFIGKID

SEQ ID NO: 27266 - protein, 540 aa, synthetic construct
MKQPYNTTIYNTALYLRLSRDDELQGESGSIQTQRMMLRQYAAEHGLTVVDEYIDDGWSGTNFERPSFQRMIDDIEDGKINCVVTKDLSRLGRNYILTGQYTEIYFPSKGVRYIAINDNVDTINGESELAPFLNILNEMHARQTSKKVKAAMHTRFANGAHYGAYAPLGYVKDPDKKGHLLIDPETRWIVEKIFDLAVHGRGAASITRILVEEKVPTPGWLNYERYGTFANIYAGAPAEKAYAWTIAQVKSILKEETYIGHSVHNKQSNISFKNKKKVRKPQEEWYRVENTHEAIISEEVFQKVQELIASRRRKRRNGTTQIFAGLIKCADCGWSLAYGENKQNKNPYGYYHCSKNGQGLRQCSMHYIRYDVLYAYVLARLQYWSMLAQKDEDKLLKRLLNASDRERNSAKNKQAAELKKAEKRKAEVDGLFAKMYEDWSAGRITEYNFNMLSEKYQNEQKELETKIRQLHEMMEAAVQTAADAEKWIALMKQYVNPVELTAELLNTLIEKITVHEAVKGEDGSREQEVEIYYRFIGKID

SEQ ID NO: 27267 - protein, 484 aa, synthetic construct
MKKKVALYVRVSTLEQAESGYSIGEQIDKLKKFADIKDWNVYEVYEDGGWSGSNTNRPALERLINDAKRHLFDTILVYKLDRLSRSQKDTLFLIEDIFKANNIDFVSLNENFDTSTAFGTAMIGILSVFAQLEREQIRERMKLGLVGRAKSGKAMGWHMTPFGYTYDKQSGNFIINNLTASIVREIFNDYLSGISITKLRDKLNESGHIGKDRNWSYRTLRQTLDNPTYIGVVKYDHKIYAGNHEPIIENDVFQAVQIELSKRQQLAYQKNNNPRPFQSKYMLSGIIKCGYCGSPMVSTLGNKRKDGTRLKKYQCVNRHVRKSSGVTIYNNNIKCDSGFYMMADIENYVINTVSDLQASPESVKKLFNKNNNNIEKVNIDEIKKEISKLSSRLKKLSDLYMNDLLSLDELKEKTSELKSTRLLLENKILEDKNNSNIKIKERIINNMNKKSIQKMSYQEQTNLVKSLINKVSVTREMIEISWNF

SEQ ID NO: 27268 - protein, 484 aa, synthetic construct
MKKKVALYVRVSTLEQAESGYSIGEQIDKLKKFADIKDWNVYEVYEDGGWSGSNTNRPALERLINDAKRQLFDTILVYKLDRLSRSQKDTLFLIEDIFKVNNIDFVSLNENFDTSTAFGTAMIGILSVFAQLEREQIRERMKLGLVGRAKSGKAMGWHMTPFGYTYDKQSGNFIINNLTASIVREIFNDYLSGISITKLRDKLNESGHIGKDRNWSYRTLRQTLDNPTYTGVVKYDHKIYAGNHEPIIESDVFQAVQIELSKRQQLAYQKNNNPRPFQSKYMLSGIVKCGYCGSPMVSTLGNKRKDGTRLKKYQCVNRHVRKSSGVTIYNNNIKCDSGFYMMADIENYVINTVSDLQASPESVQKLFNKNNNNIEKVNIDEIKKEISKLSSRLKKLSDLYMNDLLSLDELKEKTSELKSTRVLLENKILEDKNNSNIKIKERIINNMNKKSIQKMSYQEQTNLVKSLINKVSVTREMIEISWNF

SEQ ID NO: 27269 - protein, 484 aa, synthetic construct
MKKKVALYVRVSTLEQAESGYSIGEQIDKLKKFADIKDWHVYEVYEDGGWSGSNTNRPALERLINDAKRHLFDTILVYKLDRLSRSQKDTLFLIEDIFKANNIDFVSLNENFDTSTAFGTAMIGILSVFAQLEREQIRERMKLGLVGRAKSGKAMGWHMTPFGYTYDKQSGNFIINNLTASIVREIFNDYLSGISITKLRDKLNESGHIGKDRNWSYRTLRQTLDNPTYTGVVKYDHKIYAGNHEPIIENDVFQAVQIELSKRQQLAYQKNNNPRPFQSKYMLSGIIKCGYCGSPMVSTLGNKRKDGTRLKKYQCVNRHVRKSSGVTIYNNNIKCDSGFYMMVDIENYVINTVSDLQASPESVQKLFNKNNNNIEKVNIDEIKKEISKLSSRLKKLSDLYMNDLLSLDELKEKTSELKSTRVLLENKISEDENNSDLEIKERIINNMNKKSIQKMSYQEQTNLVKSLINKVSVTREMIEISWNF

SEQ ID NO: 27270 - protein, 484 aa, synthetic construct
MKKKVALYVRVSTLEQAESGYSIGEQIDKLKKFADIKDWNVYEVYEDGGWSGSNTNRPALERLINDAKRHLFDTILVYKLDRLSRSQKDTLFLIEDIFKANNIDFVSLNENFDTSTAFGTAMIGILSVFAQLEREQIRERMKLGLVGRAKSGKAMGWHMTPFGYTYDKQSGNFIINNLTASIVREIFNDYLSGISITKLRDKLNESGHIGKDRNWSYRTLRQTLDNPTYIGVVKYDHKIYAGNHEPIIENDVFQAVQIELSKRQQLAYQKNNNPRPFQSKYMLSGIIKCGYCGSPMVSTLGNKRKDGTRLKKYQCVNRHVRKSSGVTIYNNNIKCNSGFYMMADIENYVINTVSDLQASPESVQKLFNKNNNNIEKVNIDEIKKEISKLSSRLKKLSDLYMNDLLSLDELKEKTSELKSTRVLLENKISEDENNSDLEIKERIINNMNKKSIQKMSYQEQSNLVKSLINKVSVTREMIEISWNF

SEQ ID NO: 27271 - protein, 484 aa, synthetic construct
MKKKVALYVRVSTLEQAESGYSIGEQIDKLKKFADIKDWNVYEVYEDGGWSGSNTNRPALERLINDAKRHLFDTILVYKLDRLSRSQKDTLFLIEDIFKVNNIDFVSLNENFDTSTAFGTAMIGILSVFAQLEREQIRERMKLGLVGRAKSGKAMGWHMTPFGYTYDKQSGNFIINNLTASIVREIFNDYLSGISITKLRDKLNESGHIGKDRNWSYRTLRQTLDNPTYTGVVKYDHKIYAGNHEPIIENDVFQAVQIELSKRQQLAYQKNNNPRPFQSKYMLSGIVKCGYCGSPMVSTLGNKRKDGTRLKKYQCVNRHVRKSSGVTIYNNNIKCDSGFYMMTDIENYVINTVSDLQASPELVQKLFNKNNNNIEKVNIDEIKKEISKLSSRLKKLSDLYMNDLLSLDELKDKTSELKSTRLLLENKISEDKNNSDREIKERIINNLNKKSIQKMSYLEQSNLVKSLINKVSVTRETIEISWNF

SEQ ID NO: 27272 - protein, 378 aa, synthetic construct
MRTVKAYIYSRVSSLQQVDAFGLERQISTVLDFLENAKLPAELGYQLDPSNHEVLESDKGLSGYAGHNFTKGSLGRFKERVRSGEITEGCLLIESVDRFSRKQGYDAMDEFTFLIKRNIDIVEVETGQIYSYKLDHKLSALSTSIERAHQESKRKARISMKSWKHRKEASLANGGALNNNTPDWLSLSTDKLSYEIDYHRVETIKRIFQMYRDGYGVTHIVKVLNDEGNRYNGIGWNTVTVYNKLRDRRLNGFLVGKYKTIPKKINESTNETEKRILENLKIKKEAHDNAKRICPVVVDDDLFLKVQSLMDRNVSNKKQRSTTTKQRNLFNGLTKCYECGSPMIVQSMSNGGLRCYRQRTKDEKCNSKMLRYSVTYAS

SEQ ID NO: 27273 - protein, 414 aa, synthetic construct
MKLLVSYVRWSTKAQDSGDSLRRQNDMIDAFYRKHSDEYFMQATHRYVDKGKSGFHQKHKADGGEFKRMLDNVLSGDIPAGSLIVMENFDRASRADIDSAIDDIRQILRKGVEILTLGDNERYDKSSLSDPIRLIKHILIAERAHQESVVKQERTTAVWKGKTAKAIETGLPMGRQTPGWIELSPDRQSFVVIEPKADIVRLIFKLRLAGHSMFAICKHLNENGIETINDRKARISKTFKPGGGGWSAVSVKCLLTSRSVLGYLPAKISTEDRKIILRDEIADYYPRIIDDQTFNAVQTLLEKGGKGRLAAGDHWLYVNIFRTMLRCKCGLTMSPSGIRKPVYQGTYRCNGMHEGRCDYGSVSRKKLDTELCTRLFSKLSQLYDSNIDQSKIIEIQRRLQTVDRELQTLTETLL

SEQ ID NO: 27274 - protein, 558 aa, synthetic construct
MTKLYSYIRFSSMRQSDGSSYERQIHMAKEIADRYNLELVNDYQDLGVSAFKGANSKTGALSRFLDEIGRSIPVGSWLFIENLDRLSRQDIISAQELFLSIIRRGITIVTGMDNKIYSIETVTANPMDLMFSILLFIRGNEESQTKRNRTNSSALLKIKAHQQNPQNPAVAIEEIGKNMWWTDTTSGRVLPHPVYFPVLQKIVQLRQEGHSAGAILDYLNEHHEPPAPTSNKKHGKWSRAMVSRLFHTKALIGVKTVNVDGVEYELRDYYPRVLSDSEFYFLRKNIIKKAWDYSHVKEKVIPLLSGIGVLRCVHCGATMVKQTAANGKREQYRYCCDGRKSGRTDCPYPNWGFRAVTLEGAVLQLLADKIWIAEDKTNPIPEIQVKIDEISRKIDNLINLSAMTGATKELANQITDLNSQREALHEEIRLFEREMYSVDSQGWDKLAQFDLSDVQNEERLKVRMKIKGALHEIECSRIDSKKNLFVLVYLDGLRQRLVIENNRGLKKGQIFVDLKTINDRQILESAGMVLHPCIEMIIDADWKAPEEIPGLLSEEFGI

SEQ ID NO: 27275 - protein, 568 aa, synthetic construct
MAASPQVRAGRYPTRSYTPMNSQLRGVSALRLSVLTDETTSPERQREANQGAAASLGIDLADREAVDLGVSASKTTPFERPGLGAWLRRPADFDALVFWRFDRAVRSMDDMHELAKWARDHRKLIVFAEGPGGRLDLDFRNPMNPMTTLMVTLFAFAAQMEAQAIRERVTGAQAAMRLMPLRWRGSRPPYGYMPAPLEGGGVTLIQDPDAVKVLERIIKELKGDPFNGVAPKGTAAIARDLNADGIPSSRDHWSLKQGRKTGGKTGGNPGETVVREQFKWTHGSIKELLTSERLLGWKVTEKGVVRDSEGRPVMATADPILTREEFDAVGAILNERSVDNKKPDRVDTVALLLRVIHCAGCGERMYLHQPSPNSKSTSKTHTYKCSAHNQGRTCETRAIIKREWAEEYAEREFLRMLGALEVTQTRTIPGYDPQPEIDATIAEFEAHQEQQGRQKSAAAKAAWQRHAAALDSRLAELETREKVEPRIEETRTGKNYADLWAKADTAGRRQLMQGAGARLDVSRGKRGRQFKLDEGRVDFSVRDPFFSEAAAELTAMADEERTAEAAWL

SEQ ID NO: 27276 - protein, 481 aa, synthetic construct
MITTNKVAIYVRVSTTNQAEEGYSIEEQKDKLSSYCNIKDWSVYKIYTDGGFSGSNTKRPALEQLIKDAKKKLFDTVLVYKLDRLSRSQKDTLYLIEDVFLENKIDFVSLLENFDTSTPFGKAVVGILSVFAQLEREQIKERMQLGKLGRAKSGKSMMWARTSYGYDYHRETGTMTINPVQSLAIKFIFEQYLSGRSITKLRDDLNDKYPKDIDWNYRAVRMILANPVYCGYNQYKGQVYPGNHEPIISEEDFNKTQEELKIRQNTAAEKFNPRPFQAKYMLSGIAQCGYCGAPLTITLGTKRKDGSRNIRYQCKNRFPRTTRGVTTYNDNKKCDSHFYEKADIEENVLNQISKLQNDTSYLDELFSSTEDNGIDRDSYQKQIEELTAKLSRLNDLYIDDRITLEELQRRSTEFTLMRGMLEAELENDRALKQQERKDDMRQILNRGDVLGMDYEGQTVVVRALISKVQVTSEEIVIKWKI

SEQ ID NO: 27277 - protein, 481 aa, synthetic construct
MMTTNKVAIYVRVSTTNQVEEGYSIDEQKDKLSSYCHIKDWSIYNIYTDGGFSGSNTERPALEQLIKDAKKKLFDTVLVYKLDRLSRSQKDTLYLIEEIFIKNGIEFLSLQENFDTSTPFGKAMIGLLAVFAQLEREQIKERMQLGKLGRAKSGKSMMWARTSYGYDYHKETGTVTINELEAIAVRDIFNSYLAGMSITKLRDKLNDKYPKTPNWHYRIIRGILANPVYCGYNQYKGQIFLGNHEPIISEKTFNKTQDELKARQIAAAQFSNNPRPFRAKYMLSGIAQCGYCGAPLQITLGTIRKDGSRNIRYQCKNRFPRTTKGVTIYNDNKKCDSRFYEKSDVEENVIQQISKLQNDPKVIDGLFADLETTIDRDACIKQIEVLSRKVSRLNDLYIDGLIALDELQTKNAEIINQRSLLEKELENDPAIKHQERKRDMRQTLSTDDIFTMDYEQQKVIVRALINKVQVTAESIKIKWKI

SEQ ID NO: 27278 - protein, 491 aa, synthetic construct
MQDRNTNSPNTFAAIYCRISSDKTGKSAGVERQQADCRTMADRLGLTVQHVLVDNDISAYSGKPRPGYKQLLELMRTGAVGTVLAYHQDRLQRSPVELEEYVDVSEIHRVTTHTVLAGHIDLSTPSGRFNARIIGAAARYEVEHMIERQQTAKLQAAKDGKYLGGQRPFGFEPQRKAIRESEAAIIRDMYERFVVGRSWWSIAVSLNQRGIRTTHGKDWNSLKVRNVLIRPINAGIVLHKGVEYPAQSPAILSPDEWANLKLAIDISRRKSPHPGRARKHLLKGFLICGACGEKMFHKSKQQRDGSYKTTAACGKTDNQTGRQHGCGKVSRMVEPIIDLVVDSIMFRLNSPELATTLHKHKTSADTLKTLNDQQRALESSINEITDDYYVNKLLTRDQFERAKTQADNDLALITKQIDAELVSEAVNTTDVSGDLRERWENETLEWQRSLLFLLIDRISVHPLPRVPGYKYPKYKSKWRFDPDLIQIEWKA

SEQ ID NO: 27279 - protein, 520 aa, synthetic construct
MKKITKIDELPQGQLPNTKLRVAAYARVSTDSDEQLESLKAQREHYERYIKSNPEWVFAGLYYDEGISGTKMEKRTELLRMIRDCKQGRIDFIITKSISRFARNTVDCLELVRKLIDIGIYIYFEKENLNTGDMESELMLSILSGFAAEESASISQNSTWSIQKRFQNGSYVGTPPYGYTNIEGEMVIVPEEAEIIKRIFTECLSGKGGGTIARGLNKDKIPASRGNHWSAGTVIDMLRNEKYMGDVLLQKTYTDSNYNRHPNTGEKDQYYYKDNHEPIVSREDFAKAQDLIDERAKMKSKGVKKNVYLNRYALSGKIVCGECGRNFRRKTNYSAGRSYIAWSCIGHIEDKESCSMLFLRDGEIKATFTTMMNKLAFSNELILVPLFKSISQIDEESDLERMDAIDKRMEQLMEERNTLITLMAKGFLEPALFNQERNVLDSEMKNLSTEKTNLVSNSTSGVLRANEIKDLIDNVSADNFNGDYTEELFEEFVENIIVNSRDGLTFNLKCGLSLKEKVVR

SEQ ID NO: 27280 - protein, 507 aa, synthetic construct
MKRAISYIRFSSEKQSRGDSLRRQSKMVNDWLKAHPEYYLDQDLSFRDLGVSGFTGKHLKGGLGDFLTAIEKGLVKAGDTLLIESLDRLSRQNVDRASELLRNILRSGVDVVTLSDGEHYTRESLKDPLALIKSILIMQRAHEESLRKAERIQAAWDAKKEAAKAGIKISRRCPAWLKLNDDRKSFSVIPEKVETVKRCFQLRLEGKSIWEIVRTLNAEGHQTLNQYKAGKFGQTSVQDLLKNRSVIGYFTPKGCEEISGYYPAIIDETTFYKVQQLSHYRYGRKPVSDKPLSVNLFKGVIRCSECGHALIITGFSDTRNGIYRCPLRNENRCSAKGLSRKQTDGTLLTLLSRLDRFDSDMTNTLDTLKLHREHISSNIEKLVQLSLEIEDLSAITIKLKQLKGELSQVDADIEKETQRLKSIDVGCLSDCDLTTKAGRIEAQLIIKSAVKEVVLNTAKRRCKVTFHNGRAITLPITENPSEDVTEAIQSLSEVTERGLIDVDEVII

SEQ ID NO: 27281 - protein, 507 aa, synthetic construct
MKRVISYIRFSSEKQAKGDSLRRQSKMVTDWLKAHPEYYLDQDLSFRDLGVSGFTGKHLKGGLGDFLTAIEKGLVKAGDTLLIESLDRLSRQDIDIASELLRNILRSGVDVVTLSDGEHYTRESLRDPLALIKSILIMQRAHEESLRKAERIQAAWDAKKEAAKAGIKVSKRCPAWLKLNDDRKSFSVIPEKVETVKRCFQLRLEGKSIWEIVRTLNDEGHQTLNQYKAGKFGQTSVQDLLKNRSVIGYFTPKGCEEISGYYPAIIDETTFYKVQQLSHYRYGRKPVSDKPLSVNLFKGVIRCSECGHALIITGFSDTRNGIYRCPLRNENRCSAKGLSRKQTDGTLLTLLSRLDRFDSDMTNTIDTLKLHREHISSNIEKLVQLSLEIEDLSAITIKLKQLKNELSQVDADIEKETQRLKSIDVGCLSDCDLTTKAGRIEAQLIIKSAVKEVVLNTAKRRCKVTFHNGKAITLPITENPSEDVTEAIQSLSEVTERGLIDVDEVIV

SEQ ID NO: 27282 - protein, 623 aa, synthetic construct
MKARKTDKGKITALYERLSRDDDLTGDSNSIINQKKLLEDYAREHGFTNCVHFTDDGWSGANFERPNWKRMIAGIESGEIGYVLVKDLSRVGRDYLQVGFYTEVMFKERGVRFIAIANGVDSDKRESSEFAPFLNIMNEWYVRDSSRKITSVLRARGMSGKHTNSHCIYGYKKDPNDKDHWIIDEEAAEVVRRIYRMALESKGPYEIARILALEKVERPSYYLAQRGVGKHQSNFNPAERYTWRGGTVADILSKPEYMGHTVNFRTYKESYKDKRSRTTPKEDLVIFENTQEAIIDKETWERVQSLRKTIRRTDTIGAANPLTGLMFCADCGAKMYNHRGGAGLARDWAGRPNGRKRPERDEYNCSRYDLGNQHYDRYCTTHLIRTAVVNELLLEAIKEVCDYALNNEAAFMEQVCSASSERQAKAAKAIRQRKQRSEKRADELSRLIRKLYEDNVNGRLSDKLFEQMLHDFEAELESLTESVTQDEQELDRISWETVNAEKFLALVKKYTDFSELTPAMINEFVEKILVHQAEGKGASRTQEVEIFFNFVGKVEIPHEEIVLTEEEKAALAEQERRRAKKAEYNRRYMEKKRRQWREQREREQEQKPHELPPVADKKGEKSA

SEQ ID NO: 27283 - protein, 501 aa, synthetic construct
MKPNIKEVAIYLRKSRDESDGKEDVLAKHESLLLEYAKNYNLKYKIYKEIGSSEYIDSRPKMVRLLSDVSQKLYDAVLVVDLDRLSRGDLEEMGRISRVFRDSKTIVLTPTKTYDFNNEDQALINNFEMVFANHEFRMIKKRMIRGKQQGTKAGKWTNGRPPFPYVYNRLTKELDVDPDKVKVYELMKKMFLEEMKATYEIAWRLNELGFKTNRNNYWYENTVRRILKNEVHLGKVVFGKTSGSGSKKKPSANGFRIKDRSEWIIAEGSHQPLKTEEEHQRILAILESRRYTPKGTRTNVQVLSKLIYCGKCNRIMSFTGKASGKKYVKTCLTTNRFGNRCHNRSLNVEVIYAQLFLDLEHYKQQLLNHKPKEKQGDSSTLRLALHNKLEELERLEKGINRIKDLFIDEVIDKSEMKKRIEKQQQLMQTKKEEIRSIEQSLAVIENVRTDDDRLHAIWEFKKAWNTEGISKRELNTLAKQLIDRIEYTREGNNVQINIYYL

SEQ ID NO: 27284 - protein, 624 aa, synthetic construct
MIKTFIYSRVFSQEQLSGGGLDRQETDVREYVTRNGLDQYEIVAMVDRGISGYDGSNMRDGELGKWYKDAITGMYWGSHLVLEAIDRFSRRDPMLAMEDFTVLVNKGGIKVHIVKFNTFINGDNLPMLSMMMNLAHSESKQKSDRISKGWQRRRRMALDNGTAITARTPYWIDVRDNEYRLNNSSIAVVEAFAMYKQGLSCGLIAKKLNELKHYFPYMWTKTAVQHIVDGLNTSGIIDAPRAIKTIKAFYKSGFSVEDIAKKMNAEFQFMKEWNAPAVHKLLQNKSVTGLVEIQKRKLIQEFDSDGKPLELRTKSEGEKYFESIYPQIISIDDFELIQKLLESNRKVDTKTGKGQTTGGTVTQNEDGELVKQFILSSLCRCYKCGGAMFNNIVRSKRKNGKVDTYSYLRCLNERDAHCDVKALNYPVIERAIIEHVKGLNFDTMFKGTNNSELELLKTREVELLRDIATYEDAIAARKAAGKNTSPVLVTSLVDAQDDLEALQKKIRAISGVTVNAEELTSLNESVFDVAEYELRNMVELELQKIIKRITFNCTEKNIYFITIQYNTGTVLQHGLKVDKKKGVIETYELHEGNKGYVSNGEVITPALIEAAESKNIGIFEGKVM

SEQ ID NO: 27285 - protein, 507 aa, synthetic construct
MKRAISYMRFSTEKQIKGDSIRRQSKLVTDWLSKNPDYFLDESLSFKDLGKSAFSGKHLRAGLGDFLTAIKEGLVKAGDTLLIESLDRLSRQDVDQASELLRGILRSGVDVVTLSDGEHYTAESLKDPLSLIKSILIMQRAYEESLRKSERVAAAWNRKKDIISEGIKVSKRCPAWLKLNDDRRGFSIIPEKVEIVKKVFTLRLQGLSFWAITRALNDGGYLSLNQYKPQGWSDTSVKTLLRNRSVIGCFTPAGREEVKDYYPAIISESLFYKVQQLNTGQYGRASTSDNPLSVNLFRGIIKCSECGSSVVVGGYAKRRYGMYRCPKNSSHQCHAKAISRKQTDETLLFMLSLVDRMEPDITNQIDSLNLRKSDLETKISKLLELAIELDDMAMVTDKLRDLKKELGQVKHQIEEETKRVRAISTGNLKDIDRSTKEGMIEAQLLIKGVVKSIIIDSAKRRCRVTLHNGKVIGLPISKNPSEELTSALTSMFEGTERGLLSLDEVEL

SEQ ID NO: 27286 - protein, 491 aa, synthetic construct
MGLAAIYLRLSRNEEQLNINEILLNHRNALTKLAKQQKLTYDIYQEISSGVNTERPELNLLLSRLDDYDALLVMDIDRISRDNAHAEEIKKMLIIHDIKILTPQGAIDLSQESNEMLFSFQAMMANFEYKQIRKRLGSGRLAAAEQGKWTMSNRVPLGYKKNEEKRLEVMEEEAKIIRFIFQKTLERVSANEIAKQLDILGWRSRQGKVLTSTHISNMRRNVVYYGVVKACRKINGRVVDEVFVEDAHEPIVSKQMFLEVQKILEENTTGNFFNKLKATRKLQNLIYCNCCKRKRYIQCDGNGIDYIKSCIYKVDNNKCRDRGYKYEPIEQFVLQKIKEKKLAFEQELQMLKSLDTTEVEKKLLIQRESLEKQINRFNKRQRNLKEMRMDGEISKAEFYEMRDENEEQIKQVKQQMELIDIKLENLSNTDEEQARLQDAIKKLDKLEELKAESCNTFLKKFIKKIWFSSNTEANHDTTKPREDATIEIEWL

SEQ ID NO: 27287 - protein, 567 aa, synthetic construct
MKAYLYCRISSGKQKDGYGIQRQSDAVLEYLSNSKEAEKLGYKLSPDHYEMLDPDLGKSGYHGYQFTKGALGRFKQRVADGEIACGALVIENVDRFSRAEEYTASEEFNFLIQRGIDIHEVETGIVYSSKISGTLSKLSHAIERAHGESERKSRMASKSWSNRHKKALEQGIALKTNHPRWLRIVDDHYEVLKEQLAIYIIIFERFLEGHGIAVLLDYLNENGILNNGKRWTRTSLHHILRDRRLIGYNKDNRIYPIAINEQMFKRVQDHFDSQDGSTKRRTTRKMRNVFNGMTKCGVCKSAMIANKNPHGKHHLYCVKKRGDKHACSASACRYEYVEKEVLKHLHNIDWNSVYSNKNKVSVDVQGKNTQLIDLARRIDELQKEMTGADHDMVLALVRSLKVLRKEHQELKDELTIISTDVKPKFNFDISEVIEQKNVSLRQEINVLIKKTVHKIFVQKFSGHIYVNVEYYNTVLSHMLVLENLTGKLLANIAIIDTSNELRISSNGFSIWHDKTKDIWNVSDFKAIGSRNFFLALNHMSQFVDREVIDDLFDMWEMKSLGSVENMV

SEQ ID NO: 27288 - protein, 530 aa, synthetic construct
MARKKRFAPNDNNLAIAYYRFSSHSQNDASIDQQRELAHEWADAHGFKIVQEYEDAAISGTTDARPGFQQMLAEVAKIRPHTLIMWKTDRLGRDKYVLAMAKKKIRDAGCEIHLLAEHIPTEGPEGVLIEGLMEAMAEYYSRQLSQNIQRGMDYNAQHALYNGHKLFGYDVDRSTKKYIPDPNTSPFVQWAFKEYASGKPLKVIAEEMNAQGLRTPRNAKFSVNMLNKMLKNRAYIGEYHHGDITVAGGMPVLVDEATFDRAQRRFAENKRKGSQRAHGMDGADAPRYWLTGKLYCGECGSTMQGVSGTSKTGRTYYYYYCSAQRRKECHLHKARKRDLEDMVLFALHNIVDDEENVTALALDAAEYYEKSHDDTAYLEALEAKRREVEKSLANLVKVIERGVVSDTVTQRLAQLEEQKSALNDAIGTENVRVSLCEDRHSIQAYFDKFLHADVNDPEIRDQVFEYFVDKVYLYDDKLVVSMWFSEDDKQEITWRDWFSLDEYWTDESPFVKGEAAEFDCFPLGSTPRAA

SEQ ID NO: 27289 - protein, 553 aa, synthetic construct
MSTITKIQGYQHDVKQLRVAAYCRVSTDNFEQLESLENQRAHYQKYINNHPNWELAKIYYDEGISGTKMTKRNALKELLTDCHNHRIDLVVTKSISRLSRNTTDCLQIVRELQQLNIPIIFEKEHINTRAMASELFLSILSSIAQDESHSTAGNLRWAIRKRFASGKFHVSSAPYGYSIEDGNLVINHTEAKTVRQIFQRFLSGTSASQIAKELNQKQVSTKRGGQWRSNTVINILRNSNYTGDMLCQKTYRDDQYHRHFNQGELAQYLIEDHHPSLINHENFNRVQVLLKEAVKKRHIETGSHKYQQHYLFSGKIICGQCGTIFKRQTRPHKIYWACQQHLRSAQQCPTKAVSEASLKAAFCNMINKLVYSKKFLLQPLLEGLKEEANVNSDGQLISLTKQIKANDHKAETLTELMHAGLLDKAIYVNQTARLEQDTYQCQEKIKQLNGQNTDSANDFEDVRTLLRWCHQGKQLTEFDEGVFQEFVQQIVVNSSNKATFILKCGLKLPEKLNKNATINGHFYRNIIKQRYNDPIKQTEYLYSIIESEGDLIG

SEQ ID NO: 27290 - protein, 557 aa, synthetic construct
MTKLYSYIRFSSMRQSDGSSFERQIRMAKEIADKHGLELVNDYQDLGVSAFKGANSKTGALARFLDEIGRSVPVGSWLFIENLDRLSRQDIISAQELFLSIIRRGITIVTGMDNKIYSLDTVTANPMDLMFSILLFIRGNEESQTKRNRTNSSALLKIKAHQNNPQSPAVAIEEIGKNMWWTDTSSGYVLPHPVYFPIVQKIVQMKQDGHSTGDVLDYLNEHHEPPAPTSNKKHEHWSKAMVSRLFHTKALIGIKTVTVDGVEYELKDYYPRVMSDSDFYYLKQNVAKKAWDYGTTSEKVIPLLSGIGVLRCHHCGATMVKMSAANGKREQYRYCCDGRRSGRTDCPFPNWGFRALYLEEAVLRLLADKIWITEDKTNPIPEIRVKIDEISRQIDNLINLSAMTGATKELAEQITSLNSQREALHEEIGRFEREMYSVDSQGWEKLAEFDLGDVANEERLKVRMKIKGALREIECSKIDGKKNLFVLVYLDGLRQRIVIENARGAKSAKVFVDLKSINDRQILESNGMILHPCIEMLTDPNWEPEKEQAGPLQEYGI

SEQ ID NO: 27291 - protein, 502 aa, synthetic construct
MSETTQIGVIYARYSSDKQRDESIDGQIRECMAYAEREGITITNTYIDRALSAKTDDRPEFRQMILDSNKQAFNYVLVYQLDRFSRNRYDSAIYKAKLRKNGIRVISVKENIKDDPSGIILESVLEGMAEYYSAELSQKVMRGMTDNVLQGKWVGTVVPYGYKLSNNRQLEINEHEANVVRKLFDMYLQRHTLNEMASYMNANGHLTHKGKPFNTNSIKAIISNEKYIGVYSWGSERIENAIPPIIDKNIFEKAQHKRNLRAKKKGNRSELYQLCGKLECGRCGGNYVGSTGTSKTGALHHYYVCSNRRRKNACKAQNIRRDALDDIVISQTLAILNKPNVVNKIAKYAASSGKNLQSETVAQIDIIDAHIRDLKKSLDNYMTAIANGFISDVLKHRIEATEQELKTQIEIKTNLENTIIPVELTEDHIRFFLLKMAKENPSTLRGRARIIEAFVHHVTIYEDHIEIVFNYKNELSEFHDKTLESSLLNDLVTQKGFEPLAF

SEQ ID NO: 27292 - protein, 558 aa, synthetic construct
MTKLYSYIRFSSMRQSDGSSYERQIRMAKEIADRYNLELVNDYQDLGVSAFKGANSKTGALSRFLDEIGRSIPVGSWLFIENLDRLSRQDIISAQELFLSIIRRGITIVTGMDNKIYSIETVTANPMDLMFSILLFIRGNEESQTKRNRTNSSALLKIKAHQQNPQSPAVAIEEIGKNMWWTDTTSGRVLPHPVYFPVLQKIVQLRQEGHSAGAILDYLNEHHEPPAPTSNKKHGKWSRAMVSRLFATKALIGVKTVNVDGVEYELRDYYPRVLSDSEFYFLRKNIIKKAWDYSHDKEKVIPLLSGIGVLRCVHCGATMVKQTAANGKREQYRYCCDGRKSGRTDCPYPNWGFRAVTLEGAVLQLLADKIWIAEDKTNPIPEIQVKIDEISRKIDNLINLSAMMGATKELANQITDLNSQREALHEEIRLFEREMYSVDSQGWDKLAQFDLSDVQNEERLKVRMKIKGALHEIECSRIDSKKNLFVLVYLDGLRQRLVIENNRGLKKGQIFVDLKTINDRQILESAGMVLHPCIEMIIDADWKAPEEIPGLLSEEFGI

SEQ ID NO: 27293 - protein, 526 aa, synthetic construct
MPKEKYCAYLRKSRADRDAELRGEEETLARHKRILTELSERMQKPISKFYSEVLSGDTIQDRPVMQELLSDVESGIWAGVFVVEVERLARGNTRDQGIVADTFKYSNTVIITPTKTYDPNNEFDEEYFEFGLFMSRREYQTIKRRLQRGRIASVQEGNFLGGSAPYGYRRIKLSKGYSLEIIPEQAEVVKKIFEWYCNGEPQPDGSINRLGADAIAAKLDSLGVKPPIKDKWSKATIQDMLKNLTYTGKVFFGQYKEVKTSVNGNIVTKRTYNPEHIIAQGKHEAIVDEETFHRAAMIRKERKSYTVPASAKLQNPLSGLVFCQKCGSMMTRLAPTTRTKYSTLKCPNRYCDNISSPLFLVEQQVLLYLKNWLKSYSLNKKVVAFTPLNNEINLKSEMIKKLDSDIAMLKKQLNRAYDLLEQNVYTIDVFRERQENLKSSITAVECQIEKNRKDLDHLCEVKNVQDNFAPRVRNLLDTYQTNSIELNNGLLKEVIDHITYEKNERNTKGKLNNCNFTLHVYPRISL

SEQ ID NO: 27294 - protein, 573 aa, synthetic construct
MMTETYKRELEATAMRTQTNSILDITNYAQRTKKKRVCAYARVSTDKDDQANSYESQCRYFTEYIQQHSDWDFAGIYADEGITGTSTKKRENFRRMIIDAENGLIDLILTKEVSRFARNTVDTLTFTRELKKRGIYVIFLNDNINTQDNDGELRLSIMATIAQDESRKTSERVKWGQKRRMEQGVVFGRDMLGYAVRGGKLYLNEDEAEIVRLIFHKFTDEGKGTHVIARELREAGIRPMRVKEWSNTVILRLLRNEKYVGDLCQKKTYTPDYLSHEKRYNRGAEEKVYIRDHHPEIAIIDRDLWDRTQAELERRSPNPEMKAKHSNRYWCSGKLWCGECGGRFISRSKILLAGGSYKAWRCWEASKHGTPKKDSYGNSVGCVGKSINDRTLRVLTAYAVNLITVNKEQIKRELMQSIKKVVSMPQKEVDKHKIEAEIENLRKKKIKIIDLAAEGAISAGDMKAQNEVYSAQIADFTRRLTEAENASNVQLSEAKRLEEYAKRIDTLLDINPEDDNTLKETLQKAVVYNDGMIDIYLNFVPFGIRLWYKTSGKLDFFAVEVTKFEMANPDVQF

SEQ ID NO: 27295 - protein, 501 aa, synthetic construct
MKPNIKEVAIYLRKSRDESDGKEDVLAKHESLLLEYVKNHNLKYEIYKEIGSSEYIDSRPKMVRLLNDVSQKLYDAVLVVDLDRLSRGDLEEMGRIGRIFKDSKTIVLTPTKTYDFNDEEQALINNFEMVFANHEFRMIKKRMLRGKLQGTKAGKWTNGRPPFPYVYNRLTKELDVDSDKVKVYEFMKKMFLEDMKATYEIAWKLNELGFKTNRNSYWYENTVRRLLINEVHLGKVVYGKTSGSGSKKKLNANGVQIKDRSEWIIPEGSHQPLKTEEEHQRILAILESRRYTPKGTRKNVQVLSKLIYCGKCNRVMSFTGKASGKRYVKTCLTTDRFGNRCHNRSLNVEVIYAQLFLDLEQYEQQLLSHESKEKQVDSSTLQLALQNKHEELERLEKGIERIKDLFIDEMIDKSEMQKRIEKHKQSMQTKKEEIRSIEQSLAVIGNVRTDDDRLYAIKEFKKAWNTEGISKRELNTLAKQLIDRIEYVREGNNVKINIKFL

SEQ ID NO: 27296 - protein, 481 aa, synthetic construct
MKYAVYVRVSTDRDEQVSSVENQIDICRYWLEKNGYEWDPNAVYFDDGISGTAWLERHAMQLILEKARRNELDTVVFKSIHRLARDLRDALEIKEILIGHGIRLVTIEENYDSLYEGGNDIKFEMFAMFAAQLPKTISVSVSAAMQAKARRGEFIGKPGLGYDVIDKKLVINEKEAEVVREIFDLSYKGYGFKKIANILNDKGTYTKFGQLWSHTTVGKILKNQTYKGNLVLNSYKTVKVDGKKKRVYTPKERLTIIEDHYPAIVSKELWNAVNSNRTSKKKTKQDTRNEFRGMMFCKHCGEPITAKYSGKYAKGSKKEWVYMKCSNYIRFNRCVNFDPVHYDDIREAIIYRLKQQERELDIHFNPKMHQKRNDKSTEIKKQIKLLKVKKEKLIDLYVEGLIDKEMFSKRDLNFENEIKEQELALLKLTDQNKRNKEEKKIKEAFSMLDEEKDMHEVFKILIKKITLSKDKYIDIEYTFSL

SEQ ID NO: 27297 - protein, 525 aa, synthetic construct
MRTVRDVLEKGKKGAFYARVSSDRQTIDAQRHHVYEFIKNYECEIVGEYVDHGKSAFKKTLIQRPQMMALLRDVEQGKYDFVITYADDRLARSEIEHAQIRLLMKGADTDVILTSTAELYTERDIITQLIREGGTRYEVERISARTKDAYNQRTDYGEWMGGPVPFGYEQDEKTKKFSILKDEREIVLKIYQLYQSGEGFADIAKKLNEQKEKTNTMVWRKERVKQILTNPIYAGYVTSGRLKSGSGNSIEDLSKWKMAQCKEIPPIMTQEEWFATFHLFEKKRNKELPPKQFKTEYVLRDLIYCKKCDHPLLPKNQETTGGNGKKYGMKKYMCSNKTCKTWFPTEELHTLVFDSVMKEVTDKVISKSQTELMYEIEQGLEKDIKRIQKEIQRLKQQVNDSLVWIKDAEREIDELYNRKKRLVEADPEIDPLLDVMLDYRVHLLHEIKGSEELIVKKEAEVKRIEEVDSNQRILEKNVLQAFQIEFANIQTDVKKVRQFLVYLIDKIIIDQNGNTEYILKINLEQ

SEQ ID NO: 27298 - protein, 491 aa, synthetic construct
MKVLESYAVYVRVSTDRDEQVSSVENQIDICRNWLERNGFNWDEKRVFKDEGISGTLFVDRPSIQLLLQKAKSKEIDMVVFKSISRLARDLKDSLEIREVFLAHNVRIISVEEGYDSVKAGKNDMAFELWSLFSAQYSRTLSSSITAALSVKVRRGEHIGKVPYGYNRENQKLVINEEEAQVVQMMYKWYLEGWGYKKITNELNRLGIKSKTKKNWQMTSVQRILQSSIYKGTFILNQYTSVKVGGKKKQIRNPEEKWFVFPDHHPKIVKEEIWNQANRKKSKTNKTKITAWNEFRNLAKCAVCGSNMVIVQSHLKKKSGERTEWKYLKCSQYRRAGKHGCVNHVPIQYGDFRQFIISLLVEKGESVTLRLQSNVEKGQEKKIKNLQQLMSTNQQKKKALLDLYLEELINKEEFEKKRNDIETEITKVNYELLILQNSDAIQMDIKTIKQAFEQLQCQEKDLIHVFQTLIQKVSIHQDGTVDITYTFENPL

SEQ ID NO: 27299 - protein, 513 aa, synthetic construct
MGDTAALGQLFHRVESGEIDGSVLIVESLDRFSRENPFRVAGYIAKLAEHSIDIIDVEQNLVIGTSNPWSSTIASIIANRAHEESTLKSKRIKAAWNSRRRKAEESGQYMIKNTPFWIDVLDDKYVANADASIVREIFDLYLQGYGSFTIAKKMNEAGKVIRNKRWSTPKICALLRNPRCNGDFISHSLERDYEKGTSTSVEHVIKGLYPKIVTDEEFALVLNRLNDGSKNKRVCNDRKVTILNGLLKCSICGGALTVRSAGAYRYVGCLKTIEKGGCYSKPIRYDALEKIVVNHIRNMDLGKVYESNDSQEVISKERIKSLMSHIEEYKAGITQLRERGKKPSFDMLTELQNSEDELELLKKELEQLSLSKIDLSEFAVSTELFDITQIALRTRLERTISSLLNKIKVYHTKDLSFSLIEMIYVNDVVKHVLVADKKGDVTGDVVIRRNGESTTYESCSVKIIKDEDGVFSLDCNISEVVLNDYLLLMNVVDFVDSEAKEFLNLHLNAVLAH

SEQ ID NO: 27300 - protein, 540 aa, synthetic construct
MDCVIYIRWSSAEQAKGSSLERQRQDCRQHAADNGWRVVDELVDDGISAFKGEHASTGALGSFVASVEAGRFPDGVILLCEKIDRLSRQEPGKVFLWMMNLTEAGVVVATVDGSRRYSKGNFDMASIIEVVVKAQLSHEESDKKSQRLAAAWAAKRRRLNAGEKFVMTRRAPAWLEVVGTPPVFIPIPARAEIVRRIFEDTVAGLGKQHIARNLNLEGVPTFGRAEAWHASYVQKILRNPAVIGELHTARKARGTKRSMTGEVVLDYYPVIVDADLHRRAMNAMRERSRTSTGRGRKLVNLFSGLARCEACSSKMTFRGKGRKQRADGSWVNEDYLVCDGYQRGRGCENGVHYNYAIWERGILDPIIYEALHEDHAASQSEVRDLEIEVARLERVWDLAKARAESALRIAIESGRHEAQAAWAEMAEGVDRAQSALDEARERLLELVHTPSREEQWARINRLRESLHDEDEDLRFEARSKIRSAVHALVTQLSFHGPKIIGVTMTVADEWSVVIDYNDIQGDTEWIRGRIDPIRETPQGK

SEQ ID NO: 27301 - protein, 617 aa, synthetic construct
MKNLGASEPKRAYIYCRVSTDEQAKHLTSIDQQEADARKLCEDRGIEVVGVFTDRGISGSDRNRPEFNRMLMLACSDDHPVDAVVACDMSRIARDMEFSVLVLNQLRRASVEMTLVYQHFENSHAGRLLQLLTSWQDEDAIVKASQNTRRGLRGTAEENFWTGGTVPLGYESRTIEVRGKKEKKRLFESAAEAPTVRLIFDLAERGLDGTPMGGRAIAEYLNSRGYTRRGKPFYNATVAGILSRPHYLGRFVGNKFDFDGNLLPEEEWTWVDCPALIAQEQFDRVAALRAKRAPRVTAPRIVNGPTLLIGIARCGVPGCGCGMTIRTGKAGRYRYYSCHSRVNAGAVSCSCPYVRAEKLDELVMSQLAERIFSDDQLEPLLQQVLDTSDEARERKQSEIEQCETKLAEARRRLFNLHEALEDGTVSKRDRDFANRIKNRRAEIDGLEQTKKTLKQQLDRGPSRITPDAVKRFGQIVRERIISGNGNARQQIARAFIKQVRVGPNIIIEGETEALAHGAAAVARSKGKVPTFDRKWCGREDSNFHGLAATTTSTLRVYQFRHDRTQSGSGANPLGAPAGRSAPLAAGVVPRKHLYCASVKASVEPSRYPRRRPIWARR

SEQ ID NO: 27302 - protein, 544 aa, synthetic construct
MRDQTTTIRRAAIYARYSTDMQRERSIDDQVALCREYARKNGLRVIQSYSDRAQTSASLVGREGIMSLIDDAKARKFDVVIVEALDRISRDQEDLAGVFKRLSFANVEIIAVHEGVADAVQVGIRGLLGSMFLSDLKHKVRRGMAGVVNDGRVAGGNAYGYDVVLGKPGERTINEEQAAVIRRIFREYVGGASPRDIAGRLNAEGVPPPRGSKWNASTINGSKNRSYGILVNALYNGQIVWNRVHMVRDPDTGKRVSRFNPESEWKIAEAPHLAIVDRETYDAAQARKANRTRLVEQGASTKKAKRLLSGLLRCSICGAGMASVGFNGGRLRVQCSQNRESGSCDNNRKYNAERIEHAVVTGILSKLEDEEAAERYIREYVAERRANIDNATRSASQIEAKLAKVAGEQERLITLFQTGVLDLDRVKPRLTELEEQRKALEDEAASAREAVPVIELHPAAVERFIKLLSRAKAEYENYEMLKDPEKIEAMRELISHVIVSDSAANGYELDVFTYLSALTGDYAPGGLGGALVAEEGFEPPTQGL

SEQ ID NO: 27303 - protein, 585 aa, synthetic construct
MDKENTKPLAYSYVRMSTEMQLKGNSLERQKEKSKEYAIRHDLQLVENFEDIGVSAFKGKNIKEGMLGDFISLIENKTVPAGSYLLIESLDRLSRENIFESIPLFIKILKSGIKIVTLIDEQVYGAENADFKDLLYPMVVLSRAHEESVAKSFRVGKAWANKRKNIHQRKLTKVCPAWLKLNTDSNSFEVIPGRDDVVKRIFDLADSGYGSYSIGRILNNEGVFPFSENSKGWHASYITRILNNRSVLGEFQPHKLVNGTAEPDGDIVPDYFPHLIDEEQFLRIKHARRKRLVEGAGRKGPVYRNLFSRIAKCAYCASPMRFVHKGQPPKGGQFLRCTNAERHFECSASNWRYDHFENVFLYFVHELDLIETLKRADEQSERYTLEQKLVSINENIRGKRELLNTTFDMLQTSNASKDFIQSKIEEISSEILELENQKGAVEAKLEKDAALAPVDDQQIKSLIKELQDADDGDLERKRRVVANRLQMMIKSLTLAPDGLRKDAEKLVLSQFGSSEALFDFFETGAQSGEASTGMSFSVVLLDGIMRRVTVSRREPLKVIQLIAVDKHGLIIETEQTHESQGEWKI

SEQ ID NO: 27304 - protein, 515 aa, synthetic construct
MHDQTTTIRRAAIYARYSTDMQRERSIDDQVALCREYARKNGLRIIQSYSDRAQTSASLVGREGIMNLIDDAKARKFDVVIVEALDRISRDQEDLAGVFKRLSFANVEIIAVHEGVADAVQVGIRGLLGSMFLSDLKHKVRRGMAGVVNDGRVAGGNAYGYDVVPGKPGERTINEEQAAVIRRIFREYVDGASPRDIAGRLNEEGVPPPRGSKWNASTINGSKNRSYGILVNALYNGQIVWNRVHMVRDPDTGKRVSRFNPESDWKIAEAPHLAIVDRETYDAAQARKADRTRLVEQGASTKKAKRLLSGLLRCSSCGSGMASVGFNGGRLRVQCSQNRESGSCDNNRKYNAERIEHAVVTGILSKLEDEEAAERYIRDYVAERRANIDSATRSASQIEAKLAKVAGEQERLITLFQTGVLDLDRVKPRLTELEDQRKALEEETASAREAVPVIELHPAAVERFIKLLSRAKAEYENYEMLKDPEKIEAMRELISHVIVSDSAANGYELDVFTVV

SEQ ID NO: 27305 - protein, 566 aa, synthetic construct
MNKHVFHNSVSKQPDATKRVATYYRVSTGRQYANEASIPSQRKITASFADQNGYVIIEEFVEAKTATDDRRPVLQDMIERACAPDHPYDAILFYAFNRFFRNVAEMELTIRKLRKHGVDVVSVTQPTGDDPSQILVRQIIGAFDEHTSREISKNTTRAMRESAKQGFWNGATPPLGYKIVEAERRGQKIKKKLDIDAVEAETVRLMFKLYLEGDGKTGPLGVKETTKWLNSHGYRTRRGATFGVGPVHKILTNSCYATGQWPYGVRSSRDGRKYDPSTVIQIPVPVLIEQGDFDRVQAKLARSNPKTTPPRVVNGPSLLTGIAVCASCGSGMTRTGTTNRQGRSYSYYSCAGCQQKGKSVCKGRHIPAATLDEIVLTNLKQCVLAPDRIADLLKSLIERQAAKSESADGRLLGLQKELTDCEDRMKRLYRSIEDGIVELDDILRERTAALKAQRDRAKAALDHARAQCGMAAAVNAEKIDAFARLMNAKLDAGDTNTRKGYIHSIIDAVEVDDQTIRIIGSKDILQAAIAGKQTENGNVRGFVRKWRARHDSNVWPPPSEGGALSS

SEQ ID NO: 27306 - protein, 537 aa, synthetic construct
MAAKKKRAAGSNTDGVEALRAVIYARYSSSGQREESIEGQLRECYDFAKKHGIIVIGEYIDKAMTGRVDQRPDFQRMIRDSEKGRFNCVLMWKMDRFARNRYDSAMYKYKLKKNGVRIFYAKETIPEGPEGIILESVMEGYAEYYSENLSQNVKRGYYDSALELKTLGKTCLGLKTGPDGRYMVDQAEAAIVRRIFEEYAAGERAKDIYTRLNDEGYRTSRGGKFNKNSLRRILSNEKYIGVYEYEDIRVENGIPAIITDRELFDKVQKMLRINHDAPARGKAQNFLLTTKLFCGLCGAPMVGDGGTSHTGKAYAYYSCTTRKKTRSCRKETVAKEWIEDLVVGELVRILHNDELIEEIADRVMEYQNREKDDSGLHALEIRKKENEKALSNMLAAIEAGIITPSTKTRLMELEADRADIEKGIARELLAEPEFEREQIVYFLERFRSGDIHDEEYRIALVDTFLNSVYLYDDDHLVLVMNYSGEHCKVNLQLVEGAISGAEGSAFAPSSALNGANLNPLYFFKKVFAVVVKFARKE

SEQ ID NO: 27307 - protein, 631 aa, synthetic construct
MDLPDPGGPTSSRLCYIPPRISLTGLVVVKAYSYIRFSTPEQAKGDSLRRQITAAEAWCAAHGLQLDDTMRDLGVSAFRGTNSTEGALKRFLTLVEDGQIQRGSYLIVESLDRISRETATDAAMRLFDLIRAGIIVVTLSDGQVYSHDGLRGNPMPLAFSIMIMARAHEESLVKSQRLTAVWQHKKEIARTEKKPLTPRCPEWLEVRDGKFHIRPERVAIVHRIFQDVIDGYGRREIVRRLNAEKVPTWRGGDGWHTSSVAKVVQSKAVIGEYQPHSGTHKLRNRKPVGDPIKDYYPRIVDEATFWRAQAATEGRQQRSAGRKGKHAHILQGLAVCGSCGSPMHLLNKGKPPKGGKYICCSNNLRGLDCSMSRRWRAEMLEDQLLRTFATIEAGSIQLLDNSAPRLEHDISSLKARLDDEKRKRKRLVALVEDGNDDENLAERYRAVSKLVKELTAELKAAETAQSKASADPDFVQKIIETASLSAQLDEADQAKARDLRIRLREVIKSTIDRIVCDPEIGAILHFPPRHWFELKTRGFAVHMKAEGDTGPIFLLDKNPSQDAVDRFFGGAFPTDAEFMPPSETLDSMQPQNPAMLAYADALFAFLRDHNPTPEQIEQWQERYVQEHGLAM

SEQ ID NO: 27308 - protein, 544 aa, synthetic construct
MHDQTTTIRRAAIYARYSTDMQRERSIDDQVALCREYARKNGLRIIQTYNDRAQTSASLVGREGIMNLIDDAKARKFDVVIVEALDRISRDQEDLAGVFKRLSFANVEIIAVHEGVADAVQVGIRGLLGSMFLSDLKHKVRRGMAGVVNDGRVAGGNAYGYDVVLGKPGERTINEEQAAVIRRIFREYVGGASPRDIAGRLNSEGVPPPRGSKWNASTINGSKNRSYGILVNALYNGQIVWNRVHMVRDPDTGKRVSRFNPESEWKIAEAPHLAIVDRETYDAAQARKADRTKLVEQGASTKKAKRLLSGLLRCSICGAGMASVGFNGGRLRVQCSQNRESGSCDNNRKYNAERIEHAVVTGILSKLEDEEAAERYIRDYVAERRANIDNATRSASQIEAKLAKVAGEQERLITLFQTGVLDLDRVKPRLTQLEDQRKALEDEAASAREAVPVIELHPAAVERFIKLLSRAKAEYENYEMLKDPEKIEAMRELISHVIVSDSAANGYELDVFTYLSALTGDYAPGGLGGALVAEEGFEPPTQGL

SEQ ID NO: 27309 - protein, 547 aa, synthetic construct
MDTTSPTITVAPYVRTSSIKQIDNNSIPAQLAEIEKYCKLNDYEMLPPYIDNGISGAKMENRPGLQQMLNDLKNNKLDKIVVWKLTRLGRSMKDILQIIEECEKNNVSFYSVSEHLGIDTDMNKLMLNIMGSLGEYERTILKDNIRIGASNKASEGKSVGGQPPYGYDRIDGLLIVNQHESRIVKEIYQMYSQGMNFTAIAKVLNDRHEVTKLGKPHSKDSVSYILKNKVYRGLVVYNQYVDWKKKGRKGYNDNPIITEGEHEAIISQELWNKVQTQLKARKRHKRGNNKTDNLLTGLLKCKCCNANYVISNTINTLKDGSKRHFRYYVCRTRKQRSKDCKAAPNIRADFIENYIFQNIKNLIQKPELIKKVVEAVNHKRTPNTDEINHEIANKQFQIDDLKSRYNNLIQVITTDTSLTESIKPTLLKYSEQINELNTSIKQLESNKNVNHPKIEADTVINIFHILFKNLENSKNSSLKAVYHLVIEHIYIKADSNNKKQFYITFKFNQDIVETLLNNINPDEQLLNCSSSLLANIPSEIIFLSFEI

SEQ ID NO: 27310 - protein, 466 aa, synthetic construct
MSIVIGYARQSVDKKKTENSVHSQINAIKKYANTHKIKDVKFISDVKSGRSTTRDGYQSMLDVIRKGECHHIIVFRINRLNRNFKDFMELQTLCEEHHVLITSLSDGRFDLSDKTQAFKIRCLAILGETESNIISENVRSANAIKAENNELLGTNAPFGYIYMNKSFHIDESKVTTIRFIFNMYVNQGWGYKKISQALINHSKLYNRTPKQVMRIITNEKYAGLIRNHFGEYEGNFEPIIEKSLFRKAETIRGSKKTLTHYHPIVLLRKKIRCICGATMTPIRMNRKHMTCPITYYICPLNDKLGYKKCSMGYFVASKIDKQVIKIIEDNIINQQMIQRLENTIHSKLSLKIKRSRPKYNQDQLITKLSKQQISIEEYKKQLNKIKEWHNKMNRYNQVNSANQLKCITQNILSNYTLYIDQLSEMITQITVNKDKEITGVFLKNTPLNLLKEKDDKHDERSTFIST

SEQ ID NO: 27311 - protein, 451 aa, synthetic construct
MKQVIGYLRQSTMKQQSLAAQKQAIEAIAEKHHIQHINFYSDKQSGRKDNRSGYRQITQLIQQGQCDILCCYRLNRLHRNLKNALKLIKLCQTYHVHILSVHDGYFDMDQAFDRLKLNIFISLAELESDNIGEQVRNGLQEKEKAKQGRLITTHAPFGYEYHNGTFIINQNESPTVKAVFNYYIKGHGYKKIAQLLEEDNTYINRQPYQVRNIIINPNYCGRVNNQYGQFDNMFPSIVSTSIYEQAQRLRLQKQTKQTPSDNQLKQKIKCPCCNATLTNMTIRKKNHTLRYYVCPKNMNASRFVCDFKGINAQTLEDKVLEVCRDFYQNQRIYTKIKSAIDKRIKRQRNIEKHHTLTQEQLIEKLAQGIIDAETFREQTQSLRQQPQRTTSINGHQIQHIIQNIIQKRFTLNILYPYIETIHITKDKNLIGIYFKNEPLNIVNQTMQSSIA

SEQ ID NO: 27312 - protein, 542 aa, synthetic construct
MQQLKTKRVGIYVRVSTEMQSTEGYSIDGQINQIKEYCDFHHFEVKDIYADRGISGKSMNRPELQRMLKDAKEGNIDCVMVYKTNRLARNTSDLLKIVEDLHKQNVEFFSLSERMEVNTSSGKLMLQILASFSEFERNNIVENVFMGQTRRAQEGYYQGNLPLGYDKIPDSKHELMINQHEANIVKYIFESYAKGHGYRKIANALNHKGYVTKKGKPFSISSITYILANPFYIGKIQFAKYKDWSEKRRKGLNDKPVIAEGKHSPIINQDLWNKVQIRKKQVSQKPQVHGKGTNLLTGIIHCPQCGAPMAASNTTNTLKDGTKKRIRYYSCSNFRNKGSKVCSANSVRADVIEDYVMKQILEIVKSDKVIQRVVARVNQENQVDCASLHHDIAYKQQQYDEVRIKLNNLIKTIEDNPDLTSVIRPSIQKYDKQLNDIMSQINQLKKQQNEDKPSYNAKKIGKILRYVFHNIEKMKKSQLKALYLAVIDRIDIRKDSNHKKQFYVTLKLDNEVIKQVFNDIPLDEVLLSTSSLFLPQPFYLTI

SEQ ID NO: 27313 - protein, 449 aa, synthetic construct
MKQVIGYLRQSTMKQQSLAAQKQAIEAIAEKHHIQHINFYSDKQSGRKDNRSGYRQITQLIQQGQCDILCCYRLNRLHRNLKNALKLIKLCQTYHVHILSVHDGYFDMDQAFDRLKLNIFISLAELESDNIGEQVRNGLQEKAKQGRLITTHAPFGYEYHNGTFIINQNESPTVKAVFNYYIKGHGYKKIAQLLEEDNTYINRQPYQVRNIIINPNYCGRVNNQYGQFDNMFPSIVSTSIYEQAQRLRLQKQTKQTPSDNQLKQKIKCPCCKATLTNMTIRKKNHTLRYYVCPKNMNASRFVCDFKGINAQTLEDKVLEVCRDFYQNQRIYTKIKSAIDKRIKRQRNIEKHHTLTQEQLIEKLAQGIIDAETFREQTQSLRQQPQRTTSINGHQIQHIIQNIIQKRFTLNILYPYIETIHITKDKNLIGIYFKNEPLNIVNQTMQSSIA

SEQ ID NO: 27314 - protein, 547 aa, synthetic construct
MDTTSPTITVAPYVRTSSIKQIDNNSIPAQLAEIEKYCKLNDYEMLPPYIDNGISGAKMENRPGLQQMLNDLKNNKLDKIVVWKLTRLGRSMKDILQIIEECEKNNVSFYSVSEHLGIDTDMNKLMLNIMGSLGEYERTILKDNIRIGASNKASEGKSVGGQPPYGYDRIDGLLIVNQHESRIVKEIYQMYSQGMNFTAIAKVLNDRHEVTKLGKPHSKDSVSYILKNKVYRGLVVYNQYVDWKKKGRKGYNDNPIITEGEHEAIISQELWNKVQTQLKARKRHKHGNNKTDNLLTGLLKCKCCNANYVISNTINTLKDGSKRHFRYYVCRTRKQRSKDCKAAPNIRADFIENYIFQNIKNLIQKPELIKKVVEAVNHKRTPNTDEINHEIANKQFQIDDLKSRYNNLIQVITTDTSLTESIKPTLLKYSEQINELNTSIKQLESNKNVNHPKIEADTVINIFHILFKNLENSKNSSLKAVYHLVIEHIYIKADSNNKKQFYITFKFNQDIVETLLNNINPDEQLLNCSSSLLANIPSEIIFLSFEI

SEQ ID NO: 27315 - protein, 578 aa, synthetic construct
MAYAKLKAAADAGKIVALYVRVSTGYQVDKDSLPFQKKELKSYCKHVLHIDDGRIEVFEDAGKSAKNTDRPAFQRMINKVKAGQVSHVIVYKLDRISRDLVDFSIMWKEFKAARVTFISLNEQFDTSSAIGEAVLKIILVFAELERKLTSERVKDIMIGRAHEGKWNGARMPYGWKWNSETQFPEHNPEEIQAARLIYSMYEKTKSSSKVRDYLNGNDIPTKCGGEWTTKTISDYIRNPMNKGDYRYNYRESPHGKKKPEEEVVYLEGVFPPLVDPDQWNRCNAIMDHNAERLRNAGAAHNQKHIHPFAGLIVCGACGYYFQSMKPDRPRANGFRPSLYRCSGRVTKRSCTAPGASEVKIGPVVFNFISHIVAATKKRQGIKTPEELESLLLSGPEFAPIAYIEESSLREIFDALQGRTRSKDGLYLPEPLSRQTAPDPGSIEAKRAEAAKIGRALERLKKLFLFDDSAMNEKEYLSTRAELTEQLTRLNNEIRDAEEASFGRVEELNFVSSASSFLLSYSIQSGEHIQYNEFAAAVDDQVLKDFLNLIIDHIVVSEAHVTEIHFKSGLHAKFIYKSA

SEQ ID NO: 27316 - protein, 518 aa, synthetic construct
MPKAISYIRFSTKIQSVGDSTKRQSKYINDWLKRNPDYYLDESLRFQDLGISGFSGANARSGAFGEFLAAVESGYIEAGSVLLVESLDRVSRQDIDTAGEQLRKILRSGVEVVTLVDNEWYTKESLKDSLSMIKAMLVMERAHEESAMKSTRLRSVWAAKRERAANGEIMSKRCAAWLKVSDDRSHFEFIPENVKAVQRVFQLRLEGLSHVKIAKQMNDEGFSTLNQFKSVTGGWSQSSVTELLSNRSVIGFKVPSKSMAVKGVSEIPNYYPSIITDEQFYAVQQLKQGSGRKPSSDLPLLTNLFKGVLRCSECGFIVVVAGVSAKRSGIYKCSMKSEGRCNSVGFSRLQTDRALVQGLLYNTNRLSLNRDNGSAIGTLQSELEQLQKQRERLIKLAMLADDTESMAKDLKALNSQIKDAEKAVSEVHQREQSSQLETISHLDLTLKKDRIEAQIIIKRIVKEIRLNTAQKKCDVFLHNGLKLLNFPLDRVVDGEIFLEVLPLLEADEFDFDTYRVIE

SEQ ID NO: 27317 - protein, 547 aa, synthetic construct
MKLLVTYIRWSTKEQDSGDSLRRQTNLIDAFYSKHKNDYYLLPAHRYVDKGKSGFHQQHKNQGSDFRRMFENVMSGAIPEGSLIVVENFDRFSRADIDTAIDDVRQILRKGVSILTLGDGELYDKSALTDPVKLIKHIIIAERAHQESLVKQKRIAQVWNHKTQLARELKKPMGKQAPGWLELSEDGSHYIVDEDKASLVNIIYDKRLSGMSMFAICKWLNEQGYPTINQRKVRISKTKKPDGNWSALSVKHILTSRSVLGYLPAKISTEDRKTVLREEIEGFYPQIVTDSKFYAVQQLLEETGKGKTSSGDHWLYVNILKGLIRCKCGLVMTPTGIRKPVYQGTYRCNGNKESRCNYGTVSRKLLDTQLCSRLFSKLSQLHDEATDTAKLDELQRRLNTVDSELEKLTETLIQLPNITQIQEALRVKQEEKDELIVQLSREKARVKSVSSLDLSGLDMESVEGRTEAQIIIKRLVKEIVVSGNEKLVDIYLHNGNMIRGFPLDGKDDHTLTLEEATDEMQSLDDMLIFGEPVTRIYPAGDMEEVDA

SEQ ID NO: 27318 - protein, 575 aa, synthetic construct
MENFDLKGFAKGKKQQKEQIGGNAIIYTRVSSSEQVDGQSLEVQIDKCREYAKIRSYTVVGEFGGTYESAKSDKERKEFNRMLAFIKQSNKKGSSQPVKTVIVFSTSRFSRTGSTTIIEEVEARGAYVVSATSNYDPRTPVGKYMQLMELANARFQNDEKRATTIENSVKALLKGRWIGKAPRGYDQKTTKKEQIITINEEGKLIRKAFLWKANNKLSNEEIRHRLAAEGLHICKQKLSELFKNPFYCGYMAHKFLQGDIVQGNHPPLIPKEIFLKVNGELSKNHSGYEQKIDKEYAPLLGSIKCPCCGKNLSASISTKMRKKFGRTDIGYYVCSRKGCKYNSSTKKVHEAFEEEVNRYALSDKVSELLKMQLTITFEYMNQENRERAKSIKANIKAKEKELEQVETNYALCTDAKKQSICEKVMTKLEKEVRDLKTEFSKVNTEILNLDKFIDFAFKMRSNLFGLWELQGLEGRRRLQKLAFPDGFIYDKNNEHIEPKRVNQFFLLKYSYPTGNGDKKKETNRGKHDSSLRVLEAGLEPAQPQWPKDFKSFVSTIPPFEHPFKESGKRDSNSRP

SEQ ID NO: 27319 - protein, 679 aa, synthetic construct
MNNMDKKVLIYCRVSTQQQTTDRQKEELLKFAAENHWNVEEEDIFIDVISGFKKREFRPEYVKMLERVEYGDIDIILFSEFSRLARNATELLEQIKLFIDKGINLYYDKQKLWVRDSNKDVGSIILLHVLAVMSSYEIELFVERSLSGKITKVQAGHGGGDERAYGYMHNENKQIVINPIESKIVARIFEMYVGGYSSIQISEILNAEKVPAPYVRKLNEYKKNREAKGLEVKEYKFDTDNLKWRISTINRLMHNELYKGNRRITFYKPDPTNPLPLSERQDREIVYEYSEHVESLRIVSDELFQQAQDKLSKAHYNKNNAVRHENLLKHLMVCGECGANFSVGKSNETSKNYISGGRTYKCYGRVNRKDKPRTCTNGAELRQWKLDGLVLQLSIQMFAEINIQQTNILKIENLGKEIEELVQIKSSKNTELVEAENLYKKTLKRLIAIEDDEVAKNLISDAKHKYDETKNVLNKTMDKLSREITTKRITIDNLKRLNANPLLINKMDEIRKNRDLVKTMVDEYIDKITIFRLHELWLLVVVSYKGGEEMWGTIKCARYKKEEMFYDELHCHYGVEFQGWLLNNTEHCFSYDKSTRIITYHGGSKIYVEFKSGEYDYDTFNQMIQATGWMGCFPFYAYEDSGKDLSVPSNEDFGKSLQENRTDWKAHNDKVLERLLSKS

SEQ ID NO: 27320 - protein, 575 aa, synthetic construct
MRGAIYSRVSTLDQDYKRQTNELKEYAQYMGIEITHVFEEKESGFNDDRPEFAKLKELTKDDIDIVLVWELSRLSRRSLYLQQQIEYFTKKGICVYAKKENLRTLDEKGEEDRNTKFIIGIIAMIAEQEVATLKSRSISSKRNKIINEGNSYTYKAPYGYDYSTETKKLSINEEEAKTVRRVIELSANGYSSARIALILNAENIPTRSKTKIWTMGTINTMLSNPVYKGKAEYMLKGTEPKKGKRYKRPIDVAIVNTPAIVSAELYDLSREKMKGRAFRSKSTGVKHFQLLRGLIYCPYCKIKYTYEGGRDLYVCHDKHKKSKNKPDCFSKAIKATRIEKIVWELVKLLFSQELATGKAQEQEEPLRQEIEAHKKLLMGIEEKLNDLTAQANAIVNAAIDIKREMPNMPDLYINKIREAASLDKESKKYQYEKDRLNKLILSCEDKIKAINSLSNEKVLVDSITDDMERYELIHKVIDHMIIYGEDSAYSLVVVTFKTGQEVYIGYKSKGYQYYTIFYPSQSVWVDTKKRLGCIMTMKAPTSLEFSLETLTKEYSITDFVKMFNTPENRHYYENQ

SEQ ID NO: 27321 - protein, 517 aa, synthetic construct
MIAKTEKLIRCAIYTRKSTEENLDLDFNSLDAQREAGEAYIKSQQHEGWVCLDEKYDDGGFSGGNIDRPAFQRLMQDVDDGKVDCILVYKIDRLSRSLMDFAKIMETLEANDVSVVSVTQQFNTTSSMGRLTLNILLSFAQFEREIISERTRDKIAAARRKGKWTGGPPILGYDREKDHRGTRLVVNKDEAARVRAIYRMYLDEGSLLQAVKALRALGWKAKKYQTQKGVWRGGAEFDKSTLQRMLISVIYRGKITYKDEVHEGEHEAIIDEDLFARVQGLLRRNRNSGGKHTRNKHGALLKGLVRCKACGCAMSHHFTQRGNKRYRYYVCIHAQKNGWSECPSPSLPAGQLEDFVVEQIKAVGRDPAVLADSLNATQEHLQADVDAMVSERKQLEEQVRKLGRSVGELAPRAGYDDDAARQLDDLQDQIHQRQQEIVGLNEKVAGIESRMLKPDELAGAIESFDPLWETLSPTHRAKLVHLLVERVEYDGQSESISLTFHPTGIRTLTEQHQEANA

SEQ ID NO: 27322 - protein, 547 aa, synthetic construct
MKLLVTYIRWSTKEQDSGDSLRRQTNLIDAFYSKHKNDYYLLPAHRYVDKGKSGFHQQHKNQGSDFRRMFENVMSGAIPEGSLIVVENFDRFSRADIDTAIDDVRQILRKGVSILTLGDGELYDKSALTDPVKLIKHIIIAERAHQESLVKQKRIAQVWNHKTQLARELKKPMGKQAPGWLELSDDGSHYIVDEDKASLVNIIYDKRLSGMSMFAICKWLNEQGYPTINQRKVRISKTKKPDGNWSALSVKHILTSRSVLGYLPAKISTEDRKTVLREEIEGFYPQIVTDSKFYAVQQLLEETGKGKTSSGEHWLYVNILKGLIRCKCGLVMTPTGIRKPVYQGTYRCNGNKESRCSYGTVSRKLLDTQLCSRLFSKLSQLHDEATDTAKLDELQRRLNTVDSELEKLTETLIQLPNITQIQEALRVKQEEKDELIVQLSREKARVKSVSSLDLSGLDMESVEGRTEAQIIIKRLVKEIVVSGNEKLVDIYLHNGNMIRGFPLDGKDDHTLTLEEATDEMQPLDDMLIFGEPVTRIYPAGDMEEVDA

SEQ ID NO: 27323 - protein, 558 aa, synthetic construct
MTKLYSYIRFSSMRQSDGSSYERQIRMAKEIADRYNLELVNDYQDLGVSAFKGANSKTGALSRFLDEIGRSIPVGSWLFIENLDRLSRQDIISAQELFLSIIRRGITIVTGMDNKIYSIETVTANPMDLMFSILLFIRGNEESQTKRNRTNSSALLKIKAHQQNPQNPAVAIEEIGKNMWWTDTTSGRVLPHPVYFPVLQKIVQLRQEGHSAGVILDYLNEHHEPPAPTSNKKHGKWSRAMVSRLFNTKALIGVKTVNVDGVEYELRDYYPRVLSDSEFYFLRKNIVKKAWDYSHDKEKVIPLLSGIGVLRCVHCGATMVKQTAANGKREQYRYCCDGRKSGRTDCPYPNWGFRAVTLEGAVLQLLADKIWIAEDKTNPIPEIQVKIDEISRKIDNLINLSAMTGATKELANQITDLNSQREALHEEIRLFEREMYSVDSQGWDKLAQFDLSDVQNEERLKVRMKIKGALHEIECSRIDSKKNLFVLVYLDGLRQRLVIENNRGLKKGQIFVDLKTINDRQILESAGMVLHPCIEMIIDADWKAPEEIPGLLSEEFGI

SEQ ID NO: 27324 - protein, 558 aa, synthetic construct
MTKLYSYIRFSSMRQSDGSSYERQIRMAKEIADRYNLELVNDYQDLGVSAFKGANSKTGALSRFLDEIGRSIPVGSWLFIENLDRLSRQDIISAQELFLSIIRRGITIVTGMDNKIYSIETVTANPMDLMFSILLFIRGNEESQTKRNRTNSSALLKIKAHQQNPQSPAVAIEEIGKNMWWTDTTSGRVLPHPVYFPVLQKIVQLRQEGHSAGSILDYLNEHHEPPAPTSNKKHGKWSRAMVSRLFATKALIGVKTVNVDGVEYELRDYYPRVLSDSEFYFLRKNIIKKAWDYNHDKEKVIPLLSGIGVLRCVHCGATMVKQTAANGKREQYRYCCDGRKSGRTDCPYPNWGFRAVTLEGAVLQLLADKIWIAEDKTNPIPEIQVKIDDISRKIDNLINLSAMMGATKELANQITDLNSQREALHEEIRLFEREMYSVDSQGWDKLAQFDLSDVQNEERLKVRMKIKGALHEIECSRIDSKKNLFVLVYLDGLRQRLVIENNRGLKKGQIFVDLKTINDRQILESAGMVLHPCIEMIIDADWKAPEEIPGLLSEEFGI

SEQ ID NO: 27325 - protein, 452 aa, synthetic construct
MKAAIYIRVSTQEQIENYSIQAQTEKLTALCRSKDWDVYDIFIDGGYSGSNMNRPALNEMLSKLHEIDAVVVYRLDRLSRSQRDTITLIEEYFLKNNVEFVSLSETLDTSSPFGRAMIGILSVFAQLERETIRDRMVMGKIKRIEAGLPLTTAKGRTFGYDVKDTKLYINEEEAKQLRLIYDIFEEEQSITFLQKRLKKLGFKVRTYNRYNNWLTNDLYCGYVSYKDKVHVKGIHEPIISEEQFYRVQEIFSRMGKNPNMNRDSASLLNNLVVCGKCGLGFVHRRKDTVSRGKKYHYRYYSCKTYKHTHELEKCGNKIWRADKLEELIIDRVNNYSFASRNVDKEDELDSLNEKLKTEHTKKKRLFDLYISGSYEVSELDAMMADIDAQINYYEAQIEANEELKKNKKIQENLADLATVDFDSLEFREKQLYLKSLINKIYIDGEQVTIEWL

SEQ ID NO: 27326 - protein, 507 aa, synthetic construct
MKRVISYIRFSSEKQAKGDSLRRQSKMVTDWLKAHPEYYLDESLTFRDLGVSGFTGKHLKGGLGDFLTAIEKGLVKAGDTLLIESLDRLSRQDVDQASELLRNILRSGVDVVTLSDGEHYTSESLKDPLALIKSILIMQRAHEESLRKSERIQAAWDAKKEAAKAGIKVSKRCPAWLKLNDDRKSFSVIPEKVETVKRCFQLRLEGKSIWEIVRTLNDEGHQTLNQYKAGKFGQTSVQDLLKNRSVIGYFTPKGCEEISGYYPAIIDETTFYKVQQLSHYRYGRKPVSDKPLSVNLFKGVIRCSECGHALIITGFSDTRNGIYRCPLRNENRCSAKGLSRKQTDGTLLALLSRLDRFDSDTTNTIDTLKLHREHISSNIEKLVQLSLEIEDLSAITSKLRQLKGELSQVDADIEKETQRLKSIDVGCLSDCDLTTKAGRIEAQLIIKSAVKEVVLNTAKRRCKVTFHNGKVIDLPITETPSKDVTEAIQSLSEVTERGLIDVDEVII

SEQ ID NO: 27327 - protein, 528 aa, synthetic construct
MSNLSQAIEAFAYSRLSDTQQAKAGRSGLNRQHRKFQKYVVQKESEGLKIKLTPMQDIGRSAYHGKHLDDNAELGAFLGRVKNGDIKVGSWLLIEDIDRLTRQYFLAAFETTIQPLLEAGIEIHVTSTGTVLKGKLTLGQAVELLVKIDSANIYTERLSERVKGYWDQQFNSIRDGKKVNLQSRPLWISWDEEKQDFYLNDKASSIRLIFDLYLDGHGFRSIAEQLNAKGMKSLKGKQWQLRPIKNILQSPSTYGLLKYIERGLVIDDYFPAVINKSTFDIVQLLLQKRARSQVRKSIHEKDNTLQGLVFCSCGCPMYHKVLTPKKKPDGTRYPQSVASFRLCCTGKNNGAGCKTKDLYYTVVKEMLVKSSDTFNSNMSKSVEVIDHSEEIQRLELENRRILALTIKVTCDELTAQYIEMQQTNIQKIKNLKADERKPDINSALLDVKFDDLTEAEVSNSLRLIIKRVDIHSEGLGRSIFNYPDSESMPVLSVEYYNGHKQLMLMPDMRKPIAVTAYDSANMQGNMLP

SEQ ID NO: 27328 - protein, 452 aa, synthetic construct
MKAAIYIRVSTQEQIENYSIQAQTEKLTALCRSKDWDVYDIFIDGGYSGSNMNRPALNEMLSKLHEIDAVVVYRLDRLSRSQRDTITLIEEYFLKNNVEFVSLSETLDTSSPFGRAMIGILSVFAQLERETIRDRMVMGKIKRIEAGLPLTTAKGRTFGYDVIDTKLYINEEEAKQLRLIYDIFEEEQSITFLQKRLKKLGFKVRTYNRYNNWLTNDLYCGYVSYKDKVHVKGIHEPIISEEQFYRVQEIFSRMGKNPNMNRDSASLLNNLVVCGKCGLGFVHRRKDTVSRGKKYHYRYYSCKTYKHTHELEKCGNKIWRADKLEELIIDRVNNYSFVSRNIDKEDELDSLNEKLKIEHAKKKRLFDLYINGSYEVSELDSMMNDIDAQINYYEAQIEANEELKKNKKIQENLADLATVDFNSLEFREKQLYLKSLINKIYIDGEQVTIEWL

SEQ ID NO: 27329 - protein, 506 aa, synthetic construct
MRTVITYLRFSSATQGAEGADSTRRQNELFKQWLRKNSDAQVVASFSDEGLSGYKGKHLTGQFGDMLARIESGEFSEGTVLLVEAIDRIGRLEHLETEALMNRIIAHGIEIHTLQDGLIYTRDALSDDLGISIIQRVKSYVAHQESKQKSFRVSQKWKQRAKLALAGEQRLTRNVPGWIDPDTFKCNEHAETVRLIFKLLLDGESLHNIARHLQSNDIKSFSRRKDANGFSVHSVRTVLRSESVIGTLPASQRNDRPAIPNYYEAAIDAATFNKAQEILDKNRKGRTPASDNPLTINIFKGLFRCQCGASVHPTGTKNKYQGVYRCNNHLDGRCDVPPLKRKPFDRWMIDNFLGMIDVGNDGESERKIAALQHEVEIVTARIKKATALLLEMDDITELKTQVKGLNQKRTELQTTIDNMKRKASLTDKELPQLKDIDLTTKAGRVECQLILSKHLKGLTLGKDSVTVTLQNDTEITIPTNPLPLNDGSPIFEIADKELLDIDAYQL

SEQ ID NO: 27330 - protein, 624 aa, synthetic construct
MIKTFIYSRVSSQEQLSGGGLDRQETDVREYVTRNGLDQYEIVAMVDRGISGYDGSNMRDGELGKWYKDAITGMYWGSHLVLEAIDRFSRRDPMLAMEDFTVLVNKGGIKVHIVKFNTFINGDNLPMLSMMMNLAHSESKQKSDRISKGWQRRRRMALDNGTAITARTPYWIDVRDNEYRLNNSSIAVVEAFAMYKQGLSCGLIAKKLNELKHYFPYMWTKTAVQHIVDGLNTSGIIDAPRAIKTIKAFYKSGFSVEDIAKKMNAEFQFMKEWNAPAVHKLLQNKSVTGLVEIQKRKLIQEFDSDGKPLELRTKSEGEKYFESIYPQIISIDDFELIQKLLESNRKVDTKTGKGQTTGGTVTQNEDGELVKQFILSSLCRCYKCGGAMFNNIVWSKRKNGKVDTYSYLRCLNERDAHCDVKALNYPVIERAIIEHVKGLNFDTMFKGTNNSELELLKTREVELLRDIATYEDAIAARKAAGKNTSPVLVTSLVDAQDDLEALQKKIRAISGVTVNAEELTSLNESVFDVAEYELRNMVELELQKIIKRITFNCTEKNIYFITIQYNTGTVLQHGLKVDKKKGVIETYELHEGNKGYVSNGEVITPALIEAAESKNIGIFEGKVM

SEQ ID NO: 27331 - protein, 452 aa, synthetic construct
MKAAIYIRVSTQEQVENYSIQAQTEKLTALCRSKDWDVYDTFIDGGYSGSNMNRPALNEMLSKLHEIDAVVVYRLDRLSRSQRDTITLIEEYFLKNNVEFVSLSETLDTSSPFGRAMIGILSVFAQLERETIRDRMVMGKIKRIEAGLPLTTAKGRTFGYDVIDTKLYINEEEAKQLQMIYDIFEEEKSITTLQKRLKKIGFKVKSYSSYNNWLTNDLYCGYVSYADKVHTKGVHEPIISEEQFYRVQEIFSRMGKNPNMNRDSASLLNNLVVCGKCGLGFVHRRKDTVSRGKKYHYRYYSCKTYKHTHELEKCGNKIWRADKLEELIIDRVNNYSFASRNVDKEDELDSLNERLKIEHTKKKRLFDLYISGSYEVSELDAMMSDIDAQINYYEAQIEANEELKKNKKIQENLADLATVDFNSLEFREKQLYLKSLINKIYIDDEQVTIEWL

SEQ ID NO: 27332 - protein, 452 aa, synthetic construct
MKAAIYIRVSTQEQVENYSIQAQTEKLTALCRSKDWDVYDTFIDGGYSGSNMNRPALNEMLSKLHEIDAVVVYRLDRLSRSQKDTITLIEEYFLKNNVEFVSLSETLDTSSPFGRAMIGILSVFAQLGRETIRDRMVMGKIKRIEAGLPLTTAKGRTFGYDVIDTKLYINEEEAKQLRLIYDIFEEEQSITFLQKRLKKLGFKVRTYNRYNNWLTNDLYCGYVSYKDKVHVKGIHEPIISEEQFYRVQEIFSRMGKNPNMNKESASLLNNLVVCSKCGLGFVHRRKDTVSRGKKYHYRYYSCKTYKHTHELEKCGNKIWRADKLEELIIDRVNNYSFASRNIDKEDELDSLNEKLKIEHAKKKRLFDLYINGSYEVSELDSMMNDIDAQINYYEAQIEANEELKKNKKIQENLADLATVDFNSLEFREKQLYLKSLINKIYIDGEQVTIEWL

SEQ ID NO: 27333 - protein, 536 aa, synthetic construct
MSDTRALPRAFSDVFKIDEPIHVYSYIRFSTKAQSLGFSEQRQLEQINQFFEQYPAANQVERFEDLGVSAFKGKNLKTGKLADFLNRLKANEIKDNALLLVESFDRISRMGGYDALEIIISIIQSDCAIYTLFDNRLYSKRKKDSSADISLIQNILERASDESRSKSERSKDAKTRNLKRAENGEIINKRGPFWLTYTDGKFEFNEHAHAVKRATELIFDVGCLATATQINKEDHSKKYSVGIISKILRQKALYGSYVAYDLDDNGKRTIIKQEIKNYYPALISESEFNLIGAKLEERHTPALAGRHPRDFNNILRGISYCECGSTLRSHSSDGIKKQYHYLICTASETKNCPITPGRIGRYSYQLVSSIFLDYQHSIQMQEMISTGKLTEKAEKQLKDVQGELLGKEQALKNTMAVLDKASSAAYEKLISHINTISFEIDALNTKKTMLEREVLESKLTIKSNVLNHELIRLLITPSGRIKINNFLKSKKVKVICKQINKSYFNISIYLGDDLIDTIKTSKTGDVVESLNGPLLR

SEQ ID NO: 27334 - protein, 558 aa, synthetic construct
MTKLYSYIRFSSMRQSDGSSYERQIRMAKEIADRYNLELVNDYQDLGVSAFKGANSKTGALSRFLDEIGRSIPVGSWLFIENLDRLSRQDIISAQELFLSIIRRGITIVTGMDNKIYSIETVTANPMDLMFSILLFIRGNEESQTKRNRTNSSALLKIKAHQQNPQSPAVAIEEIGKNMWWTDTTSGRVLPHPVYFPVLQKIVQLRQEGHSAGVILDYLNEHHEPPAPTSNKKHGKWSRAMVSRLFATKALIGVKTVNVDGVEYELRDYYPRVLSDSEFYFLRKNIVKKAWDYSHDKEKVIPLLSGIGVLRCVHCGATMVKQTAANGKREQYRYCCDGRKSGRTDCPYPNWGFRAVTLEGAVLQLLADKIWIAEDKTNPIPEIQVKIDEISRKIDNLINLSAMTGATKELANQITDLNSQREALHEEIRLFEREMYSVDSQGWDKLAQFDLSDVQNEERLKVRLKIKGALHEIECSRIDSKKNLFVLVYLDGLRQRLVIENNRGLKKGQIFVDLKTINDRQILESAGMVLHPCIEMIIDSDWKAPEEIPGLLSEEFGI

SEQ ID NO: 27335 - protein, 558 aa, synthetic construct
MTKLYSYIRFSSMRQSDGSSYERQIRMAKEIADRYNLELVNDYQDLGVSAFKGANSKTGALSRFLDEIGRSIPVGSWLFIENLDRLSRQDIISAQELFLSIIRRGITIVTGMDNKIYSIETVTANPMDLMFSILLFIRGNEESQTKRNRTNSSALLKIKAHQQNPQNPAVAIEEIGKNMWWTDTTSGRVLPHPVYFPVLQKIVQLRQEGHSAGVILDYLNDHHEPPAPTSNKKHGKWSRAMVSRLFNTKALIGVKTVNVDGVEYELRDYYPRVLSDSEFYFLRKNIVKKAWDYSHDKEKVIPLLSGIGVLRCVHCGATMVKQTAANGKREQYRYCCDGRKSGRTDCPYPNWGFRAVTLEGAVLQLLADKIWIAEDKTNPIPEIQVKIDDISRKIDNLINLSAMMGATKELANQITDLNSQREALHEEIRLFEREMYSVDSQGWDKLAQFDLSDVQNEERLKVRMKIKGALHEIECSRIDSKKNLFVLVYLDGLRQRLVIENNRGLKKGQIFVDLKTINDRQILESAGMVLHPCIEMIIDADWKAPEEIPGLLSEEFGI

SEQ ID NO: 27336 - protein, 558 aa, synthetic construct
MTKLYSYIRFSSMRQSDGSSYERQIRMAKEIADRYNLELVNDYQDLGVSAFKGANSKTGALSRFLDEIGRSIPVGSWLFIENLDRLSRQDIISAQELFLSIIRRGITIVTGMDNKIYSIETVTANPMDLMFSILLFIRGNEESQTKRNRTNSSALLKIKAHQQNPQSPAVAIEEIGKNMWWTDTTSGRVLPHPVYFPVLQKIVQLRQEGHSAGAILDYLNEHHEPPAPTSNKKHGKWSRAMVSRLFATKALIGVKTVNVDGVEYELRDYYPRVLSDSEFYFLRKNIIKKAWDYNHDKEKVIPLLSGIGVLRCVHCGATMVKQTAANGKREQYRYCCDGRKSGRTDCPYPNWGFRAVTLEGAVLQLLADKIWIAEDKTNPIPEIQVKIDEISRKIDNLINLSAMMGATKELANQITDLNSQREALHEEIRLFEREMYSVDSQGWDKLAQFDLSDVQNEERLKVRMKIKGALHEIECSRIDSKKNLFVLVYLDGLRQRLVIENNRGLKKGQIFVDLKTINDRQILESVGMVLHPCIEMIIDADWKAPEEIPGLLSEEFGI

SEQ ID NO: 27337 - protein, 558 aa, synthetic construct
MTKLYSYIRFSSMRQSDGSSYERQIRMAKEIADRYNLELVNDYQDLGVSAFKGANSKTGALSRFLDEIGRSIPVGSWLFIENLDRLSRQDIISAQELFLSIIRRGITIVTGMDNKIYSIETVTANPMDLMFSILLFIRGNEESQTKRNRTNSSALLKIKAHQQNPQNPAVAIEEIGKNMWWTDTTSGRVLPHPVYFPVLQKIVQLRQEGHSAGVILDYLNEHHEPPAPTSNKKHGKWSRAMVSRLFNTKALIGVKTVNVDGVEYELRDYYPRVLSDSEFYFLRKNIIKKAWDYSHDKEKVIPLLSGIGVLRCVHCGATMVKQTAANGKREQYRYCCDGRKSGRTDCPYPNWGFRAVTLEGAVLQLLADKIWIAEDKTNPIPEIQVKIDEISRKIDNLINLSAMMGATKELANQITDLNSQREALHEEIRLFEREMYSVDSQGWDKLAQFDLSDVQNEERLKVRMKIKGALHEIECSRIDSKKNLFVLAYLDGLRQRLVIENNRGLKKGQIFVDLKTINDRQILESAGMVLHPCIEMIIDSDWKAPEEIPGLLSEEFGI

SEQ ID NO: 27338 - protein, 558 aa, synthetic construct
MTKLYSYIRFSSMRQSDGSSYERQIRMAKEIADRYNLELVNDYQDLGVSAFKGANSKTGALSRFLDEIGRSIPVGSWLFIENLDRLSRQDIISAQELFLSIIRRGITIVTGMDNKIYSIETVTANPMDLMFSILLFIRGNEESQTKRNRTNSSALLKIKAHQQNPQNPAVAIEEIGKNMWWTDTTSGRVLPHPVYFPVLQKIVQLRQEGHSAGVILDYLNEHHEPPAPTSNKKHGKWSRAMVSRLFNTKALIGVKTVNVDGVEYELRDYYPRVLSDSEFYFLRKNIVKKAWDYSHDKEKVIPLLSGIGVLRCVHCGATMVKQTAANGKREQYRYCCDGRKSGRTDCPYPNWGFRAVTLEGAVLQLLADKIWIAEDKTNPIPEIQVKIDEISRKIDNLINLSAMMGATKELANQITDLNSQREALHEEIRLFEREMYSVDSQGWDKLAQFDLSDVQNEERLKVRLKIKGALHEIECSRIDSKKNLFVLVYLDGLRQRLVIENNRGLKKGQIFVDLKTINDRQILESAGMVLHPCIEMIIDADWKAPEEIPGLLSEEFGI

SEQ ID NO: 27339 - protein, 548 aa, synthetic construct
MELKNIVNSYNITNILGYLRRSRQDMEREKRTGEDTLTEQKELMNKILTAIEIPYELKMEIGSGESIEGRPVFKECLKDLEEGKYQAIAVKEITRLSRGSYSDAGQIVNLLQSKRLIIITPYKVYDPRNPVDMRQIRFELFMAREEFEMTRERMTGAKYTYAAQGKWISGLAPYGYQLNKKTSKLDPIEDEAKVVELIFDLFLNGLNGKDYSYNAIATHLTNLQIPSPAGKKKWNRFTVKAILENEVYIGTVKYKVREKEKDGKRTIRPENEQIIVPDAHAPIIDKDQFEEANKKIENKIPLLPNRSDYKLNELAGVCICADCGGPLSKYEAKRKRQNKNGTESLYHVKVLRCLNNKCMNVRYNDVEEAILDYFRLFQSLNDKELTNLMEDMVHSHENKNNIKSQKQINEQFEQREKELQNKLNFIFDKYESGIYSDEIFLQRKATLDKEMKELKKAKDELNGLTDIKSGIDISKVRSQMKNLIQIYETSNDKEEKNNLLRIALEKVIVKMTAKRKGPVPAQFEITPILRFGLLTGDTLTDTKESSLS

SEQ ID NO: 27340 - protein, 470 aa, synthetic construct
MKGESKLDKKAAIYIRVSTQEQATEGYSIQAQTDRLTKYVEAKDFILYKKYIDAGYSASKLERPAMQELIQDVQSKKVDIVIVYKLDRLSRSQKDTMYLIEDIFRPNDVELISMQESFDTSTAFGSATVGMLSVFAQLERKSISERMITGRVERAKKGFYHTGGQDRPPAGYQFNSDNQLIINEYEAAAIKDLFRLYNDGLGKSSISEYLKKNYPGKNKWLPSSIDRMLKNSLYIGKVKFSGAEYDGIHEPIIDEVTFYKTQKEIARRKQTNTKRYNYVALLGGLCECGICGAKMANRRAVGRKGKVYRYYRCYSKKGSPKHMMKTDGCSSKAQQQFIIDEAVINNLKNIDVEAELKRRSAPQTNTSLISSQIESIDKQINKLIDLFQVDSMPLDVISEKIDKLNKEKQSMEKLLERKNKLDKTELQHRFDILKSFDWDNSSIESKRVVIEMLVQKVIIHDNSIEIILVE

SEQ ID NO: 27341 - protein, 540 aa, synthetic construct
MAIVSTETLLSLGIEQIINYLRKSRADEDYEKKTGEDVLKAQKELMDRVLEPLGIPFDQRLEVGSGDKISTRPVFQTVIKDLEAKKYQLIAVKEISRMGRGSYKDMGLIYDLIVDNRIFILTPYKLYDPRNPADLRQIRFELFMSREEFETTRERLFGGRVGNAMEGRWVAGAAPFGYTYNKTTKRLEINEEQAKVIQAIFDFYVNGIIDDDGSRRDVSFRSLGTYLERKTAFTTPKGKRNWSPTYLRTLLTTDRFMGTLKFRTTKRVDGKRIDLPEDEHVVAENAIPAIIDRETWDRAQEKIRDSRHKPHNKMDFSPCELAGICRCSACGKKMVRQYSVQKYKTTSGAVSTYHKEFLWCTNPGCTFVKYRAVEESLLQALQRILDLNDKSFKKEVEALLAVSKKESSIDIDHTQYIEQRAKEIKNRMNFIYEKYESGRYSDEVFDERMAEVEKEMKQLEDLRGNLGQQTQNDAEINLDAVRLNIKNALEGYRNSVDKTDRNNILRKVFEDVEVHLIERGRGRIPAKFKLKIRIDQQLLT

SEQ ID NO: 27342 - protein, 558 aa, synthetic construct
MTKLYSYIRFSSMRQSDGSSYERQIRMAKEIADRYNLELVNDYQDLGVSAFKGANSKTGALSRFLDEIGRSIPVGSWLFIENLDRLSRQDIISAQELFLSIIRRGITIVTGMDNKIYSIETVTANPMDLMFSILLFIRGNEESQTKRNRTNSSALLKIKAHQQNPQNPAVAIEEIGKNMWWTDTTSGRVLPHPVYFPVLQKIVQLRQEGHSAGAILDYLNEHHEPPAPTSNKKHGKWSRAMVSRLFATKALIGVKTVNVDGVEYELRDYYPRVLSDSEFYFLRKNIIKKAWDYNHDKEKVIPLLSGIGVLRCVHCGATMVKQTAANGKREQYRYCCDGRKSGRTDCPYPNWGFRAVTLEGAVLQLLADKIWIAEDKTNPIPEIQVKIDEISRKIDNLINLSAMMGATKELANQITDLNSQREALHEEIRLFEREMYSVDSQGWDKLAQFDLSDVQNEERLKVRMKIKGALHEIECSRIDSKKNLFVLVYLDGLRQRLVIENNRGLKKGQIFVDLKTINDRQILESAGMVLHPCIEMIIDADWKAPEEIPGLLSEEFGI

SEQ ID NO: 27343 - protein, 550 aa, synthetic construct
MTTALHQPKGSRSMTKREPFVAYIRVSTYYEEKISPEIQRSAIKAWADRNNANIVEWINDLDVSGRKTRRKISNALKMIEGRTARGIAVWRYSRFGRSRHGNAINLARLEALGGRLASATEAADTRTAFGRLQMGMAFKFAEYESDRIGEQWGETREHRRTAGLPATGGKRWGYIWHQRHLDDAESVIHREWYEPNDTGLIVTNLYERIAEGESMGSVTQWLGKNGHIGTRGKPWLQSGLSRYMDSGFAAGWIRYHPDDCDCPPKDPDSTASRGALCPNRIWIPGAHEPIVPEDVWEAYKEKRAKARNTPSGNRKPAYALSGLMRCARCGGTASAAGGATYGAGKVLIPKPGYMFRCSKMKDNRTCDGVYILRSIAEDAVLQRLVDWSEAIEAEAASIPQQSNPDSSTPRQRINAARERLRARLAEIQQQLDRQTDLLTRGVIPEDSYTRERDRLTQEQTGTTAELAELDKRTEEQEAKPADYQPIIRGLIDRWEITPVETRRELLRSVLRGVWAYPKSTAPDGTEVPAYAVPVAIWEDEPRPIGPRANA

SEQ ID NO: 27344 - protein, 478 aa, synthetic construct
MKVALYVRVSTLEQAEEGYSINEQKDKLKKYCEIKDWTIVKEYVDPGRSGSNINRPSMQQLIKDADTGLYDALLVYKLDRLSRSQKDTLYLIEDVFQKNNIHFISLSENFDTSTAFGKAMIGILSVFAQLEREQIKERMSMGRVGRAKSGKIMEFNNPAFGYEIDGDNYKVDPLRAEIVKRIYKMYLSGTSINKIKETLNSEGHIGNKKNWSDTRIRYILSNPTYLGKIRYDGKTYDGKFSPIIDEETFNKTQNELKERQTATYKRFNMKLRPFQSKYMLSGLLRCGYCGATLFVNSYVYNGKRKLRYNCPSTYKSKQKTRTYKIMDPNCPFKLVYAKDLEPAVINEIKNLALNPQSIQKPIKKKPDIDVETIQKELAKVRKQQQRLIDLYVISDDVNIDNISKKSADLKLQEETLKKQLAPLEEPDNDDKIVAFNEILAQIKDIDSLDYDKQKFIVKKLIKKIDVWNDNKIKIHWNI

SEQ ID NO: 27345 - protein, 478 aa, synthetic construct
MKVALYTRVSTLEQAEEGYSISEQKDKLTKYCEIKDWTITKIYSDPGFSGSNINRPSMQQLIKDADTGLYDAVLVYKLDRLSRSQKDTLYLIEDVFQKNNIHFISLSENFDTSTPFGKAMIGILSVFAQLEREQIKERMSMGRVGRAKSGKIMEFNNPAFGYEIDGDNYKVDPLRAEIVKRIYKMYLSGTSINKIKETLNSEGHIGNKKNWSDTRIRYILSNPTYLGKIRYDGKTYDGKFSPIIDEETFNKTQNELKERQTATYKRFNMKLRPFQSKYMLSGLLRCGYCGATLFVNSYVYNGKRKLRYNCPSTYKSKQKTRTYKIMDPNCPFKLVYAKDLEPAVINEIKNLALNPQSIQKPVKKKPDIDMEAIQKELAKVRKQQQRLIDLYVISDDVNIDNISKKSADLKLQEETLKKQLAPFEEPDNDDKIVAFNEILAQIKDVDSLDYDKQKFIVKKLIKKIDVWNDNKIKIHWNI

SEQ ID NO: 27346 - protein, 478 aa, synthetic construct
MKVALYVRVSTLEQAEEGYSINEQKDKLKKYCEIKDWTIVKEYIDPGRSGSNINRPSMQQLIKDADTGLYDAVLVYKLDRLSRSQKDTLYLIEDVFQKNNIHFISLSENFDTSTAFGKAMIGILSVFAQLEREQIKERMSMGRVGRAKSGKIMEFNNPAFGYEIDGDNYKVDPLRAEIVKRIYKMYLSGTSINKIKETLNSEGHIGNKKNWSDTRIRYILSNPTYLGKIRYDGKTYDGKFSPIIDEETFNKTQNELKERQTATYKRFNMKLRPFQSKYMLSGLLRCGYCGATLFVNSYVYNGKRKLRYNCPSTYKSKQKTRTYKIMDPNCPFKLVYAKDLEPAVINEIKNLALNPQSIQKPIKKKPDIDVEAIQKELAKIRKQQQRLIDLYVISDDVNIDNISKKSADLKLQEETLKKQLAPLEEPDNDDKIVAFNEILAQIKDIDSLDYDKQKFIVKKLIKKIDVWNDNKIKIHWNI

SEQ ID NO: 27347 - protein, 562 aa, synthetic construct
MQKILYPYVRFSSEQQSGGSSYQRQLGDILKYAKENGYTVNDSLELRDLGLSAYKADHIKKGSLGDFFDAIDSGVIETDGSAYLCVEQIDRLSRQSLDDASDVLRTILRANINVITLMDKMIYTKESLNDLMSVLYSSMLMVQANKESAVKSERILKSFDRRIDKLNNGEPIQYVGIFPGWIDNKGTKQKKDFVVNDKAKIVQRVFKMYIAGTSMGDIARIFNDKGIEQVAKRRHKNFTNSWSSAKINHLLKNRCVLGDLHIKKTGEVFKNYYPQIISIDDWDVVQSMTTTKKTIKYSGRKSINIFTGKIFCSGCGQKYHFETDDKITKKGRTLYYMLKCQGRRILGCKSKSIKYDDFLSSTPNMFGMINKTKKDNSEEIKKIKQQISDISSETREIEKNINTLENMNDNGSLDYETYLKESSKQRKKIRINDTRVADFKANIARLSSDNKLNHFDKTDPISIIKGKRFVNENFAGFVISSDSKSCTALYLNGQVVHFLLQNSKIEKKENIKPVDGFGEFFELKEEIINAYKSGKMDGRFIEILRAANFWGVDTSEKDYSIE

SEQ ID NO: 27348 - protein, 507 aa, synthetic construct
MKRVISYIRFSSEKQAKGDSLRRQSKMVNDWLKAHPEYYLDQDLSFRDLGVSGFTGKHLKGGLGDFLTAIEKGLVKAGDTLLIESLDRLSRQDVDQASELLRNILRSGVDVVTLSDGEHYTKESLRDPLSLIKSILIMQRAHEESLRKAERIQAAWDAKKEAAKAGIKISRRCPAWLKLNDDRKSFSVIPEKVETVKRCFQLRLEGKSIWEIVRTLNAEGHQTLNQYKAGKFGQTSVQDLLKNRSVIGYFTPKGREEISGYFPPIIPETDFYKVQQLSHYRYGRKPVSDKPLSVNLFKGVIRCSECGHALIITGFSDTRNGIYRCPLRNENRCNAKGLSRKQTDGTLLALLSRLDRFDSDMTNVIDALKLHREHISSNIEKLVQLSLEIEDLSAITSKLKQLKGELSQVDADIEKETQRLKSIDVGCLSDCDLTTKAGRIEAQLIIKSAVKEVVLNTAKRRCKVTFHNGRAITLPITENPSEDVTEAIQSLSEVTERGLIDVDVVEI

SEQ ID NO: 27349 - protein, 507 aa, synthetic construct
MKRVISYIRFSSEKQAKGDSLRRQSKMVNDWLKAHPEYYLDQDLSFRDLGVSGFTGKHLKGGLGDFLTAIEKGLVKAGDTLLIESLDRLSRQAVDRASELLRNILRSGVDVVTLSDGEHYTKESLRDPLSLIKSILIMQRAHEESLRKAERIQAAWDAKKEAAKAGIKISRRCPAWLKLNDDRKSFSVIPEKVETVKRCFQLRLEGKSIWEIVRTLNAEGHQTLNQYKAGKFGQTSVQDLLKNRSVIGYFTPKGCEEISGYYPAIIDETTFYKVQQLSYARYGRKPASDKPMAVNLFKGVIRCSECGHALIITGFSDTRNGIYRCPLRNENRCSAKGLSRKQTDGTLLALLSRLDRFDSDMTNVIDTLKLHREHISSNIEKLVQLSLEIEDLSAITSKLRQLKNELSQVDADIEKETQRLKSIDAGCLSDCDLTTKAGRIEAQLIIKSAVKEVVLNTAKRRCKVTFHNGKAITLPITENPSDNVTEAIQSLSEVTERGLIDVDEVII

SEQ ID NO: 27350 - protein, 507 aa, synthetic construct
MKRVISYIRFSSEKQSRGDSLRRQSKMVTDWLKAHPEYYLDQDLSFRDLGVSGFTGKHLKGGLGDFLTAIEKGLVKAGDTLLIESLDRLSRQDVDQASELLRNILRSGVDVVTLSDGEHYTSESLKDPLALIKSILIMQRAHEESLRKSERIQAAWDAKKEAAKAGIKVSKRCPAWLKLNDDRKSFSVIPEKVATVKRCFQLRLEGKSIWEIVRTLNDEGHQTLNQYKPGKFGQTSVQDLLKNRSVIGYFTPKGREEISGYYPAIIDETTFYKVQQLSYARYGRKPASDKPMAVNLFKGVIRCSECGHALIITGFSDTRNGIYRCPLRNENRCSAKGLSRKQTDGTLLALLSRLDRFDSDMTNTLDTLKLHREHISSNIEKLVQLSLEIEDLNAITSKLKQLKGELSQVDADIEKETQRLKSIDVGCLSDCDLTTKAGRIEAQLIIKSAVKEVVLNTAKRRCKVTFHNSKSITLPITENPSDNVTEAIQSLSEVTERGLIDVDVVEI

SEQ ID NO: 27351 - protein, 506 aa, synthetic construct
MRTVITYLRFSSATQGAEGADSTRRQNELFKQWLRKNSDAQVVASFSDEGLSGYKGKHLTGQFGDMLARIESGEFSEGTVLLVEAIDRIGRLEHLETEALMNRIIAHGIEIHTLQDGLIYTRDALSDDLGISIIQRVKSYVAHQESKQKSFRVSQKWKQRAKLALAGEQRLTRNVPGWIDPDTFKCNEHAETVRLIFKLLLDGESLHNIARHLQSNDIKSFSRRKDANGFSVHSVRTVLRSESVIGTLPASQRNDRPAIPNYYEAAIDAATFNKAQEILDKNRKGRTPVSDNPLTINIFKGLFRCQCGASVHPTGTKNKYQGVYRCNNHLDGRCDVPPLKRKPFDRWMIDNFLGMIDVGNDGESERKIAALQHEVEIVTARIKKATALLLEMDDITELKTQVKGLNQKRTELQTTIDNMKRKASLTDKELPQLKDIDLTTKAGRVECQLILSKHLKGLTLGKDSVTVTLQNDTEITIPTNPLPLNDGSPIFEIADKELLDIDAYQL

SEQ ID NO: 27352 - protein, 452 aa, synthetic construct
MKAAIYIRVSTQEQIENYSIQAQTEKLTALCRSKDWDVYDIFIDGGYSGSNMNRPALNEMLSKLHEIDAVVVYRLDRLSRSQRDTITLIEEYFLKNNVEFVSLSETLDTSSPFGRAMIGILSVFAQLERETIRDRMVMGKIKRIEAGLPLTTAKGRTFGYDVIDTKLYINEEEAKQLQMIYDIFEEEKSITTLQKRLKKLGFKVKSYSSYNNWLTNDLYCGYVSYADKVHTKGVHEPIISEEQFYRVQEIFSRMGKNPNMNRDSASLLNNLVVCGKCGLGYVHRRKDTVSRGKKYHYRYYSCKTYKHTHELEKCGNKIWRADKLEELIIDRVNNYSFASRNVDKEDELDSLNEKLKTEHTKKKRLFDLYISGSYEVSELDAMMSDIDAQINYYESQIEANEELKKNKKIQENLADLATVDFDSLEFREKQLYLKSLINKIYIDGEQVTIEWL

SEQ ID NO: 27353 - protein, 452 aa, synthetic construct
MKAAIYIRVSTQEQIENYSIQAQTEKLTALCRSKDWDVYDIFIDGGYSGSNMNRPALNEMLSKLHEIDAVVVYRLDRLSRSQRDTITLIEEYFLKNNVEFVSLSETLDTSSPFGRAMIGILSVFAQLERETIRDRMVMGKIKRIEAGLPLTTAKGRTFGYDVIDTKLYINEEEAKQLQMIYDIFEEEKSITTLQKRLKKIGFKVKSYSSYNNWLTNDLYCGYVSYADKVHTKGVHEPIISEEQFYRVQEIFSRMGKNPNMNRDSASLLNNLVVCGKCGLGFVHRRKDTVSRGKKYHYRYYSCKTYKHTHELEKCGNKIWRADKLEELIIDRVNNYSFASRNVDKEDELDSLNEKLKIEHTKKKRLFDLYISGSYEVSELDAMMSDIDAQINYYEAQIEANEELKKNKKIQENLADLATVDFNSLEFREKQLYLKSLINKIYIDDEQVTIEWI

SEQ ID NO: 27354 - protein, 452 aa, synthetic construct
MKAAIYIRVSTQEQVENYSIQAQTEKLTALCRSKDWDVYDTFIDGGYSGSNMNRPALNEMLSKLHEIDAVVVYRLDRLSRSQKDTITLIEEYFLKNNVEFVSLSETLDTSSPFGRAMIGILSVFAQLERETIRDRMVMGQIKRVESGLPLTTAKGRTFGYDVVDTKLYVNKEEAQHLQLIYDIFEEEKSITFLQKRLKELGFKVKSYSSYNKWLMNDLYIGYVSYSDKVHVKGVHEAIISEEQFYRVQEIFSRMGKNPNMNKESSSLLNNLIVCEKCGLGYVHRAKDTVSRGKKYHYRYYSCKTYKHTHELEKCGNKIWRADKLEEIIIDRVKNYSFATRNLDKEDELDSITEKLKTEHSKKKRLFDLYINGTYEVAELDKMMADIDAQINYYNSQIEANEELKKDKKIQESLAELATVDFDSLEFREKQIYLKSIINKIYIDGEQVTIEWI

SEQ ID NO: 27355 - protein, 452 aa, synthetic construct
MKAAIYIRVSTQEQVENYSIQAQTEKLTALCRSKDWDVYDIFVDGGYSGSNMNRPALNEMLSKLHEIDAVVVYRLDRLSRSQKDTITLIEEYFLKNNVEFVSLSETLDTSSPFGRAMIGILSVFAQLERETIRDRMVMGKIKRVESGLPLTTAKGRTFGYDVVDTKLYVNKEEAQHLQLIYDIFEEEKSITFLQKRLKELGFKVKSYSSYNKWLMNDLYIGYVSYSDKVHVKGVHEAIISEEQFYRVQEIFSRMGKNPNMNRDSSSLLNNLIACEKCGLSFVHRVKDTASRGKKYRYRYYSCKTYKHTHELEKCGNKIWRADKLEEIIIDRVKNYSFATRNLDKEDELDNLNEKLKTEHTKKKRLFDLYISGSYEVSELDAMMADIDAQINYYEAQIEANEELKKNKKIQENLADLATVDFDSLEFREKQLYLKSLINKIYIDGEQVTIEWL

SEQ ID NO: 27356 - protein, 452 aa, synthetic construct
MKAAIYIRVSTQEQIENYSIQAQTEKLTALCRSKDWDVYDIFIDGGYSGSNMNRPALNEMLSKLHEIDAVVVYRLDRLSRSQRDTITLIEEYFLKNNVEFVSLSETLDTSSPFGRAMIGILSVFAQLERETIRDRMVMGKIKRIEAGLPLTTAKGRTFGYDVIDTKLYINEEEAKQLQMIYDIFEEEKSITTLQKRLKKIGFKVKSYSSYNNWLTNDLYCGYVSYADKVHTKGVHEPIISEEQFYRVQEIFSRMGKNPNMNRDSASLLNNLVVCGKCGLGFVHRRKDTVSRGKKYHYRYYSCKTYKHTHELEKCGNKIWRADKLEELIIDRVNNYSFASRNVDKEDELDSLNEKLKIEHTKKKRLFDLYISGSYEVSELDAMMSDIDAQINYYEAQIEANEELKKNKKIQENLADLATVDFDSLEFREKQLYLKSLINKIYIDGEQVTIEWL

SEQ ID NO: 27357 - protein, 452 aa, synthetic construct
MKAAIYIRVSTQEQIENYSIQAQTEKLTALCRSKDWDVYDIFIDGGYSGSNMNRPALNEMLSKLHEIDAVVVYRLDRLSRSQRDTITLIEEYFLKNNVEFVSLSETLDTSSPFGRAMIGILSVFAQLERETIRDRMVMGKIKRIEAGLPLTTAKGRTFGYDVIDTKLYINEEEAKQLQLIYDIFEEEQSITFLQKRLKKLGFKVRTYNRYNNWLTNDLYCGYVSYKDKVHVKGIHEPIISEEQFYRVQEIFTRMGKNPNMNRDSASLLNNLVVCSKCGLGFVHRRKDTMSRGKKYHYRYYSCKTYKHTHELEKCGNKIWRADKLEELIIDRVNNYSFASRNIDKEDELDSLNEKLKIEHTKKKRLFDLYISGSYEVSELDAMMSDIDAQINYYEAQIEANEELKKNKKIQENLADLATVDFNSLEFREKQLYLKSLINKIYIDDEQVTIEWL

SEQ ID NO: 27358 - protein, 533 aa, synthetic construct
MNQSTNNEKLTALYVRLSNDDEREGESNSIVNQKKMLSKYASDYKFRKTQFYIDDGISGTTFNRKGFQAMIADIESGLVGTVIVKDMSRFGRDYLQVGMYTDIMFPEHNIHFIAINDGVDSEKGDNEFTPFRNIINEWYAKDTSKKIRAVFKAKGLSGVPLATTPPYGYIKDPTNPAHWIIDEPAAFVVKQMFQLTMEGLGPVQIAKRFEQEQILTPAHHTINQGRKTNASLPKNPYYWSDRTIASLLEKPEYLGHTVNFRTTKKSYKDKRQVKRDKSEWVIFENTHEAIIEQSVFDTVQALRKHKRRPTKQKELPLFSGLLYCADCGGKLYFCRGKSVSRNQENYICSSYRRRTTECTAHYIRSVVLEEVVTENLKKTMAYIHANERAFMADVLKGDQQTRKQDAKQQQKQLHQAQKRIAELDGIFPKLYEDMVSGRITSERFDKLSSTYEEEQVLLQQQVLDASHEIQAELDVAAYLRELRKFVRKHVYFETLTPELLHEMIDKIIIHDDKRIEVHYKFGLGELEELVDMA

SEQ ID NO: 27359 - protein, 452 aa, synthetic construct
MKAAIYIRVSTQEQIENYSIQAQTEKLTALCRSKDWDVYDIFIDGGYSGSNMNRPALNEMLSKLHEIDAVVVYRLDRLSRSQRDTITLIEEYFLKNNVEFVSLSETLDTSSPFGRAMIGVLSVFAQLERETIRDRMVMGKIKRIEAGLPLTTAKGRTFGYDVIDTKLYINEEEAKQLQMIYDIFEKEKSITTLQKRLKKLGFKVKSYSSYNNWLTNDLYCGYVSYADKVHTKGVHEPIISEEQFYRVQEIFSRMGKNPNMNRDSASLLNNLVVCSKCGLGFVHRRKDTVSRGKKYHYRYYSCKTYKHTHELEKCGNKIWRADKLEELIIDRVNNYSFASRNVDKEDELDILNEKLKTEHTKKKRLFDLYISGSYEVSELDGMMADIDARINYYEAQIEANEELKKNKKIQENLADLATVDFDSLEFREKQLYLKSLINKIYIDGEQVTIEWL

SEQ ID NO: 27360 - protein, 452 aa, synthetic construct
MKAAIYIRVSTQEQIENYSIQAQTEKLTALCRSKDWDVYDIFIDGGYSGSNMNRPALNEMLSKLHEIDAVVVYRLDRLSRSQRDTITLIEEYFLKNNVEFVSLSETLDTSSPFGRAMIGILSVFAQLERETIRDRMVMGKIKRIEAGLPLTTAKGRTFGYNVIDTKLYINEEEAKQLQMIYDIFEEEKSITTLQKRLKKLGFKVKSYSSYNNWLTNDLYCGYVSYADKVHTKGVHEPIISEEQFYRVQEIFSRMGKNPNMNRDSASLLNNLVVCGKCGLGFVHRRKDTVSRGKKYHYRYYSCKTYKHTHELEKCGNKIWRADKLEELIIDRVNNYSFASRNVDKEDELDSLNEKLKTEHTKKKRLFDLYISGSYEVSELDGMMADIDARINYYEAQIEANEELKKNKKIQENLADLATVDFDSLEFREKQLYLKSLINKIYIDGEQVTIEWL

SEQ ID NO: 27361 - protein, 452 aa, synthetic construct
MKAAIYIRVSTQEQIENYSIQAQTEKLTALCRSKDWDVYDIFIDGGYSGSNMNRPALNEMLSKLHEIDAVVVYRLDRLSRSQRDTITLIEEYFLKNNVEFVSLSETLDTSSPFGRAMIGILSVFAQLERETIRDRMVMGKIKRIEAGLPLTTAKGRTFGYDVIDTKLYINEEEAKQLQMIYDIFEEEKSITSLQKRLKKLGFKVKSYSSYNNWLTNDLYCGYVSYADKVHTKGVHEPIISEEQFYRVQEIFSRMGKNPNMNRDSASLLNNLVVCSKCGLGFVHRRKDTVSRGKKYHYRYYSCKTYKHTHELEKCGNKIWRADKLEELIIDRVNNYSFASRNVDKEDELDNLNEKLKTEHAKKKRLFDLYISGSYEVSELDGMMADIDAQINYYEAQIEANEELKKNKKIQENLADLATVDFDSLEFREKQLYLKSLINKIYIDGEQVTIEWL

SEQ ID NO: 27362 - protein, 520 aa, synthetic construct
MTEKNIMVIPARKRVGSTAAKEKIKKLRVAAYCRVSTETEEQNSSYEVQVAHYTEFIKKNNEWEFAGIFADDGISGTNTKKRDEFNRMIAECMDGNIDMVITKSISRFARNTLDCLQYIRQLKGKNISVYFEKENINTMDAKGEVLLTIMASLAQQESQSLSQNVKLGLQYRYQQGKVQVNHKRFMGYTKDEDGNLIIVPEEAEIIKRIYREYLEGQSLVGIGRGLEKDGILTAAGKPRWRPESIKKILTNEKYIGDALLQKTTTIDFLTKKRVKNEGHVPQYYVENNHEAIIPKEIYLQAQEELHRRNNIYTGADKSKRIYSSKYALSAITFCGECGDIYRRTYWNVHGRKEFVWRCVTRIEQGPEVCKNRTAKEGDLYDAVMTAINRLLAGGDNMIKTLEENIHAVIGDTTEYQISEINILLVEKQKELINLANKGKDYEPLADEIDNLRGKRQTLLVEDASISGENERINELIEFIRNNKYRTQRYDGALVRKLIQNVTVYDDHFVICFKSGIEVEV

SEQ ID NO: 27363 - protein, 473 aa, synthetic construct
MQNKVAIYVRVSTSSQAEEGYSIDEQKAKLEAYCEIKDWKIYDTYIDGGFSGANTQRPELERLISDAKRKKIDIVLVYKLDRLSRSQKDTLFLIEDVFAKNDVAFISLQENFDTSTPFGKASIGMLSVFAQLEREQIKERMMLGKEGRAKNGKSMSWTTIPFGYDYSKETGILSVNPTQALIVNRIFTEYLNGKSVVKIIRDLNAEGHVGRKRPWGETITKYLLKNETYLGKVKYKDKVYEGQHEPIITQELFDLVQLEVEKRQISALEKYNNPRPFRAKYMLSGLMKCGYCGASLGLKYTRKDKNGISHHKYQCRNRHSKDLEKRCESGWYSQEELEKDVIKELERLKLNPKYRNETLAKKEETIKVEEVKKQLDKLNNQVSKLTELYLDEVITRKELDEKNAKIKTERQFLEEQLENQKSNVLSIRKRKLTRLLKDFDVEKMSYEEASKIVKTIIKEIVVTKDDMTLTLDF

SEQ ID NO: 27364 - protein, 515 aa, synthetic construct
MKTAIYLRKSRADLEAEARGEGETLAKHRTTLLKIAKEMNLNVLSVREEIVSGESLVKRPEMLALLEEIEDNKYDVVLCMDMDRLGRGGMKEQGIILETFKRSNTKIMTPRKTYDLNDEWDEEYSEFEAFMARKELKIITRRMQRGRVASVEAGNYLGTHAPFGYDIHRLNKRERTLTINPEEASVVRMIFDWYANEDMGANAIRSKLNDLGYKSKLGNEWNPYSILDILKNNVYIGKVTWQKRKEVKRPDAVKRSCARQDKSDWIIADGKHEPIIPESLFEQVQEKLNSRYHVPYNTNGIKNPLAGIIKCSKCGYSMVQRYPKNRKETMDCKHRGCENKSSYTELIEKRLLEALKEWYINYKADFEKHKQDDKLKETQVIQMNEAALRKLEKELVDVQKQKNNLHDLLERGVYTVDMFLERSNVISDRITEITSTMENLKKEIKTEIKKEKVKKDTIPQVEHVLDLYFKTDDPKKKNSLLKSVLEKAVYKKEKWQRLDDFELVLYPKLPQDGDI

SEQ ID NO: 27365 - protein, 546 aa, synthetic construct
MQDDFPGDQHSSGPVRAYSYVRMSTRKQLRGDSLRRQLERSKAFADEHSLLLDDSLQDLGVSAWRGRNFKTGALGRFLAMVESGQIPKGSYLLIESLDRLSREAVPDALTLFMAIINAGIVIVTLGEDRQIYSRDRLNGDWTKLIIGLAVMSRGHEESQTKSERISAVAKRKREQAREGKGHITSITPAWIDAKRIDANRYEFTLNDHAETVRAIYEMATRGLGATVIARKLNADGVPAFKSKDGWYQSIIKALLTRHDVIGIFQPHRMQNGKRVPDGDPIEGYFPAAIDKDLFLRVQTMRSNPGRPGRKGDTFANLFTGLCHCAHCGGPMTMKMSRVRGNENGRYLVCANYVRGHRCTEGTRHFRYEPFEMAILDHVKELNLADALQTVRIDHAINDINETIAGMTIRLDELRRKEQRLALAVEDDSQPLETILDLLKARQAERHAVEAELRHHQNERQRLSARNNDPELAGDHIRVLRTAWETAEDADARYALRSEAYAAIRELVSEISFDSATHEAIIVVANGVIAYSVRDGRISGYFQAFAA

SEQ ID NO: 27366 - protein, 606 aa, synthetic construct
MKQSEIRQTAYSYIRMSSQQQMKGDSLRRQLELSRQYAAENNLVLDESLTDIGISAWTGANVQDGALGRFLQLIQSGLIKRGSYLLVESLDRLSRQQVRNAIGPFIDIINAGVTIVTLADKQVYSETTVDENWTQLMMSLAIMSRAHEESQTKSKRLKEAHANKKKLAAQGIGRYSHNMWGWIDQIEVAANKFEYQLNQHAAAVRKIYEMADAGLGQLVITRKLNDEGIATFRMSKKGWQQPNVGSILRNEAVIGTYQPTHAINGKATPNGPPIKNYLPAAISEELFWRVQRNKQRRVSSGRKGKQLTNLFTSLCLCRHCNGPIRVRLAGTGGETHRHLHCDNRYRAAGCPSVGGGFRYDIMEATILDKIKEFDFEIGTGRQTADREVLVHEIMTKEIQLDEMEKRKNKLLRALELSADDAAMSDILSQLSERRTTVEQLTTQIAEMKGDLARIDTEAGALATAVERLQLERLIWPTGPDDEVYASRSRVSAIMHSYIDVIAFDFNRKTYRVSIGGHLLLYEFYRDGRLLQKIDNRKLMRKHGVPVIWKDTDETGHAVDGTGEKVIPMGWNSETLTTTIPQSRQDPNAHLVDKRKRIVRTLINKKH

SEQ ID NO: 27367 - protein, 558 aa, synthetic construct
MTKLYSYIRFSSMRQSDGSSYERQIRMAKEIADRYNLELVNDYQDLGVSAFKGANSKTGALSRFLDEIGRSIPVGSWLFIENLDRLSRQDIISAQELFLSIIRRGITIVTGMDNKIYSIETVTANPMDLMFSILLFIRGNEESQTKRNRTNSSALLKIKAHQQNPQNPAVAIEEIGKNMWWTDTTSGRVLPHPVYFPVLQKIVQLRQEGHSAGAILDYLNEHHEPPAPTSNKKHGKWSRAMVSRLFHTKALIGVKTVNVDGVEYELRDYYPRVLSDSEFYFLRKNIIKKAWDYSHDKEKVIPLLSGIGVLRCVHCGATMVKQTAANGKREQYRYCCDGRKSGRTDCPYPNWGFRAVTLEGAVLQLLADKIWIAEDKTNPIPEIQVKIDDISRKIDNLINLSAMMGATKELANQITDLNSQREALHEEIRLFEREMYSVDSQGWDKLAQFDLSDVQNEERLKVRMKIKGALHEIECSRIDSKKNLFVLVYLDGLRQRLVIENNRGLKKGQIFVDLKTINDRQILESAGMVLHPCIEMIIDADWKAPEEIPGLLSEEFGI

SEQ ID NO: 27368 - protein, 561 aa, synthetic construct
MAAKARVYSYLRFSDPKQAAGGSVDRQLEYAARWAAERELLLDASLSLRDEGLSAYHQRHVKQGALGVFLRAVEDGHVPPGSVLIVEGLDRLSRAEPLQAQAQLAQIVNAGITVVTASDGREYNRERLKAQPMDLVYSLLVMIRAHEESDTKSKRVKAAIRRQCQGWIAGTWRAPVRVGKDPQWVREVDGRFELIPERAAAIRVVVDMYKKGHGAVRTLRDLHERGMTITNAGLPKATQIYKLLANRMLIGEKTVELDGEQFRLEGYYPPVLSPAEFADLRNAAGERGRRKGKGEIPGVVTGLGITYCGYCGAAVVGQNIMNRRRMENGLPYPGHRRLHCVTYSSSAGCKVSGSCSVAPVERALMLYCSDQMNLTRLLEGDSGMTALNAELARARAAVADLERQIGRVTDALLTDEEQAPAALLKRMRDMEAELERERHRCGALELRVHAAASTEAPAAADAWSALVRGVEELDYDARMQARQLVADTFSRIVVFQSGFYPETDDGLIGLMLIAKRGSTRLLHVDRRTGEWRSADDVAVGGDLPLPHPSSTQVQWKKEAPR

SEQ ID NO: 27369 - protein, 550 aa, synthetic construct
MKPRAYSYIRMSTDIQLRGDSLRRQTEASKKYAAENDLELIADFKLEDIGVSAFEGKNVAQGSLGKFLALVEEGQVPKGSYLIVESLDRISRQNPQAATSLFLQILQAGIHIVTLTDNHVYRADGGNFSDIIVSVVIMSRAHEESRTKSLRVGAAWENKRQNIHEKKLTRVAPIWLKLSEDRANFEMISERVAVLRAIFEEADHGKGSLQIARRLNREGVPTFAPSKGWYESYVSKVLTNRAVLGEFQPHRYVGGKRVPYGEPIADYFPVIVSREQFERIQAGRAVRRLRGSGRKGRNNINLFQGVARCGYCNGRMMIVNKGDGPKGGVYIRCDNARRAAGCTASNWPLEHFEAAFLWFVEELDVGAIAEGAEAEEARKALDGQIAIVSVDLEKQKVMRERAFELLGDSSTAAAFVKSKIDEASLNIDRLEKRLAELLGSAMTDQVRKSRPLEEVKEVIRNIGHWKLAHENARTRVSDWIKRNVKELLVYSDGLEPTGVPQARQFSALFVTGVFRTVQMTGVDPTVAAYSIHASGDRWVLMENGKQSVYS

SEQ ID NO: 27370 - protein, 531 aa, synthetic construct
MTSAHPLPRAFAEVFQGDDRINVYSYIRFSSKAQKLGFSEMRQIDQLNRFFEQYPQARQVERYEDLGVSAFKGKNLKSGQLARFVERIKAKEIQPNSLLLVESFDRISRMGGYDALELIISIIQADCAIYTLFDNRLYSRRKTDSSADISLIQNILERANDESRSKSDRISDAKARNLLKGENGGIITKRCPFWISFTDGKFVLNEHAHAIARAVELCFDMGFQAIAKKLNDEIHPKKYTESIVGKFLRQPAIYGSFIAMEWDESGKPVQLKKEIKGYYPAVITEAEFHRISVKLQERQDPKLAGRKTSEFKNILRGLVYCACGSGFRYHAQKSGYVDLVCSASLTGRCSSAKPGKGVRYRYARLEEIFLAYQAKIPFHRIIAKTEDIQTLEKAHGEISGLLIQKEKALQNNFSILEKGSESAQKYILDRINEVSKELDQLKAQEQELSRRINTLHLASKSTLNVMEIYKLLLTEHGRMRVNNFLQGQYVKLIVTPIQKKYFYMDIFLGDEHVDRVHVTPDGYTAENKPSG

SEQ ID NO: 27371 - protein, 532 aa, synthetic construct
MTVKKSLPRAFSDVFRDDETINVYSYIRFSSKAQSAGFSETRQLEQLNRFFEQYPQARQVERYEDLGVSAFKGKNLKSGQLAKFVERIKSKEILSNALLLVESFDRISRVGGYDALELIISIIQADCAIYTLFDNRLYSKRKKDSSVDISLIQNILERANDESKAKSERISDAKARNLIKGENGGIVTRRCPFWISFVDNKFVLNEHANAVKRMTELCFEIGFQAIAQELNKEEHARKYTESTVGKVLHKHAIYGSFLSMKNDENGNRTIVNKEIKNYYPAVISEAEFHRISVKLKERQDPKLAGRKASEFRNILRGLVFCKCGSTFRFHAQKNLYVDLVCNASSVAKCEFAKENKSIRYRYARVEEIFLAYQSLIPFHQIVVKSDDVKALEKEHQEVSGLIVLKEKALANNFAILESSSDSARKYITQRIDEVSEELDKLKADEHKLNQRIISMHLSSKSDLNVIEIYNLLMTEKGRIKINNFLHSQKIKLIITPVKKKFFTLDIYHDDKHIDTIDVTASDYTARNYTHLK

SEQ ID NO: 27372 - protein, 567 aa, synthetic construct
MTVHIYSYKRISSRTQKEGTGIDRQEALIDEYLAHHKLELTREFIDLGISGFRGKNARTGALREFLDLITSGAIKANDVLLVENFDRLTRMNGIDATKLVVDILSAKIIIVTLSDNQTYDYRQEDHSNILFKINFVLSRANEESRIKRNRSLGAWQKKHSEAKSLNKVMTKKLPYWISYNRETESLNLNPSRANEVKKIFKLLELYGCARTAIEINKTETDKKWTLIAIRHLSRAKSVFGCLEIYKTKTANGEGADYEELENYYPAVISKEQFYNIQTKLNVRAETHEKKGREAKGFRNVFKGVIFCEHCNTALHQHFTKRKDKEYMYLLCAKSLVGACPAGRKIFIPYNYILEPFLLYYKNYDLERIIRKTGDIQSIVESRNAYDTEIKDKQKTMDKMIESIESNGGDIPKIILSRIRSIETEIDELSNKRDLADIEVTRMNIYVEAEKAISRDDIDELLSSEEGRIRFNVLLKESQVEIRVLKRFDDSKPFEGQDFKDEHKMSEVIINNKTKGFGINYYFDRKHAILAGGYYYFYTKKYIGTWNSELTLPLGSRADFSSRDDDTQ

SEQ ID NO: 27373 - protein, 566 aa, synthetic construct
MHRSTPVYAYIRMSTVEQAKGDSERRQLGQIERFLQENDGELVEPVFLDRLSSFNGKNIKKGAIKDFLERVKNGQIEKGSVLVIESFDRISRQGGYLAHAVILDIIKNGVDIATLSPYKRYSINSENQFIEGIEIQTLLYRAHEESRTKSDRITRQHQARREKAKDKSVVYGSLPFWLIRTKDWIEFKEPEASDVKTCLSLLKTYGMYTATAKINEQRKSSKIFSKETVSHLLNRSAVCGDLQTHRIEYDEHGNKIRVQGEVIHDYYPALISRSEFEELRAEIQNRRTTKSTGRVSGFKNIFRNAMTCGCCFSPMRLAHMKWKNGGKKYLVCTKSETNQCIEKGRLWFDYDDVERVFFNEVNLSILKKSLTQKTKVDDAEIERLRSNFLKIEKQKSNILNAIEMGTVTKTLVNRLGELEKDSDETQKRIDELKAENALKRSQNEAEIFDYEQLDAALKDEEQRAIINKILRTNQAEISISKGGDGCDFVIEISINDKLETEISYHKQDDFIDRVEHQLPHNQTTDLVVHEDHTDPYAEENDGQVFRMFDSASMPIIEINQHKKTTD

SEQ ID NO: 27374 - protein, 566 aa, synthetic construct
MHRSTPVYAYIRMSTVEQAKGDSERRQLGQIERFLQENNGELVEPVFLDRLSSFNGKNIKKGAIKDFLDRVKKGEIEKGSVLVIESFDRISRQGGYLAHAVILDIIKNGVDIATLSPYKRYSINSENQFIEGIEIQTLLYRAHEESRTKSDRITRQHQARREKAKDKNVVYGSLPFWLIRTADWIEFKEPEATDVKLCLSLLKTYGMYTATAKINEQRKSSKIFSKETVSHLLNRSAVCGDLQTHRIEYDEAGNKIRVQGEVIHDYYPALISRAEFEELRAEIQSRRTTKSTGRVSGFKNIFRNVMTCSYCFAPMRLSHMKWKKGEKKYLVCTKSETNQCIDKGRLWYDYDDVERVFFNEVNLSILTKSLAQKTKIDDAEIEKLRSNLLKAEKQKSNILNAIELGTVSKSLVNRLEELEKDSDEIQKSIDELKAENALKRSQNETAIFDYEQLDTALNDEEQRAVINKILRTNQAEISILKGEIGCDFIIEISVGDRLETEISYHKQDDFINRYEHDLPENQTSDLVIHEDQTDPYAEENEGQVFEMFDSASMPIIEINQHNKKPD

SEQ ID NO: 27375 - protein, 552 aa, synthetic construct
MSKAYAYVRYSRAIQGTGDSENRQLTALELFETSTGTKIVEVVYDKGKSAFRGDNARSGNFKEMLDRMHSGAIRQGDYLVVESIDRITRQRVLDGVELLQGILKKGINIYTTVDKKTYSYNDPSRDFENLLMISLIAKRANEESETKSDRLLSAWKARKTKAENGEVIIKKGKSIPYGLRVVNDKFVIHEEEQKEIKKLFELLLKFGMNTALIKINETSNKKWSNGSLNKIIKHKTVIGCMTTHRIEYTADGKAKKILTGFIENYYPNIIKPSLFYKVIDVMSKRKQKNWSGRRAEQDFNIFKHCIFCSECGGKLYYDHRGSRYKDKIYPFFKCDNARIQKHICAAGNIRFEYVFGSLLECINMANRLANDFPKGFNGVTTQAIFLNSRVENLLASSDTSQDIEFENKQNELTSCRTKLSSLNAILTGADFKLPQVMLKEISNLEVRIEKLKIELELLATSVEVESLDIENSQSIIDLFMTDEGRAKLNTFFKRHEISFFVSHDKSTKQTNFEMRNLKGERVTRAIKTYPLKNILGKFGLGDLQTMFDLSVN

SEQ ID NO: 27376 - protein, 546 aa, synthetic construct
MARLISYLRMSTSEQLKGFSLERQRKLIADFALRYGLSLDESHSIEDIGRSSFSDDAEQRQLARFFTDLDAGKFSPGDVFALENIDRLTRRGPIDAILKVNAIISKGLKLAIISNNEQKIIEDVNDVFTIINLSIDAARSHGESKNKSDKGLSNWEEKRKLAASHGVAMTAQAPAWLDTETFYLMDETKGKQIKRRRYVLNPEKAETVRLIFELFQNGNGSLKIKNILNERNIPTFKGAEYWEPSIISKILRNLATFGFYQPQKQGIGKRDLIPAGDPIHDYFPAIVSVETFEQCQRITAANTTRKGRKGKLFTNLFTGLLKCSICGGPVHLLNSGIDKRAKVPKSTNYLVCKKAKFTKECLLTRWRYDDFEAVMLKTIQEINLADVLNENNPLEQLIKQIRAIETKIEKNQKLLENFQKSFVETGDLPAFMIEAAKNAETANKALEIERTELHAQISQLNVYNTNIDNAIEELKDNGTYETRAKINLVLHEIINSMHIHFFNTTVRIEFKNGITRQMMKDAGVYDYNMDEMNKIMYAAAKEYTPK

SEQ ID NO: 27377 - protein, 566 aa, synthetic construct
MHRSTPVYAYIRMSTVEQAKGDSERRQLGQIERFLQENNGELVEPVFLDRLSSFNGKNIKKGAIKDFLDRVKKGEIEKGSILVIESFDRISRQGGYIAHSVILDIINNGVDIATLSPYKRYSIDSENQFIENIEIQTLLYRAHEESRTKSDRITRQHQNRREKAKDKKVVYGSLPFWLERTPDWIEFREPEASDVKLCLSLLKTYGMYTATAKINEQRKSDKVFSKETVSHLLNRSSVCGDLQTHRIEYDEHGNKIRVPGEVIHDYYPALISRSEFEELRAEIQNRRTTKSTGRVSGFKNIFRNVMTCTYCFSPMRLAHMKWKSGGKKYLVCTKSETNQCIEKGRLWYDYDDVERVFFNEINLSILKKSLTQKTKIDDAEIEKLRSNLIKTEDQKTNILNAIEMGTVSKTLVNRLEELEKNSDEIQKRIYELKAENALKRSQNEAEIFDYGQLDAALKNEEQRAIINKILRTNQADISISKGEEGCDFIIEISIDDRLETEISYHKQDDFINRVEHDLPINQTSDLVIHEDHTDPYADEIEGQIFEVFDSASMPIIEINQHNKKSD

SEQ ID NO: 27378 - protein, 532 aa, synthetic construct
MTNVNPLPRAFSEVFQGEDTINVYSYIRFSSKSQKLGFSEMRQLEQLNRFFEQYPQSRQVERYEDLGVSAFKGKNLKSGQLAKFVERIKSKEILPNALLLVESFDRISRVGGYDALELIISIIQADCSIYTLFDNRLYSRRKKDSSADISLIQNILERANDESRSKSERISDAKARNLIKGENGGVITRRCPFWISFADGKFILNEHANAVKRITELCFDMGFQSIAKELNKENHPRKYTDSIVGKVLHKHAIYGSFLAMKLDENGDRTVFNKEIKNYYPAVISEPEFHRISAKLKERQDPSLAGRKAQEFRNILRGLVFCKCGSTFRYHAQKSLYVDLVCHASTVGQCSYANPGKGVRHRYVLVESIFLAYQSLIPFHQIIVKTDDIKALEKEHEEISGLIILKEKALGNNFAILEQSSESAQKYILGRIDEVSQELDKLKEDEHRLNLKIISMHLASKSDFNVMEIYRLLLTEKGRIKINNFLHSQKIKLVINPIKKKFFELDIYHADKHLDTIDVTPDGYTARYKPHLK

SEQ ID NO: 27379 - protein, 499 aa, synthetic construct
MELDATLTLKDEGLSAYHQRHVTQGALGVFLRAIEDGRIASGSVLVVEGLDRLSRAEPIQAQAQLAQIINAGITVVTASDGREYNRASLKAQPMDLVYSLLVMIRAHEESDTKSKRVKAAIRRQCEGWMSGSFRGLIRNGKDPQWLRWSEQGWELVPERVNAVRRALELYQQGLGAGRAAKVMHEEGYELSSWGVSGQQVYRLIKLPALRGAKRLAVDGEAYMLEEYYPRILSDAEWAELQHLAGQRHRRRGAGEIPGIITGIGLTYCGYCGTALVAQNIMHRRREDGSLSDGHRRLHCTSYSKRGGCSASGSCSVVPIERALLNFCSDQLNLQRLLQVGDDGQGIRQQLVVARAAVEKITKQLGKITEALLDDDSGAAPIAFVRKARELEAQQVIAEQKVVQLEYGLAAVSGTSQPAQAERWEELSELVCTDDYTAREKVRQLVMDTFERIVIYMRGLDPDGRNGQFIDVQLLSRTGQHRLIQINRRSGEWVSSEDWD

SEQ ID NO: 27380 - protein, 533 aa, synthetic construct
MKRAVIYARYSTDLQNDQSVEDQIRLCKAHAERLGLQVVQEYFDRAKSGASMFGRPGLSSLMQAAEMGAFDVLVSEAPDRISRDIADLATIHKILTFRGIEMNCVNGGRMDTVQIGMHGVIGQMQREEGAKKVKRGMVGVVRSGRNAGGKAYGYRPVLGKKGELEIVEEEATTVRRIFELYVTGFAPRTIAATLNAEGIPAPRGLRWNGSTINGNGQRGNGILRNPIYAGKLIWNRVHMVKDPSTGRRISRINPESEYEEIDAPHLRIVDQSLFDAVQARKEATGGPRPRDVPKSKRLLSGLLRCGCCGGGMALMGVDRSGPRIQCSTYRESRSCTNGARYYIEKIERQVLDSLRIQFADTSVIEEYVKAYREERRRIEAQAHRNRSASEKALADAKAGITRIVERIAKGLIEDDEALALLLPLRQERDRLERELAASEAPSNVIELHPQAVKRFRENVEQLADVVATKTGTVDVGAVSAFRQLVAAVIVHPREKGEPYTIQIKGYLSSLIDSTLSAISLVAEEGFEPPTQGL

SEQ ID NO: 27381 - protein, 452 aa, synthetic construct
MKAAIYIRVSTQEQVENYSIQAQTEKLTALCRSKDWDVYDIFIDGGYSGSNMNRPALNEMLSKLHEIDAVVVYRLDRLSRSQRDTITLIEEYFLKNNVEFVSLSETLDTSSPFGRAMIGILSVFAQLERETIRDRMVMGKIKRIEAGLPLTTAKGRTFGYDVIDTKLYINEEEAKQLQLIYDIFEEEQSITFLQKRLKKLGFKVRTYNRYNNWLTNDLYCGYVSYKDKVHVKGIHEPIISEEQFYRVQEIFTRMGKNPNMNRDSASLLNNLVVCSKCGLGFVHRRKDTMSRGKKYHYRYYSCKTYKHTHELEKCGNKIWRADKLEELIIDRVNNYSFASRNIDKEDELDSLNEKLKIEHTKKKRLFDLYISGSYEVSELDAMMSDIDAQINYYEAQIEANEELKKNKKIQENLADLATVDFDSLEFREKQLYLKSLINKIYIDGEQVTIEWL

SEQ ID NO: 27382 - protein, 452 aa, synthetic construct
MKAAIYIRVSTQEQVENYSIQAQTEKLTALCRSKDWDVYDTFIDGGYSGSNMNRPALNEMLSKLHEIDAVVVYRLDRLSRSQKDTITLIEEYFLKNNVEFVSLSETLDTSSPFGRAMIGILSVFAQLERETIRDRMVMGKIKRVESGLPLTTAKGRTFGYDVVDTKLYVNKEEAQHLQLIYDIFEEEKSITFLQKRLKKLGFKVKSYSSYNKWLMNDLYIGYVSYGDKVHVKGVHEAIISEEQFYRVQEIFSRIGKNPNMNKESSSLLNNLIVCEKCGLGYVHRAKDTVSRGKKYHYRYYSCKTYKHTHELEKCGNKIWRADKLEEIIISRVKNYSFATRNLDKEDELDSITEKLKTEHSKKKRLFDLYINGTYEVAELDKMMADIDAQINYYNSQIEANKELKRNKKVQESLAELATVDFDSLEFREKQIYLKSIINKIYIDGEQVTIEWI

SEQ ID NO: 27383 - protein, 460 aa, synthetic construct
MKCAIYRRVSTDEQAEKGFSLENQLLRLQAFAESQGWEVVHDYMDDGYSGKNMNRPQIKRMLHDLKSNKFDIVLVYRLDRFTRSVKDLNALLEVFKEHEVDFKSATESIDTATATGRMILNMMVSTAQWERETISERVKDVVRKKKELGLISTGYPPYGYAMNDGVISQVPHEVEIVKFVFEKAKVYGFQKISKLLNEQGLVTRNGTKWLISTASRIAHNPFYSGEMRYKRDGETSTVPINVEGYEPVITKEEHKEVLKAIKKRNRNQTRAKSNEVYPFSGIVLCPECGHPMKGTRVSSRGYYYKYYRCDRASDHFCNGKLIRYEKLDKAFAEYIHDAFQIDRIEIKEETNTKDIQREIKRCKSKIERLKDLYVDGDISKKKYKNDVGELNEKIYDLEQKLLSAENKISHDHIRENLKRLSEFWGLIDDNTKMESIRGVFDTITVEIQGNDVVITDHTLL

SEQ ID NO: 27384 - protein, 531 aa, synthetic construct
MSIAYSYIRFSSAQQAQGDSLRRQTQLAQRYCEENNLTLSDTNFQDLGVSAFHSDNVKEDSGLGQFLEALEQGAIPEGSYLLVESLDRLSRAKVQTALIQMLRITQLGVKIVTLMDNRLYDKDLDTTDLIISLTIMERAHNESKTKSERIKAAWTNKRQNPNTTNRHSSAPFWLTLNSDKRTYTINEEYAELVRKIYQLSIDGWGVIKIVRYLNQNGITAPKGASWATTTVNRILNSKAALGHYEPTQNRKSLNTLIEDYYPPIIDEKTYYLSQQRKFERSKPEAAGRKTEYPNPLNQIAKCKKCGSSMYYENKSQSLKYLTCREFKKKNCTNKPIRMELIYRFIYEVFNSPMYHQQHAKLVDKSKQKDVNKLTELEGRYEVERKAYEGLLEAFSSFSDPIALKELQRRSTLITGLYKQIEEAKAKKTVEQARTAHINFTEALKLTTKALYSPLVEERGEELSPDELFTTRVRLNRILKQAFNHLSIFHCNESKRITIETEITEDYPIDLRYETNQKAIKEPMKNRIWSVY

SEQ ID NO: 27385 - protein, 547 aa, synthetic construct
MKLLVTYIRWSTKEQDSGDSLRRQTNLIDAFYSKHKNDYYLLPAHRYVDKGKSGFHQQHKNQGSDFRRMFENVMSGAIPEGSLIVVENFDRFSRADIDTAIDDVRQILRKGVSILTLGDGELYDKSALTDPVKLIKHIIIAERAHQESLVKQKRIAQVWNHKTQLARELKKPMGKQAPGWLELSEDGSHYIVDEDKASLVNIIYDKRLSGMSMFAICKWLNEQGYPTINQRKVRISKTKKPDGNWSALSVKHILTSRSVLGYLPAKISTEDRKTVLREEIEGFYPQIVTDSKFYAVQQLLEETGKGKTSSGEHWLYVNILKGLIRCKCGLVMTPTGIRKPVYQGTYRCNGNKESRCSYGTVSRKLLDTQLCSRLFSKLSQLHDEATDTAKLDELQRRLNTVDGELEKLTETLIQLPNITQIQEALRVKQEEKDELIVQLSREKARVKSVSSLDLSGLDMESVEGRTEAQIIIKRLVKEIVVSGNEKLVDIYLHNGNMIRGFPLDGKDDHTLTLEEATDEMQPLDDMLIFGEPVTRIYPAGDMEEVDA

SEQ ID NO: 27386 - protein, 526 aa, synthetic construct
MYRKFIMRTAYAYIRFSSEKQSAGDSVRRQQSLIDSWVKNNPDYILSQKTYKDEGLSAFTGKHAAGDLGRLMNDISNGSITAGDVILIESLDRLSRENISTATDRLKAILIHGVNVVTLTDQKQYTPESLNSPMDLIMSILTAQRAHEESQSKSKRMREVWAKKRTEAEESGKVITKSCPRWLTVNSDRTGFEPIPEHVESIRLMFEMRLSGKGFAGIAQALNESGRLTLTGRSKGWNQSSVQQLLSNKALIGYKIPSRKAVVNYIEIPDYFPSVIPLEQFQQVQLIGADKQGQRAANDRPMNVNLFRGVMKCAECGATVIVSGVDDKRAGYYSCSFRRLGRCNTSKPMNRGMVDEALIKGLLYSLDRLTTQGQGENPLMKLEAKRADLTERSQKLLAALEIADDVSAIATRLKAVTDEIRAIETQIKTCRDLEQVHTVQSVQGMDLTVKSQREEVQLLVKKTFREISLDGIRKTVNVYLHNGLTLLNVPVNQIVDAGEWIELLPVIGGDTVDFKDISFKAPRYLD

SEQ ID NO: 27387 - protein, 555 aa, synthetic construct
MCVAIGYMRYSSKLQGGGSTIHRQKSLINKWVEDQKTHHGKVYEVKFYTDKGLSGWTGENLLAGALGRLIEEVETGGYPEGTPIILESIDRLSRQGHEEATAILRRLTSTGCVVHSILDRQVIHRSDLKTFIGAMQIIAVAERGREESDIKSERVSSSKKRNYELAKLGKKLVTKNLPGWIYLDQKGKMQIDPVKQKLVQEIFEMRLAGHTYQGIAEAMTNRGEPVLNERKGAQRWLPNSIRTLLHSRSVIGVLPASKVNEEYKEIEDYFPSAITKDLFYAVNDLNVPAVRSREKKQYPETVFLFKGLVKCRYCKGNVFMNGAKPGYWGRIRCIGHHDKVCDAPSLPRYDFEQSLITRIFPLLKSMDVRTEKNPVAVLQAKIDHLTNILEGYYDDLEEIPREDKPRRKTINERISKRANEKEEYERQLVVVRRKMEVRIANTLSDLNYDDYSDRLKMQLVISRNIERIVLDSLFDKVHIKLVNGNALMNFPLYGDVDGSRLVITAKENTGITDVERILGLDDAMPTVYNLAPSSGEFMDDREFPEVEPDYPNEEQ

SEQ ID NO: 27388 - protein, 559 aa, synthetic construct
MKTKLYSYIRFSSMRQNDGSSYERQIRMAREVAAKYDLELVNDYQDLGVSAFKGANSKTGALSRFLDAIGRSVPVGSWLFIENLDRLSRADIVSAQELFLSIIRRGITIVTGMDNKIYSLDTVTANPMDLMFSILLFIRGNEESQTKRNRTNSSALIKIKAHQENPQNPAVAIEEVGKNMWWTDTTSGYVCPDPVFFPIVQEVVELRRNGRSTAEILDHLNATYTPPPAASHKRHSNWSRAMIERLFHTRALIGIKEISVDGVKYELKDYYPRVLDDAEFYHLKKSIGVRACNYGDKEEVKPIPLLSGVNLLKCDHCGSAMVKVKGTNRRPNQYRYSCDAMRSSRIECVHTNWSFRGDQLEKAVLQLLADKIWIAEDKANPVPALKVQIDEISRKIDNLITLSAMTGATKELADQITTLNSERETLYNQIKMAEEEMYSVDSQGWEKLAEFDLEDVYNEDRIKVRFKIKQALKRIGCSRIDKYKNLFVLEYIDGKTQRVVIENSRGPRKGRIFVDLKTINDRQILESNGLVLHPCLDMLTDKNWKPEEEIPGPLQEFGI

SEQ ID NO: 27389 - protein, 405 aa, synthetic construct
MKIIQKIEPTKPKINKRKLAAAYARVSVDKGRTMHSLSAQVSYYSNLIQKNPEWEYSGVYSDGGISGTSTDARSEFQRLIKDAEDGKVDIILTKSISRFARNTVDLLETVRKLKAIDVEVRFEKEKINSLSGDGELMLSILASFAQEESRSISNNIKWSIQKRFKEGRINGRFNIYGYRWEGQDLVIEPKEAEVVRLIYANYMRGLSAEYTTRQLNKMGVTAMKGGPFKATSVRKILVNITYTGNLLLQKEYTSDPITGKSKMNKGELPQYFVENHHEAIIPMQEWQSVQDEKARRRKLGAHANRSIKTTCFTSKIKCGNCGKSFRRSGKSQGKNKEVYYIWTCRNKSEKGVKVCDARSIPEKMLKKACATALGLEEFEEQIFTDKVEQVIPLEGDSSIQTFLGL

SEQ ID NO: 27390 - protein, 516 aa, synthetic construct
MTGKKVTVIPMKPKKWAAENTEEKPKLKVAAYCRVSTEMEEQASSYEAQVQHYTDYIQRNPDWALAGIFADEGISGTGTKKRGGFNRMIKACNNGEVEYIITKSISRFARNTVDCLQYIRQLKDLKIAVFFEKENINTMDAKGEVLLTIMASLAQQESQSLSQNTKMGVQYRFQQGQLRINHNHFLGYTKDEDGNLVIEPKEAEAVKRIFREYLEGSSLQEIANGLMADGILTGGKRKLWRGEGVRLILRNEKYMGDALLQKTFTVDFLTKKRVKNDGSYAQQYYVENSHPAIIPKDIFTQAQQELDRRKSMKNKNSQCFSGKYALTGITICGDCGNVYRRVHWKNRGTVWRCKSRVDKREHNCNGRTIYEKDLHQGILQAINETLIDRDIFLQQLTENINSVLTDGLTEQLAGLDEQLKDLESEIISVAIGGQGYDELASQIFSLRDERDAIAKEIAANANLQQRVDEMEVFVKEHDVITEYSEVLVRRLIEKVTIFEKNIVVDFKSGVSMAVEI

SEQ ID NO: 27391 - protein, 516 aa, synthetic construct
MKTIHKLERPKLPETPKLKVAAYARVSTASDEQLSSLKTQITHYENYIQKNYQWEYVGVYYDEGISGTKTDKRDGLHRLINDAEHGKIDLILTKSISRFSRNTVDCLNLVRKLTEIGVTMIFEKENINTSDMESELLLSILSSLAESESYSHSENMKWANRKRMAKGNYKGVPPYGYCRKGIDFHLVPDEAKVVEQIFQWTLNGLSMHQIASKLNVANITTKRGVKWQASGVSIILHNIVYTGTMIFQRYFNDEQFKKRKNNGELPMYRIDNNHPAIVSMEEYERVQEIIRIRATSKGNTKDGKNTNRYAFSKKVLCDKCGNTYKRIHTYWKGNTRKVQWGCKGHLKDKNSCDALPITDEKLKIAYLTMLNKLIFAHKVVLEPLLKQQSNAAELERASDEMSNKASEIDEKLEVLASLNASGIVSTKTSFEEQNKLQLELKNLQEEQQKIINSANGKSTQRIELEELYRFTKRSNMLTEWEELLFSRFADQVIVYNRQEVGFKLKCGLILKERLPE

SEQ ID NO: 27392 - protein, 411 aa, synthetic construct
MRTVRRIQPIKSPCKPRFKVAAYARVSDSRLHHSLSTQISYYNRLIQAHPDWELVGIYYDEGISGKEQSNRQGFLNLIKDCEDGKIDRIITKSIARFGRNTVELLTTVRQLRLKNIGVTFEKENIDSLSSEGELMLTLLASVAQEESQNLSENIKWRIQKKFEKGIPHTPQDMYGYRWDGEQYQIEPNEAKVIRKVFKWYLEGDSVQQIVDKLNQEQVLTRLGNPFTVASIREFFKQEAYFGRLVLQKTYRESFSRNPKRNKGQRNKYIIENAHEPIVTKEYFELVLHEKERRYQLMHQESHLKEGIFRDKISCSECGCLMIVKVDSKQVNKTVRYYCRTRNRFGASSCSSRTLGEKRLLASFKSKLGIVPDKEWVENNIKHIEYDFGHRIIRVTPVKGRKYPIEIREGRY

SEQ ID NO: 27393 - protein, 520 aa, synthetic construct
MKKVITIQATPSIIRSSSDDFSLKKRRVAGYARVSTDHEDQATSYESQMRYYSEYINGRDDWVFVKMYSDEGISGTNTKLRTGFKAMVEDALNGKIDLIITKSVSRFARNTVDSLTTVRQLKEVGVEIYFEKENIWTLDSKGELLITIMSSLAQEESRSISENVTWGLRKQFAEGKVHFPYTNVLGFKAGEDGAIVVDQDEAKTVRYIFQQALIGKSPYHIAKDLTEQGIPSPSGKSRWNATTIKRMLRNEKYKGDALLQKTFTIDFLTKKKNINRGELPQYYVENNHEAIVDRETFDAVQQVLDNKGRKSSTTIFSSKLICGDCGHFFGSKVWHSTSKYRRVIYQCNEKYSGDKRCTTPHVTEEDIKGWFIQAINQLITNKSEIISNLQVLLELKEKPDLNRQICEVETEIKVVTQMVENLVRENAVKPQDQDIYRMEYVSLSDRYDKLIRKMETMELEQMNTIQQLGEITKFIETLNHQDRLVTEFNELLWESTVDKVEIREEKFVTFTFKNGIELNI

SEQ ID NO: 27394 - protein, 486 aa, synthetic construct
MNKVAIYVRVSTTMQAEEGYSIDEQIDKLTSYCKIKDWTVYDIYKDGGFSGGNIERPAMERLISDAKRKRFDTVLVYKLDRLSRSQKDTLYLIEEIFGKNDISFLSLNESFDTSTPFGKAMIGILSVFAQLEREQIKERMLLGKIGRAKSGKSMMVSKVSFGYTYDKLKGELIVNQAEALVVRKIFDEYLGGRSLIKLRDYLNSNGIYRGDKYWNYRGLLLILSNPVYIGMIRYRGEIYPGNHQPIIDTEVFNKTQEEIKKRQIEALEFSNNPRPFRAKYMLSGLAKCGYCGTPLKIILGYKRKDGSRSMRYQCINRFPRNTKGITIYNDNKKCDSGFYEKADIEEFVIAQIRGLQLNSYKLDNMFDKQPIIDVEGIEKQITSLDNKLKRLNDLYLNDMIELDDLKKQTQSLRKQKTMLEDELINNPAIMQDKNKNHFKEILGTKDITTLDYETQKSIVNNLVNKVFVKAGHIKIEWKIPFKKCEF

SEQ ID NO: 27395 - protein, 522 aa, synthetic construct
MKRAIIYVRVSTTRQADEGISIDAQTDQCKKKAKELGASVLQIFRDEGITGTSAVKRQAFQRAIHYCAVNDVDYFIVWSTSRFARNKLDAASYKLLLRESGTRLVYASMNIDSDTDEGWFTDSIMEIMDEQVSRQISRDTRRAMLKNAEEGWFNGGRAPFGYQITSQGKRRKLVPNDAEKTLVQEAFRRFAAGEGAIAIARSFTGRGYTRRGAEWQAASLSHMLKNRVYIGQTVYNKRSGNKPNPPEEWIIRQTHEPLVSEKDFEAVQKRYRPDYKQTGSPSSRFLFTGLLRCGHCGKAMSIETATSKTKRRYNYYNCSGFKKGCNCISRRISAEKLDDYLLNIVVDKLLTQEVVSDFIGEAYRKYVEKRTNNAEQHKLLQQELTELRRRRNTLFELVESGLSGSDSRSLLERVAGYDEREQTLLIELDKLAGAPDVDAIPEIDVDSALRTLKTILLNTVNEKKLRILLQSFIMKIDINPTEVVIHYNPERIINDSIGVHSTESWHAQGESNPRYRRERAMS

SEQ ID NO: 27396 - protein, 469 aa, synthetic construct
MKRAALYIRVSTMEQAKEGYSIPAQTSKLKAYAEAKDYYVVNTYTDPGYSGAKLDRPGLNQLISDVKAKKIDIVIVYKLDRLSRSQKNTLYLIEDIFQKHSVDFISMLESFDTSTPFGRATIGMLSVFAQLERDTITERMHMGRTERAKQGYYHGSGVVPLGYDYINGELIINEYEASIVREIFDLYVNHGKGQQYITKKMVKKYPDKVKTLTIIKYALQNPLYIGKISWDGNVYQGNHIPLISRDLFNQAQLIFKEKAKLGSTNHNQKSLLAGFIHCGKCGAKVFREVGGGGSYKGKRYNYAYYTCRSVKKMMPSLVKDWDCNQKRLRCKDVEDKVIAAVKNLDFKKIKMDIENKKVNTVDQINELNKAIKKKQVEKSKLIDLYQFGNIEVETLNNRIDSINIVLDELKNDLNSLKIKDDKNEKILLLEEAKNFDWENTGTELKIDLIRRLISDVTLKNEDVIINFIF

SEQ ID NO: 27397 - protein, 522 aa, synthetic construct
MKRTFDHIKHVAIYLRISQEKRGENVETLENHRQILCDFCKENGYTYEEYGEVISGGKSEIEQRKELQRLLEDIEKFDAILCFELTRLSRNGLISQTVKQYCIDYDKPILTPYQSYDLANSETDRLLYDVGSMISSHEHGTIGKRSKANKKQMSKAGLHVSGNVPFGYRRNKETKKLEIYEEEAKVVRYIFKLHSEGLGSFKIRDILNAEGYKSATGKAFELPTIKRIIKNPTYKGTIVFNDRKKVKKNGKFVYEPVETIQVDNAHPAIIPPDEWDRANRERISRAKQAALIREKPASTTGTTMLKDLVYCGVCGRKMRIFFDDKSSTGYVIQRCYHLYNGEKCPNRGIKLELVEKEVTKALPNFKSLLEKSVQRLQQEKEAGVETDIKRKIKQQERKLNDLNEQQDKLIDLALKGIFNEEEIRNKKQELIDEIKYTESAIVDLKEKIGNIDLNDHINSLMNIIELIEKLPNMEPDEVNQSLKTFISKIVYTRVLPPELLKKSTRNKQRKEYPFEIEIEFIE

SEQ ID NO: 27398 - protein, 529 aa, synthetic construct
MKKYRHAVGYLRISSDSQKDNTSIENQKDSIKYFCMQRGIYIEKFFVETYTGTKLNRPQFDKAIKYLKENKGNIDLFLTKKADRFTRGQRVGLTAFDEIKNLGVEVNFVDEWIEDINSPQGQMLMQLKFSFAEYERAVIYERTRAEEIKALLSGRYTKTPPLGYSRGVLPIGNIHAGKKGIFPNDKAPLVKELFEDYATNLYTQEALVKKYKLKGLKLSKSSVSVILDNILYTGIIDLKKHKIAPYNQIEGCHEPIISAELFNKVQMLKNGRNRAIKEIRTQNPDFPLNRFLYCSCCGSPMRGSTGNNGSKKKVTRYYSYYRCANNCGEKYKPEEIHPIFLNALQMAKPSEEVVELFRMMLIDDYEKNMSEHTTLLSAIESKIKTLKDEQQNASRLVVRGTLTESAYLDLVEVHNRELMELESEKDKYGEFQKDLDKYVSFGLTLLTNIDVFYKNAPIGVKTKLIGSYFNDKLYFEKNKFRTLPFNDTIALLCRYNKGFKGLENKKGGDFKNTSCLVAKTGIEPVTSGL

SEQ ID NO: 27399 - protein, 563 aa, synthetic construct
MHKRLIISVMEKSKRVVGYARVSTEAQDITRQVELITAYCTERNYRLIKIIQEKISGARKDRKSINELLEVDDTVADMIIVSELSRLSREDDILSVLSTINELLKQGVDILFLDKQDRIYKAGTVLSLYDIITLSVEAKASADERYKIAGRMQTGLRSKLAEFTNMFTGGTVPFGYKVIHNPDYKLNLTPKNLLVVDAQEAEAVKYLFQQLIDGNTIRQTVRVYNKLYPYKLSYSGICRIIRNPKYKGEIYRRGKLYGQISELQIISPEDFDRANKQMRENELFQSNAPKYYNPLKGLIFCPCGCSLYMKPNHNSYLIYRCSSSYNDKQRCENFGIKCSYVLSAVWTCVKATLHTEEYLRFNSRRSQELQELNAQIRETITQKVNIADEQKAQSAALIDKIKRLTNSVLIGELEAEYNLLQNKLKQTEQEITELNGRIAENDAEIQKNVEQKDFSQMEQSALYKEKLQKVVYHSLSAMRGILEIIFKNGMIRYVLIKKHRNGGVFLLPEFWTVDISRAVIIVPTHPSVDPEHPYTLLPTIPREYTFDAIITERDMDEYRITVS

SEQ ID NO: 27400 - protein, 509 aa, synthetic construct
MNAVIYARYSSDSQREESIEGQIRECTAFAEKNGITILRHYIDRAFSAKTDNRPEFQAMIKDSSKKLFNMIIVWKLDRFARNRYDSARYKAQLKKNGVKVVSATETISDGAEGILLESMLEGMAEYYSADLAEKVVRGMTENALKCKYNGGTLPLGYVIDSEQYFQVDSLTAPFVLEAFKQYDEGATMTQIRDWLNEKGIRNTRGQEMTYNSVQHMLNNRRYIGEYSYREVITPNGIPAIVPKDLFDRVQKKMAKNKKAPARHKAEDDYLLTTKLFCGYCGAYLCGESGTSRTGIVHHYYKCVSVKKKRVECHKKPVKKDWIEDMVVSETMNVVMDDEAIEAIVSMLMELQDRESTSLPLYEKELKDTEAAIENMLNAIQQGIFNKSTKARLDELEATKDELETRIACEKLIKPKLTAEQMTFWLHRFRKLDVSKKEHRQMLIDTFVNAIFLYDDKMLLTFNFKDGTKTITFADVTSALERADSGSDLDCSGAPFHNIGISLTVITYIS

SEQ ID NO: 27401 - protein, 508 aa, synthetic construct
MKKAIAYMRFSSPGQMSGDSLNRQRRLIAEWLKVNSDYYLDTITYEDLGLSAFKGKHAQSGAFSEFLDAIEHGYILPGTTLLVESLDRLSREKVGEAIERLKLILNHGIDVITLCDNTVYNIDSLNEPYSLIKAILIAQRANEESEIKSSRVKLSWKKKRQDALESGTIMTASCPRWLSLDDKRTAFVPDPDRVKIIELIFKLRMERRSLNAIAKYLNDHAVKNFSGKESAWGPSVIEKLLANKALIGICVPSYRARGKGISEIAGYYPRVISDDLFYAVQEIRLAPFGISNSSKNPMLINLLRTVMKCEACGNTMIVHAVSGSLHGYYVCPMRRLHRCDRPSIKRDLVDYNIINELLFNCSKIQPVENKKDANETLELKIIELQMKINNLIVALSVAPEVTAIAEKIRLLDKELRRASVSLKTLKSKGVNSFSDFYAIDLTSKNGRELCRTLAYKTFEKIIINTDNKTCDIYFMNGIVFKHYPLMKVISAQQAISALKYMVDGEIYF

SEQ ID NO: 27402 - protein, 556 aa, synthetic construct
MDNRKVLYPYIRFSKDEQKHGTSYERQMDKIEKYAADNDFVIDDTLNLKDLGLSAFKGKHKDKGALGGSIKAIEKKSIPVDGSSYLCIEQFDRLSREDVDTAYQLFRSILKANVNIITLMDKRIYTKESLNDMMSIIYSIMLMSQANVESQKKSERITASYRTKLDKVKSGENILFAARYPEWIDNQGSIKDRQFVLNDKAEIVRRIFQLYLDGVSMNGIARIFNDEGIAPFMRTKNSINQWSSGNVSSILRNRCVVGDLCVSRTGDIIKGYYPPVISVDDFEATEGLRDKKRTLKTAGKPSINVFTGKVFCVECGRKFYFEKESFTYKGQKNIYHFLKCSGKRNNGGCHSLNIKYEDFLDATKAPLKMKMKKDPKKVGEIEDHISKIRGVVKELDGELAQLDLMLDSGEINATIYAKTASKLEDKLVVERKRIASYKQKIAQMNNDLDFDSFDIHDPKSINKVKKYINDNYAAFIVSSYNKTILSLSHTGGVIITPFKHKKSLAKDSESVKDFYTLQADILDQYKRGEMDNKFTEILEATNFWGIETPETDYSFE

SEQ ID NO: 27403 - protein, 616 aa, synthetic construct
MRNYEKITALYERLSRDDELQGESNSIINQKKILEEYAKKNHLENIVHFTDDGISGTQFDRPGFMEMMNGVNQGNIGCIIVKDMSRLGRDYLKVGQCMEILRQKGVRLIAINDNVDSFYKDDDFTPFRNIMNEWYARDTSRKIKSTFKEKGESGKHTGSSPPYGYIKDKDDKNQWIIDEKAAEVVRRIFHLTMDGKGPYAIARILEADKIDIPAYHQQKLGYGLHQSKVFEYPYRWCSSTIASILKKQEYLGHTVNFKTRKHFKDKKSTYVSEDKWLIFENTHDSIIDQETFDNVQRIRGNVKRYPDGWGEYHPLTGLMYCADCGSKMYVHRTNNYKNIPYYNCSAYTKVPCGTLCKSGHRIRAEVVLNLIQSTLQDIKKSLDEDNEAFLHSIQNEMEESEKMEMEKKKTRLTDSKNRLQELERLMCRIYEDMILEKIPNTRYEILNNQYETEQRELSKEIDGLEKAIKRYEKETDRAKKFIRLIERYDNFDELTPTIINEFVEKILVHERDRKGSQTANQKVEIYFNFIGNYEPPKEELSEEEMQKLREEEEKERERKDRLHQNYLKRKANGKQKEYEDRYKEQREKLKQEKLKTLKKSGIPLNEYKRIEKNYPA

SEQ ID NO: 27404 - protein, 530 aa, synthetic construct
MIAAIYSRKSKFTGKGESIENQIQLCMDYAKNLEINEFLVYEDEGFSGKSMDRPKFKEMLKDAKDKKFDYLICYRLDRISRNVSDFSTLIEDLNKLNISFVSIKEQFDTSTPMGRAMMYISSVFAQLERETIAERVRDNMYELARTGRWLGGMPPYGFISTQINYYDENMNQRKMYKLKVDEDTIETVKLIFDKYLELRSLSKLYKYMYENGIKGTRGGNLDPSALSLILKNPAYVKADKSVVDYLRKSNIDVMGDIDNIHGILTYAKNTDSPIAAVAKHKGVIDSDKWIEAQRLLNANKAKAPRAGTGAKALLSGLLKCSKCGSNMRITYKNSKSGTIYYYICGTKKSLGVSACDCRNIRSDKAESKVIDELKNKSIKSIMSSYKDSKLENSKNSKNIKTEINSINNQIKEKETYIDNLVMQLAKVTESSASTFIINKLESLNNDLSNLKSQLESLNTMSMENKQVDININMLIDNLNKFNKEIDTSDINKKRLLLSTVVDYMTWDSDTDTIKVNLIGINPSNTIASGK

SEQ ID NO: 27405 - protein, 510 aa, synthetic construct
MIKTCIYLRKSRSDEECEKQGEFETLSRHRSTLLKLAKEQNLDIIEIKEELVSGESISYRPKMIELLDEVKNGLYDSVLVMDIDRLGRGNMQDQGLILETFKKSNTKIITPRKTYDLNNEWDEEYSEFEAFMARKELKLINRRMQRGRVKSVEEGKFIASKPPYGYKFIFDESGKKSMIIDNDKAEVIKMIFDLYVNKHYGGVKISSHLNSLGLKTSTGRTWYPKVVRDILKNKTYAGYVVWNKVDRGKNNSRTRPVDEHIEAKGIHEPIIDESIFIEAQNLFKNSSIPSTKKNTSITNPLAGLIICSECGHKMIAQQSTYKNNELIKFLKCLNCGKNRGSKLSIVEKEIINELENWIASYQVSIKNLESPKNNNSNLESYYSIIKSLDCEYKTLLKQKENLHNLLEQDIYDVDTYLDRSKVLADKIDLNRDNLTQAKKDLKKEKESNFSISDILPQVENVLELYYQSNNMQERNDLLKEVIDYIEYSREPKKRLSKFNIKIYPRLRYNK

SEQ ID NO: 27406 - protein, 974 aa, synthetic construct
MSDKIRKYVLPNLPYLFVFWFFSKIGTAYRIAPGTDFGTKLMGMLDTFPKAFETYWPGLGGIDLLVGLAGAAGVYLLIQSKIRQAKKFRRDAEYGTARFGTKEDIKPFVDPKFQNNVILTGTEFLTMNTRPKIPANARNLNACVIGSSGSGKTRFWLTPQLLQAHSSYVVVDPKGGTLDQCGRFLQREKYRVRVFNSIDFSKSMHYNPLAYIKTESDVLKFVTALIANTKGDGKEGDEFWTKAETLLYCALVAYIVFEGPEEERNMNTLVEMINSMEVREDDETFKNAVDYMFDGLERRSPQHFAVRQYKKYKLASGVVCSKRLLNQAVGKSLRTHNLKPKKGAQVMRKNEKITALYERLSRDDFGKDDDQQRESNSISNQKAMLEEFAARQGFTNIVHFTDDGISGTCFDRPGFLAMMKEVEAGNVEYLCIKDMSRMGRDYLKVGQIMEILRQRGVRLIAINDGVDSARGDDDFTPFRNIMNEYYARDTSRKIRSTFQSKGKSGKRLTGTVIYGYLWNEARDQWLVDPEAADVVKRIFAMTIEGYGPYQIASKLKEEKVLIPSAYLAQHSEGVNKNKTFKDVYGWGSSTICNILEKREYLGHTINFKTRKHFKDKKSHYVPEDEWTIFENTHEPIIDQQTFDLVQKIRGNVRRYPDGWGEAAPLTGLLYCADCGGKMYVHRTNNGKRISQYTCSQYSKVPVGKLCKTQHRINEDVVLSLVSEMLKAIAEYAKHDRAEFVRVVQEAQSSQQTTEVRKQRTRLATAKQRVSELEVLLCKIYEDNILGKLSDSRYATLDAQYEKEQSELTAEISALEKAIRSYEKHEKDADRFIALIDKYENFDKLTIAMLNEFIEKILVHERDRKGSIQTTQEVEIYFNFVGRFVPPAFGEVELTPEELEEIRKREERKDRLHQNYLKRKASGAQKRYEDKIKKRKKAEIEAKKAAIRAEDIAKGVFVPVSSLPQREPMKGVQTA

SEQ ID NO: 27407 - protein, 492 aa, synthetic construct
MTAVIYARYSSDNQREESIEGQIRECTSYAEKNDITIVKHYIDRAISAKTDNRPQFQQMIKDSDKKLYDIVLVWKLDRFARNRYDSARYKTQLKKNGVKLMSATEIISEGPEGIILESVLEGYAEYYSADLAEKVVRGQTENILKGRCNGGRGTFGYTLDSERKFHIDPLASPFVVESFRKYRDGLTMKEIRDWLNENGIKNPVGGAFTYNSVEHMLKNRRYIGELKFRDVVVPDAIPPIVPLELFDDVQEKIAKNKKAPARRKAEDDYLLTTKLHCGCCGALMFGESGTSRTGEVHRYYKCATAKKHKGCKKKTVRKQWLEDLVVNQTMQLVRDDAAMESIIAKVMELQDRENTNLPLYEKQLRDAEAGIQNMLNAIQAGILTSSTKERLEQLEETKRELEARIAEEKLAKPKIKEEFIRFWLMRFRKLDMSLKDQRQALVDTFINSIYLYDDKVLITFNYKEGTQTITFEEAAEAASKGNGSDLGCFAAP

SEQ ID NO: 27408 - protein, 536 aa, synthetic construct
MTAVIYARYSSDNQREESIEGQIRECTAYAEKNDITIVKHYIDRAISAKTDNRPQFQQMIKDSDKKLFDIVLVWKLDRFARNRYDSARYKTQLKKNGVKLMSATEIISEGPEGIILESVLEGYAEYYSADLAEKVVRGQTENILKGRCNGGRGTFGYTLDSERKFHIDPLASPFVLESFTKYRDGLTMKEIRDWLNENGIKNPVGGAFTYNSVEHMLKNRRYIGELKFRDVVVPDAIPPIVPLELFDDVQEKIAKNKKAPARRKAEDDYLLTTKLHCGCCGALMFGESGTSRTGEVHRYYKCATVKKKKGCKKKTVRKQWLEDLVVNQTMQLVRDDAAMESIIAKVMELQNKENTNIPLYEKQLRDAESGIQNMLNAIQAGILTSSTKERLEQLEETKRELETRIAEEKLAKPKVTEEFIRFWLLRFRKLDMSLKDQRQALVDTFINAIYLYDDKVLITFNYKEGTQTVTFGEATEVASEGNGSDLDCFTAPRTAAQVMCSSPFYLFYRIHLAKAAQCLIIEAVPRCARVRLGCIG

SEQ ID NO: 27409 - protein, 536 aa, synthetic construct
MTAVIYARYSSDNQREESIEGQIRECTAYAEKNDITIVKHYIDRAISAKTDNRPQFQQMIKDSDKKLFDIVLVWKLDRFARNRYDSARYKTQLKKNGVKLMSATEIISEGPEGIILESVLEGYAEYYSADLAEKVVRGQTENILKGRCNGGRGTFGYTLDSERKFHIDPLASPFVLESFTKYRDGLTMKEIRDWLNENGIKNPVGGEFTYNSVEHMLKNRRYIGELKFRDVVVPDAIPPIVPLELFDDVQEKIAKNKKAPARRKAEDDYLLTTKLHCGCCGALMFGESGTSRTGEVHRYYKCATAKKKKGCKKKTVRKQWLEDLVVNQTMQLVRDDAAMESIIAKVMELQDRENTNLPLYEKQLRDAESGIQNMLNAIQAGILTSSTKERLEQLEETKRELEARIAEEKLAKPKIKEEFIRFWLMRFRKLDMSLKDQRQALVDTFINSIYLYDDKVLITFNYKEGTQTITFEEAAQAASKENGSDLDCFTAPRTAAQVLCSSPFYLFYRIHLAKAAQCLIIEAVPRCARVRLGCIG

SEQ ID NO: 27410 - protein, 549 aa, synthetic construct
MSRKKQVYEKITALYCRISLDDGGDNESMSISNQKLMLRDFAEKHGMFQYEYYVDDGYTGRNFNRPSFQRMIADIEAGKIGCVVTKDLSRLGRNYIEAGSYIEIFFPKHNVRYIAITDGVDSLTRQEMDITPFKNILNDMYSRDISKKVLAGITTRSRQGKFCGGTPPFGLMRDPEDKGHLIIDPETAPIIRKIYDYALDGLGCMRISKRLMEEKIPITHVKANTEFDANYYSWGGARISHILRNPFYKGAHLVFRTHQKGIRSNTYDIIPRDQWEVIEGCHEAIVTPEEWEQVQELIDRRPTIQGNSCPFYNLFHGLVYCATCGKSMQVRYEKVGRTGKNRFTGKMREPIDKAYYICQTYNRMGCKVCSSHKIEARGLYNLVLKDIQELAAQAMKDADAFYQRLSRRMERRYLVDASQTEKERQRLEARNQEIDRMFLSLYTDKAKGILTEQRFVKLTAALEQEQESNQKRLHDLAMMQSRADTQESEVRTFIKEIRRYATIEELDEAVLNRLISKILIGEVKKVDGQKVQEVRIVYNFVGEIPEIAA

SEQ ID NO: 27411 - protein, 514 aa, synthetic construct
MKKVYSYIRFSSTKQAFGDSHRRQSKAIQDWLASHPDHILDESLSFEDLGRSAFHGDHLKEGGALRAFLEAVKQGLIPSDSVLLVESLDRVSRQSISHAQETIRAILEQGITVVTLSDGETYNRQSLDDSLALIRMIILQERSHNESVIKSDRIKKVWSHKRQQFEQDGTKITGNCPGWLKLNSDKKSFSLIPHHVETIHRIFDEKLSGKSLHAIARDLNLENIPTITNKRVDTGWTPTRVRDLLLKESLIGVAYGVSDYFPPAISKEKFHAVQMIRGQGKGKKPTSRQPSSIDILKGICKCAECGSTLRQRNTKKTPEGRYPRGYLECRNRQLGRCNSKAFNRSLIEDILIQKVFPTLQYLSLESNGDNISVTTLKADITSLEKGIDNLISLAEKGLGDLDTLAQRITNNRVELESKKKDLRQAEAILSLRSDNDIQDSDRKTVEGRIKLQLAIKSFVKEIIFDYDKQEIAIRLLNGKSFSGISVAREDKDFDHSSMFEALQKSLLDIDEVYL

SEQ ID NO: 27412 - protein, 634 aa, synthetic construct
MTTTADTKILTVPGEGRVTAVTYQRVSTKEQATTGGRDEGFSIPAQREANRRKAETLGAQVVAEFVDAGESARSAKRPGLQQLLDYIATHQVTYCIVHKVDRLARNRLDDVDIHRQLIDAGVQLVSATENIDETPSGMLLHGIMSSIAEFYSRNLAAEVTKGMTQKVAAGGTPSRAPIGYRNIRKRDAQGREYRTVEIDPDRAPLIRWVFETYAAGEHTVPDLLAEATARGLTTVPTPKRPSGPVGRSTFFKLLRNPYYIGQVRYQGALHPGAHEPIIGVETWQQVQTLLDTRATAGERRRKHDHYLKGTLYCGTCKARLQLDYARNKQGIRYAYYICSGRATKRTACTRRAVPVGVAEQLVADCYQQMTITERRYQQLAGRVEAEFDQRLAERSQAIDDLTATKTRLKSEADKLLEAHFADAIDLDTLKRHQDRIRVALNDVTRRLEAERRDHEGPRKHLATALRLLADCATMYERTDDLGKRLANQAFYQRILITEDEKAAIQLNEPFAALAPTSTDVRCSNTSNLVEPMGLELVTSCLQSRCATNCAMAPWRIQSARGSSVTDFHSLTLSEKSSTIWRLTIPAATAAAMTPRPLRRAAVGAVGVAVSRPPLPPSIGKRRVYELIARVCGGS

SEQ ID NO: 27413 - protein, 611 aa, synthetic construct
MKKAAFLVRCSTNKQDYDRQVRDLQLVADRFRYSLYEIYGEHITGKDDTTKRDRLSIIRVRKDAELHKFDVLLVAEVSRMSRDSVSGRVYVRQFCNLGIPVYFRDKMKWTIDPQTMKEDESFVKELGLYFDGAAEYLKSMKTQIASGRRNSLMNNQLVVGHPPIGYKKRGGTDKYTKNELVIDEALAPMVKDVFAMYLEPEGTLKSVSLAISAKYSKELKGKRKTVSGVQQILCRKEYYTGEYTVYMSDPDNKDLEPEPFTITFEPLIDQETFDAATEKRDLKKSTDSPYPKQAIHPLSRLIKCPHCEHSFSPRVRSGDKPGEKHRIINGKKAYSWICMTRINNAGECNSHVNLNNEKTETIIWDLIKKELLTFADLNKDDRETRIYDLQQKIADAQNQIPVYEEEITRQDRKIKRAYNAYIDAPEIALEKAKEDYHKTLLDATKAKEDYAKEIKLLKKQIKGWEKSIDYYNNSNITTEYIDSIEDKEDEKRKIFLQLIQKIVPIGIRPGVVILQTHTINGIYWVLFDGNQVGQKRIAHYIHESFAVWHSTVKGEIQSSEAESYFSLKNTDVLVGTEDVDPAHVKFREMQMVCEANENVIPYNYIYERAHE

SEQ ID NO: 27414 - protein, 523 aa, synthetic construct
MRQVITYLRFSSKPQERGDSIRRQKGLFERWLKDNPDAKVVDEFSDEGASAYHGHHLKGDFGRMLQNIQDGKYLSGQTVLLVESETRLNRQKARNTENLVDLITGKGVDVICLESGKIYTSTNIDDLDTSIQLKIAAHIAHQQSKEKSIKVSAAWEHRAQLALEGKQQLTKNVPGWIDPDTRKLNEHSSTVVTIFDLLLSGESLHNIARYLQANNIKSFSRREKANGFSVHSVRTILRSESTVGTLAASKRNDRPAIPNYYEPAIDVATFNKAQEILSKNRVGRAPASDNPITINLFKGIIRCQCGASVQPTGVKATYQGVYRCNNVPDGRCNVPTIKRKPFDKWMLDNIVGFLERDDGNNTDKRKAEIEYQISLVTSKLKKATTLLLELDDVTELKEKVKELNIQRSNLQSELDELNQRETLSDKPLHHLSEIDLTTKAGRVEAQLILSKFVQSIELQREMIIITLRNGTVIGKSRDLSPVLSRDLMKQVVSSPSPTDIDMFSVITSDEEFRKSGKQVTKRS

SEQ ID NO: 27415 - protein, 444 aa, synthetic construct
MKVGLYLRVSTERQIENYSIPLQKERMHAFCASKGWQEIKEYVDAGFSGSSLERPALKQLQQDIKRKRINMVMVYRLDRLSRSQQDTLYLIEDVFVPCGVEFISLSETIDTTTPFGRAMIGVLSVFAQLERETIVERFWSCHQKMVRDEGLWAGSACNIPYGYIRLPRGELMVNEKERQHVVRIFEEYVNLQSYAKVHQKLEAEGFPKIKNNRMRRLLENKLYMGDVSFSGEWFKGSHEPLVSAELFNAAQEVIQNNRWNSHGKAKNKVFTGKVFCGSCESEYRPYVNKKKHYLMCHRRKCFSQYESKCFNRTLLREHFEKEVFSRIQNLGTSGEISLENKGNEYTKQIKQIDNKINKLLDLYMDDRVSKNALDTKLNQLYTLKNERLEQLEELDDQQLEIQDFIKKGVENLSECDLPTRTHIVDLLIDKIVVTDETLQIVWKE

SEQ ID NO: 27416 - protein, 453 aa, synthetic construct
MMKVALYARVSTEQQIENYSIPLQKERIRAFCMAKGWSEIVEYVDGGYSGSNLNRPALQQLKQDIEEKKINAVIVYRLDRLSRSQRDTLYLIEEMFLPNHVEFISISETIDTSTPFGRAMIGVMSVFAQLERETITERLRSGRLKMVKDEGLWAGGADASPYGYTRLERGKLVVNEEEAKHVLRIFEEYITLKSYLKVQTKLEEEGFKPLKDSRITMLLKNRLYIGEVSFSGEWFKGSHQPLVSVDLFNAAQKINEHFKGFNFGKIKNNVFRHKVICGCCGEHYVSHSAKAKKTGEQYYYMVCRRRKFPGQYESKCQSRRIKRSDLENEIFNRIKQLETSAEIELTKKMEPIDYDQKMKSIDEKINKLLDLYMDDRLPKGTLDAKLADLNAQRENLLTQSKETQYETSLMEEFITNGIPNLFECDLDTQTAIIDLFVNQITITEDGLQVIWNQ

SEQ ID NO: 27417 - protein, 472 aa, synthetic construct
MKLALYARVSTEEQLNGYSIEIQVDKLTQYAKLNDYEYEIFTDEGYSAKDLNRPYIKILLDRLKNNEFDGIAIHKLDRLTRSVRDLQNIVDYMDQNNLKLISLNESFDNTTANGRLTLTMMGAVAQWERETIQERVCLGVKQAALSGKIVGTVPFGYNYDNKTGKVSVNEEEAEVVKIVFNMYAQGHGSNSISSYIFDNYPKEFMNFGNTQILRMIKRRSYLGESITRFKDGTKHVISNAYPQIIDQELFDKVQEVYKNKKEIATPRQKKNRRIFTGFLVCGLCGNAICGSASGSASKNTTLSYRCSHKYNRTKCRCSMFNEEELEKAFVEKMVSTLKAVKEGACDINVSFAKANNKEKLIKELSQIKNKRKKCYIAFENDLISLEEFKERSNEFKQKEEELENEINTLQDVAVPKIFNFECDNFPATWNNLERCDKIALLHDYVKKIEVSKLSYLTTGRRESLVIHDITFV

SEQ ID NO: 27418 - protein, 480 aa, synthetic construct
MAMHKVAIYVRVSTTSQVDEGYSIDEQKAKLTSYCEIKDWNIYDIYTDGGFSGSNTERPALEQLIRDAKRKLFDTVLVYKLDRLSRSQKDTLYLIEDVFLENDIEFVSLLENFDTSTPFGKAMIGLLSVFAQLEREQIKERMQLGKLGRAKSGKSMQWAKTSFGYDYIKETGTLSVNPYQALIVRKMFEWYLSGMSITKLRDALNEQYGQDKEWNYRTVRVILSNPVYCGYNQFKGQIFPGTHEPIISEEDFNKTQEEIKTRQRTAAQRFNPRPFQAKYMLSGIAQCGYCSAPLAIKLGMKRKDGTRLVKYECKQRHPRKTKGVTVYNNNAKCDSGFYFKDDIEHFVLTEISKLQTDSDYIDKLFSNTDKETIDRASYQKQIDNLTAKISRLNDLYIDDRISLEELQKRSSDFMAERSALEKELDADTSLKAVERKKDIRRVLDTKDILTLDYEQQKAIARALISKVRVTSESIVILWKL

SEQ ID NO: 27419 - protein, 478 aa, synthetic construct
MNKVALYVRVSTTSQLEEGYSIEEQKAKLESYCDIKDWHIYKVYTDGGFSGSTTERPALEQLIKDAQSKLFDTVLVYKLDRLSRSQKDTLYLIEDIFLKNNIEFVSLLENFDTSTPFGRAVIGLLSVFAQLEREQIKERMQLGKLGRAKAGKSMMWAKTSYGYNYDKKTGSMTVNEYEALAVKEIYSSYLAGMSITKLRDKINEEYPKQPAWSYRTIRGILANPVYCGLNQYKGQTFQGTHKAIISLVDFEQTQRELAKRQQTAKELSNPRPFQAKYMLSGLAQCGYCHAPLKVILGQKRKDGTRFKRYECYQRHPRKTKGVTVYNDNKKCESGYYDMDLLEHYVLTRIAQLQNDPDKIKELFSDDTSPAVDKQAIQKQIDSLTLKLSKLNDLYLDDRITLDELRAKSSDFIKQRATLEEEIKKAVTDKQAGQRERIEKLLDASSVLDMSYDNQKVIVRELIDKVQVTSDKIVIRWKI

SEQ ID NO: 27420 - protein, 499 aa, synthetic construct
MSKAVIYARYSSTNQREESIEGQIRECTDFANRQDITIVGSYIDRALTGKTDARPQFQKMIADSGKQLFDIVIVYTLDRFARNRYDSATYKAKLKKNGVKVISAKENITDDPSGIILESVLEGMAEYYSVELAQKVLRGMTENALECKWLSGIIPLGYKLDDDKHLIIDDHAAPIVRKIFEMYAAGDRIVDIAKYANSTHLKTAKGNNFSRCSFTHMLKNETYIGTYKWRDIVKTKVIPQFIPDDLFHSVQKRIKSRKETNVRGKSENFLLSSKLKCGKCGQFMTGVSGTSKQKRRYYYYQCYASKSKKCNMPLFPREKLEDIILAETIKLLSEPQTIEFIANTVANLPIDENTQISILETEITEIKNKLKNCIKAIESGLISDTISKNISEYEKKLSVLEKDLSIEKVLNEPFKITPDHVKFFLYNILQIKNADERRDMIISTFVRDIVLTKDDIGYTVKITYNYNENPSNSLDNSVQKGSQKSSLVAPTRIELVISP

SEQ ID NO: 27421 - protein, 624 aa, synthetic construct
MKFNSSKPQVYSYRRFSSPLQEKGTSLVRQSKLIKEVAEKFNLEVNDSLVMTDRGLSAFHAEHKNRGELGLFLSAIKEGLVKPGSVLIVESLDRLSREDAMTASTDLNNLINHGITIYTAMDGRTYSSETMANDPMNILWATIVMIKANEESMKKFERSIGFIQEQVRNFYENGLGDVAGAIPFWIKRKARENVKIKTGFEFNENEETIRLIIDMYFNEGRGLRSISRYLYEKQIKSPKGHDVWGVSTLSSVLENEALCGRKVFKLKVKKKYIDEYDNFELKDYYPAIMSEDDFDKMQAIKKRKAGGGKGDKSNRGGLVYLLTDYGKKSVCAKCGSGIGSQPQQQKNRIRRRLHCYKHKETANCCKSIIQDYLEDAFLVSVSRHIDYSLINKDIDATNIVLIEERLEAIDGELENAMDLIITVKDPKMKTILKKKYERLECEKVDLEKQKNELKEFKVSEDDIKTFITTVGKARNYKDNESRKIIKNILSQCIKKLSVHLDKKRLSCYGYPNICNNALVNVIDVEFYSEKNLSIFFCSETNALLFTRIDNEFSNDAMGSYTEDELMIWNNEGKEALDNVIKNNVVDNHNTSSPENLWFGSDVASMVFEAMLDELYESDEDNYLN

SEQ ID NO: 27422 - protein, 535 aa, synthetic construct
MKTPAYSYIRFSSSHQASGDSLRRQTMMAQQYCDNENLELQPISYHDLGVSAFHARNIKEDSGLGQFLKALDENLIPKGSFLLVESLDRLSRSAVQTALRQLLSILEYGIKVVTLIDNRIYDNKSDSTDLIISLAIMERAYNESKTKSERLKAVWQHKRNNPHSTVKTKTCPFWLELQSDKKTFKVNEDKAHVVRQVFQLCIDGYGVQKIMNWLNEQDFPSGFGKQWGLSSVSYLLNSRAVIGQYEPHIYEGKKRISTNIFIENFYPHILTDEVYYLAQSRRSERRRPEAAGRKGNFSNIFNQIAKCQICGASMHYVSKGSDTKYLRCRESLRKNCTNKSIRMDLLERFIIERYLSPQHYKQWSNYASMPKVQPVDLSALNNKLESQREALKELLKLTNDFSNSVIQESIKIRSEAIQKLETEIKEYRIDSADTEASIHLNFKEASQLVSDALQIPVNRATPNKLNEEQLFTARSKLNRQLKQTFSTIKILHHPESGDRIIETSIFKYIADHEAKTARVKNFIWYALPINTEKGA

SEQ ID NO: 27423 - protein, 402 aa, synthetic construct
MKQIKTIQAQKVTVIKKLKVAAYTRVSHTSLLQSLSNQVSHYSQLIQANPEWEYVGVYSDSAISGRSQAHRRDFQQLLEDCRKGKIDLILTKSISRFGRNTVELLETVRDLKRLGISVHFEKENIDTLTAEGELLLTLLASMAQEESQSISQNIRWRVKKRFEEGKPYIPQDIFGYRWNGEEYVIEPHEASIVRQVFEWYMAGDSAPKIAKKLDDRGERTRLGNRFTKRVIYNMFDQEAYCGRLILQKTFRDYLGTRSIPNDGQMAKYIVENAHEAIVTPEYFQQINQEKKRRAKRRTSKHESIAKLNGKVYCDHCGLDMILTVATISNQEKRVRYYCRTRDTKGVEACLGRTVTEEQLFQAFGETLKTEDVHHIAFNSVTNEAKAIYRNGEEKHAIIRKGR

SEQ ID NO: 27424 - protein, 521 aa, synthetic construct
MKKVITIEPAKQVIHKIDLPSFTKRRVAGYARVSTDHEDQTTSYEAQMTYYTDYINSRSDWEFVKMYSDEGISGTNTKKRLGFQEMVEDALDGKIDLILTKSVSRFARNTVDSLSTVRKLKEAGVEIYFEKENIWTFDSKGELLITIMSSLAQEESRSISENVTWGRRRQLAEGQVTFSYSQVLGFKKSDTSGFEIDHEEAKIVRYIFHQVLLGNNPNKIARELTAQGIPTPQGKRQWSYGTVKRMLRNEKYKGDALLQKSFTTDFLTKSTKPNEGELPQYYVENNHEAIIKRDVFDLIQVELDKLEKKRQTSNIFTGRLFCGDCGSAFGSKVWHSTSKYKRTIYQCNAKYKGEHKCQTPHVTEEEIKVWFLSAINQLLSNRDEIIANTELLIDMAKDTSPLENKIDDLEQQLETIRQDVGDLVDRNARKAQNQDLYQEQYDTLVTAYQEKQKELQEATSSFEEQKSRSISLDGFIQELKQQDSLITNFNQELWQTSVERLDIMEDKKISLTFKNGVKIDL

SEQ ID NO: 27425 - protein, 620 aa, synthetic construct
MKKNNVEIIKADSLVRRRGDNFERESKRVAAYCRVSSDSEDQKNSYESQVRHYKDYISQRSDWELAGIYADEGISGTQVGKRQDFQRLINDCVNGEIDYIVTKAIARFARNTLDTLKYVRMLKDMQIGVYFEEENIDTLTMDGELLLTILSSVAQQEVENTSAHVKKGLKMKMQRGELIGFQGCLGYDYDVETKQLSINKKEAKIVRYIFERYLEGIGGKVIARELDELGYKSPRGLDHWNDTTVLGIIKNEKYKGDILMGKTFTVDPISKRRLSNFGEEDKYYIKDNHEPIISKEDFEKAQEIRLRRAGNKKTAANVNGKRERYSKMYAFSSMLECGFCGSILSRRSWHCRSDYRKVVWHCVTSIKKGKKFCKHSKGLEELAIEGAFMEAYRKLYHSNENLMTDLLETIESELNDNSLNKELKRITNKLRTLLKKEENLVNLRLEGKISDTIYNEKYNEISSEKEFLAEEKVNIETTLKSEIDVKKRLTEFKHLLSSQKMLTEFDRAVFESIVEKIIVGGVNSDGEIDPAMLTIIFKTGETQNKDGKQFKSKRKNAKLETDKLCPQNSDEDKKLYSQGTDYTRGVCCSARKSLETLERKHVKKPWRQGFLAWKYLYFIG

SEQ ID NO: 27426 - protein, 619 aa, synthetic construct
MKKNNVEIIKADSLVRRRGDNFERESKRVAAYCRVSSDSEDQKNSYESQVRHYKDYISQRSDWELAGIYADEGISGTQVGKRQDFQRLINDCVNGEIDYIVTKAIARFARNTLDTLKYVRMLKDMQIGVYFEEENIDTLTMDGELLLTILSSVAQQEVENTSAHVKKGLKMKMQRGELIGFQGCLGYDYDVETKQLSINKKEAKIVRYIFERYLEGIGGKVIARELDELGYKSPRGLDHWNDTTVLGIIKNEKYKGDILMGKTFTVDPISKRRLSNFGEEDKYYIKDNHEPIISKEDFEKAQEIRLRRAGNKKTAANVNGKRERYSKMYAFSSMLECGFCGSILSRRSWHCRSDYRKVVWHCVTSIKKGKKFCKHSKGLEELAIEGAFMEAYRKLYHSNENLMTDLLETIESELNDNSLNKELKRITNKLRTLLKKEENLVNLRLEGKISDTIYNEKYNEISSEKEFLAEEKVNIETTLKSEIDVKKRLTEFKHLLSSQKMLTEFDRAVFESIVEKIIVGGVNSDGEIDPAMLTIIFKTGETQNKDGKQFKSKRKNAKLETDKLCPQNSDEDKKMYSQGPDNTRGGSWFAGESIETFKRKHIKKPWRQGFLAWGGEVSE

SEQ ID NO: 27427 - protein, 597 aa, synthetic construct
MKQKLYSYQRWSSAVQSDGTTKARQTFAAEEYAKRNDLEVVEIVDAGISGFKSVNSKSGALAKFLAAVDEGIIPNNAYLFVESLDRITRDEIDVALELFMGILRRGITIVTGMDNKVYTHAGIKGNPIDLLTSILLFTRAHEESKTKQNRTNGNALAMIRRFQSGEPTTIKAVGSHPWWIDCSTDKFEAVRRHPTLWQPAQDAINLFMEGVSVFKVVEYLDKTYPHMYKGKAWKTANIRKLRFNKAVYGLREITVDGKDYALPNYFPSLITEGQFLRLEKIRETTKYIGKVGEGKTVTDEEGNSKVIAERNNINLLAGMKLFRCGHCNSTMMAMRHGDTIRYLCEKGRGHQNDCKTWSLPGLLVEHTLMLVTTIAYINIQRKGGVEKEDYTAQIASTEQLIEDISKKISNSTKLVLAGLDDVDEVIEQIQELKDSRSNLVLELEVLQRKQLLAQDNTFEGLMMDFFNYAQYGVLQDPVHEYRSKLRDIVYTSIGEVKAWKVDRRLMISFQIKGDDEYYTFSAGDEPYNYIFYYGSPVTLGEDLSPQGNYELPEEVKRRIREHSDVYDASMKLLGTANALLSVVNYPDLDGRMFWPRK

SEQ ID NO: 27428 - protein, 503 aa, synthetic construct
MPQRNNGIAYSYVRFSSKRQELGDSLRRQTEMAEEYAIKNGLKLSSKNFQDLGISAFREGKRASLVDMLAAIEEGQITAGSTIIIEALDRLSRRGIDATLETVKEILRKDVQVVSLSDGLLLTKNSLNDLQSVIRIAVAADLAHKESERKALRLRETKGQQREAALSGKPINKILPFWLQRTEAGYAFSDKAGVARQIVQLKQEGKGSNMIAKTLNKLGIAGVRTAQWNHASITKMLKNPALYGAYQTGETTKDRELIKLELVEAYYPALINKEEWLLLQSDQSKSKRGRRSANNPYSGLLRCECGGALVKRQHTVKGKLYVYHGCLNAKDGRCTQNISIKGLDGALTTILGRLEFKKKQTLSQSIHQERQQLEARINDLNSKLQVLDNIPLSVIKSIGTMESRLKEITDQIAKDEREQRGIEAVKSEKLSSITDGLELNLLLKRVLKSITVIRSGRGWAVKVLHLSGHKQNFLMVDGEIKFLSDTIALQKLLAGFRETTENS

SEQ ID NO: 27429 - protein, 584 aa, synthetic construct
MKEVEIIKKNDNLENRRRGKYIDCKRVAAYCRVSTDSEDQLNSYKSQVSYYTDLINNNIEWCMVDIYADEAITGTQVNKREDFQRMINDCMNNEIDMIITKSISRFARNTLDTLKYVRMLKEKNIAVYFEDEKINTLTMDGELLLVVLSSVAQQEVENISANVKKGLKMKMRRGELVGFQGCLGYDYHKEDKTLTINEKEAEIVRYIFNRYIEGAGCSIIGQELENLGYKTKYGSTIWSNSTVLGIIKNEKYIGDVLLGKTFTVDPISKRRLDNLGEEEKYYVKNNHEPIISREIFDKAHEILNRRSKNRGKYEEGVTKREKYSRKYAFSCMMECGFCGGTLTRRNWHSGSEYSKIIWQCVVATKKGKKYCPESKGIPERVIENAFVESYRLLCDEKKSVLEELLNRINDTVGSSEVNNKIKKIERELSVIEKKINNLVDMRLDDIIEKETYEIKYQELIDNQEKLLNERNKLNVVAKNENSMKQRLKEFKKTLEENEVLDKFDRGVFESVVEKVIIGEKNKDGENDPTKITFIYKTGFKNTLSSNEFKIPRKNARGRHKRKELCLHGNNEVENLCSYSSSNTC

SEQ ID NO: 27430 - protein, 507 aa, synthetic construct
MKRVISYIRFSSEKQAKGDSLRRQSKLVTDWLKAHPEYYLDESLTFRDLGVSGFTGKHLKGGLGDFLTAIEKGLVKAGDTLLIESLDRLSRQNVDRASELLRNILRSGVDVVTLSDGEHYTRESLKDPLALIKSILIMQRSHEESLRKSERIQAAWNRKKELISEGIKISKRCPAWLRLNDDRKSFSVIPEKVETVKRCFQLRLEGKSIWEIVRTLNAEGHRSMNQYKPGKFGQTSVQDLLKNRSVIGYFTPKGCEEISGYYPAIIDETTFYKVQQLSHSRYGKRSVSDKPLSVNLFKGVIRCSECGHALIITGFSDTRNGIYRCPLRNENRCNAKGLSRKQTDGTLLALLSRLDRFDSDMTNVIDALKLHREHISNNIEKLVQLSLEIEDLSAITIKLKQLKGELSQVDADIEKETQRLKSIDVGCLSDCDLTTKAGRIEAQLIIKSAVKEVVLNAAKRRCKVTFHNSKSITLPITENPSEDVTEAIQSLSEVTEKGLIDVDVVEI

SEQ ID NO: 27431 - protein, 508 aa, synthetic construct
MKKAIAYMRFSSPGQMSGDSLNRQRRLIAEWLKVNSNYYLDTITYEDLGLSAFKGKHAQSGAFSEFLDAIEHGYILPGTTLLVESLDRLSREKVGEAIERLKLILNHGIDVITLCDNTVYNIDSLNDPYSLIKAILIAQRANEESEIKSSRVKLSWKKKRQDALESGTIMTASCPRWLSLDDKRTAFIPDPDRVKTIELIFKLRMERRSLNAIAKYLNDHAVKNFSGKESAWGPSVIEKLLANKALIGICVPSYRARGKGISEIAGYYPRVISDDLFYAVQEIRLAPFGISNSSKNPMLINLLRTVMKCEACGNTMIVHAVSGSLHGYYVCPMRRLHRCDRPSIKRDLVDYNIINELLFNCSKIQPVENKKDANETLELKIIELQIKINNLIAALSVAPEVTAIAEKIRVLDKELRRASVSLKTLKSKAVSSLGDFHAIDLTSKNGRELCRTLAYKTFEKIIINTDNKTCDIYFMNGIVFKHYPLMKTISAQQAISTLKYMVDGEVYF

SEQ ID NO: 27432 - protein, 506 aa, synthetic construct
MRHVITYLRYSSATQGAEGADSTRRQNELFKQWLRKNSDAQVVASFNDEGLSGYKGKHLSGQFGDMLSRIESGEFSKGTILLVEAIDRIGRLEHLETEALMNRIIAHGIEIHTLQDGLIYTRDALSDDLGISIIQRVKSYLAHQESKQKSFRVSEKWKQRAKLALAGEQRLTKMVPGWIDPETFKLNEHAETVRLIFKLLLDGESLHNIARHLQANNISSFSRRKDANGFSVHSVRTILRSETTIGTLPASQRNDRPAIPNYYEAAIDAATFNKAQEILGKNRIGRTPASDNPLTINIFKGLFRCQCGASVHPTGTKNKYQGVYRCNNHLDGRCDVPPLKRKPFDKWMIDNFLGMIDVGNDGEAEGKIASLQHEVEIVTTRIKKATALLLEMDDITELKAQVKELNQKRTELQTTIDSMRRKTSLSDKGLPQLKDIDLMTKAGRVECQLILSKHLKGLTLGKDSVTVTLQNDTEITIPTNPLPLNDGTSIFEIAEKELLEIDAYQL

SEQ ID NO: 27433 - protein, 673 aa, synthetic construct
MIGEETLREEIFQYDKAKFKGICVPYARFSTKGQSKVGKKSLERQLSKAREYAKRNNLFINEDLIFTDKGVSGYSNQGELSKAFKKGQMATMLLLLEEVPPEERDNVYITFHNFDRFSRMSPDAAQAHFNKILNRGFKIVTTIDNQLYDRRDKGMSNMLISIIKMTTAWQESLNKSIYITDALSRKKKVIEYLYNHPSQKGKHKHIGVVQPSIPRWIDQENITYEYIDADGSKRTDTFKKFSLNQYKAEVVRKIFELKIAGLGYTRICQKLNNDGVEVFEQGRFKKAKKWHPYAVQNIITSDKVLGHITLKEMVTEEYHCKETDEIKTKKVKKEVTSKLENYYPSVVDEEVFRLANVLKFQEKKGKPLGRIGERTNIFATFMSCYCGSTLQYSRSQINKRSNKTPVYREQLRCNNALVKNGCFDDYINYVELEQAFFKYVHHIDFREVCLVGDKSLETEIKNLQAEITYLNGQKKELKLKNSGLEKTFESAISQGLNADYVLVALNEAKKSADLIETKINDLKVRITKLQLSLDSKESDFLDIVEYSKRIKNSSTETKIMMRKKLNDFLHSKIKWMEVCSSKHSKFVILCFHDDVIRTFAYSENYANDLMFNTIKISYEVEDSQLNYELFLIYIHQIKRSLRGETEVVSNGDLIEALQRLKRKFYAGKGIDYV

SEQ ID NO: 27434 - protein, 529 aa, synthetic construct
MRKVYSYMRFSRPEQAKGTSIERQSHFAEQYALEHGLELDKSLTMMDKGLSAFHGVHKTKGAFGQFLAAVTAGKVQSGSVLVVESLDRLSREDPLIAQSALSDLILSGITVVTAADNQVYSREEIQQNPFKLIMSLVVMIRANEESETKQRRSNAFLKSALNQYQSNRKIRRLGADPSWLNFNKADDTYSFNERVEVIRRILSLYNQGIGSLKIARQLTEESIPTLSGKRSAWGQTTVANIVKSHALYGMKRINVQGVDYDLEDFYPALISKSKWLALQQHRSKRSKTMHGRGEAVHLITGHGKGFTTCGYCGGGLGAQTQKQYKRSGEYSKTVTRLHCLTHKETSSCCSSVFLEPIESAVLFAACIGVEPQSLVPTVNNVNYSALIDEVDNKVKHIVEQVTAGAPWDLFKDAHDRLKLEKQKLIKERDSQKPDVNQSDVQKWVNKLVELADKARTNDKEARLKCRTLINSICKSIVIKLRGHDLKSEPVVSITFVTDEQFEFKVSKNGAVQFVDNGMAVNRRLKPLLE

SEQ ID NO: 27435 - protein, 530 aa, synthetic construct
MNKTKVYSYIRFSTSRQESGDSVRRQLEIARNYSEKVGGVYQDRSFSDMGISAFKQKERDGLQMMLDMVEDGSIEKGSHIVIERLDRLSRQGISVTQQLITQIVQHGVLLYVAGDNMLLERDSLNDLSIVIRVAVAADLAYKESLQKSQRIKASKIAKKKDGLDGRVTKKVCPFWLKFDEKKQEYVFSDKLPTIQRIIELRQQGFGENKMAQHLNDENVPPPRAAKWSPTSLRKLYTHPAIYGAWQTTEKTEDGKYINSDLIENYYPALLTYEEFMLMNPKSKATTAKDSGLNPFKGLLRCAKCGATMSRQTSKMRNGEKYVAYRCTNAGKGIYCDAVGYRDMDKYLVAACKRLKIKKTLSSDNREKESQLRALEAKLESLQQAILTQTDITALISTSQIVERQINELKATIKPAATVTVNELYSHRDNPQSFNLLARSLIQKVEVEVKAKNRHTKTLFAKFYQHNGYVITLTVLPSGDAFYSTTDLSPIIDNEDYEEPESTEIEEHDDSIANPDYDSSSWSKPVTQRNR

SEQ ID NO: 27436 - protein, 664 aa, synthetic construct
MFSFDKSKFKGICVPYARFSTKGQSKIGKKSLERQIEEARRYAKSNNLYINEDLIFADKGISGFAQQGNIAKAFKKGQMQVMLALLEEVPYQEREFIYVTFHNFDRFSRMSPKQARTYFDLILQKGFNVVTTIDNQLYTRHDKDLGKMLISTIKMTTAWEESQVKSVYIKDALARKKKVVEYLYTHPSQKGKYKHIGVVQPNMPRWIDHEKIELTYTDESGSKRTDSFKKFTLNKEKAKIVNYIFDLKIQGLGYARICRRLNEEGIPTFDQGKHRIAKKWHVFAVQNLICNEMVLGHITLHTHNEEEYMCEIDKVFKKRKIKQTATEKLYNYYPAAVSEAKYLEAHKNTIQQDKPKKLGRIGERTNIFAQILLCECGGTLQYRRTKKNKKKSESVSVNEYLQCNNAFVNHKCNSQTINYTMLETAFFRYVNNIDFKKICSTTNSKHALKIIDLDTDIKELTDEIESLKLREAGLAKTYMSLASAGLDGSTALIDREKTKKEIAEKVLELENLELKKKGLEIEADKDNREFVDINDYMLNKDNYSSDEKIIIRKKINDFLHSKIEWMEVVSTERQKFVIIAFHDTVIRTFSFDDRYANDLMFNEIDVDLSGLNRVQASNLMFTLIKAIRNSLKGVEAVITKADLISYLQHIKQDYLNNIGEQASV

SEQ ID NO: 27437 - protein, 644 aa, synthetic construct
MFNFDKSKYKGICVPYARFSTDVQDEIGRKSLERQIEEAKRFSNEYGLFFDEEIAFVDRGVSGFALSGDTAKTFQKGQMQLMLELLEEIDVAEREFIYITFHNFDRFSRMSPDVASRYFEQILDKGFNIVTTIDDEVYKRNSGNLEQMIISIIHMSTAYYESEVKSIYISDSRQRKRDVIEYLYNDKTQKGKHRHVGIKACCPRWIKTKDIIYEYVSKDGSVKKEALKQFEIDEERAQIINYIFDLKIQGMGNGKICQVLNEQNIPVFHSGNYTKAKYWNLSTISNYLKNENVIGHSYLYHKAKEEVFNEKTQTFSTKRVRKIATDKLYNYYPPIMSEEKFNQAKEAVKANSNKVDRSKASEKPHMFSNLMRCSCGTRLHYKLTKKNNVKKVDDYFEYLKCERSALNDGCEGENINYKNFEAQFINFIRYIDVNEILNHANGEEAETQGLTELEEREAAINLKITGLTKTYQSLINAGVDGSDVLVELEKAKGELQEVEFEKSKLLNSMKSQTSSSSESIKQKKSALKSKVFAEKVEARKAVNELLKQKIRWMEVYATAYAKFVIVCFVDNVIRTYAYQDEFATDLMFNTIKINTDGLKGYEADELMVLMIKTVRESLAGMNEVITNTDLKIKLAAMKSEYTNK

SEQ ID NO: 27438 - protein, 575 aa, synthetic construct
MTKMAYSYTRLSTEKQINGHGFTRQREAIEKVCCQYGWQLSDQTFNDLGVSAWKGANATTGALSQFIDLAKKGAIRPNSVLIVESVDRLSRQQVDKSLRLMLELLEVGVSIFTLSDSKLYTTNSDSVMLDLMMWLMTAQRAHEESEIKSLRVRAAKKKNKELIRKGIIVTRKCPEWLTVSDDKSCFLVNNERAEIVRKIFTWYSQGFSTKPIALKLNELGIPYWGKSSTWSYRHIRSLLKHRGVIGEIQLLKRIDGRDVSDGDPVEDYYPAIIDRGLWATCQQIKSSKTTAKGRIVERGMANLFRGLLKCECGSGLAINSSTVKGRTYRFLRCSQLKTTGCQAKNWHYEKTERILLIALRHSLSSFCEEDHAVSLRESQHYLARINEELKEKERQAENAINYLLDKPSRLLEARLQTLEDDIARLKAIQEQAEHRLEAVHYEKSTALDKVEELQRVLEDIANDDDSRHKANGLLRRLIDTVTLGSISNPRSKEFMELSGSDYHGLIVIKRRDGLEVRVEVLKNYELSISWEGDEFTVIECSPTQQPNSQHVPQKFINVGEQTVDLWDDEGWVASS

SEQ ID NO: 27439 - protein, 601 aa, synthetic construct
MKKCFISHRVSSEQQFSGGRSGIVRQAENLNLYVERIRLLETMDDPEAVILCDQGVSAFKGLNISEGEMGRWIEQVQSGMWDNSHLVLESIDRFSRQNPFTVVAYISQLVNHNITIHDVSLNLLINRSNSAMLPIVTMSAQRAYEESKIKSDRIRDGWKRKREAAFNHGTIVTNKRPQWIEIIDDKYVLNDKVHIVKEVFRLCKEGIGTPTIAKILNAKGDNWLFESGRLWRGESVHKLLKNKRVTGSIFISEIIRDYNSTSNPIEQKRYEMYVYPIVISKEEFNLVQQLLRSRRGRITTNKDTDELKKSNIFNSICRCGKCGEAMYHNVVKSHRNSKKNGKFTEEYRYIRCLGERDNLCDNKALRYEVVEQFIIEHIKGMNFSSILKPNNHKTELDVLRLNIDIEKGHIREYRHGIEKLKALGKKIPFDVLVELEESQKRLSDLEEKESKYTDLNVDTEYLKSVDPSVLFEQGNIEVRSRIEKELSMLLESIVLHRLDKHYVITLEYKQVSILKHVLFIEAGKVPVLISSLSIEKYSDEHIYTMPSFSIRCGEGVPEIHGEAISLVDYSLLLNYIDGVDGSEYVSEWMRTNQNFIFSKET

SEQ ID NO: 27440 - protein, 559 aa, synthetic construct
MKTKLYSYIRFSSMRQSDGSSYERQIRMAREIAAKYDLELVNDYQDLGVSAFKGANSKTGALSRFLDAIGRSVPVGSWLFIENLDRLSRADIVSAQELFLSIIRRGITIVTGMDNKIYSLDTVTANPMDLMFSILLFIRGNEESQTKRNRTNSSALIKIKAHQENPQNPAVAIEEVGKNMWWTDTTSGYVLPHPVYFPVVQEIVELRKNGRSTAEILDHLNETYAPPPAVSNKKHSKWSRAMVERLFHTRALIGIKEVSVDGVNYELKDYYPRVIDDPTFYHLKKNIGARAWNFGDKEEVKPIPLLSGIGLLKCDHCGCAMVKVKGTNKRSDQYRYTCDATRSRRLDCEHPNWSFRGDQLEKAVLQLLADKIWIAEDKANPVPALKVQVDEISRKIDNLIALSAMTGATKELADQITTLNSERETLYNQIKMAEEEMYSVDSQGWEKLAEFDLEDVYNEERLKVRFKIKQALKRIGCSRIDRNKNLFVLEYIDGKTQRVVIENSRGTRKGQIFVDLKTINDRQILESNGLVLHPCLDMLTDKNWKPEEEIPGPLQEFGI

SEQ ID NO: 27441 - protein, 413 aa, synthetic construct
MAVRLIKTKSNRKKQRVCAYTRVSTTNSSQLDSLENQKAYFETFYVNREDVDFLGVYYDKGISGSKEKRPSFQAMLEACRQGQIDLIHTKSISRFARNTMTVLEVSRELKALGVGIYFEEQNINTLSNEGEGMLSVLASLAEEELQSMSDNQRWAFQRKFQRGEMVINTKRFMGYDVDDKGELVINEAEAQIVRRIFQLYLDGMGMHRIAKLLNQENVPTVTDAKWHDTTVRNILKNEKYKGTVLLQKYFHVGINWPKRLNQGQVEQYLIEDNHEPIVSKEVWQAVQDKLASKTWKQGVNKHYRFTSMLKCEYCGSTLKRQVTYKKQIVWCCSKYIKEGKASCRGMRVPEKAIEEWKLRTPVTVIERNEYGQKHYSYPSQESAADGHPSASNQNKSGSLLSGVHRPRRTAIKL

SEQ ID NO: 27442 - protein, 506 aa, synthetic construct
MRSVITYLRYSSAIQGAEGADSTRRQNDLFKQWLKKNSDAQVVASFSDEGLSGYKGKHLTGQFGDMLARIESGEFSKGTILLVESIDRIGRLEHLETEALMNRILGNGLEIHTLQDGLIYTKDALADDLGISIIQRVKAYIAHQESKQKSFRVSEKWKQRAKLALAGEQRLTKMVPGWIDPDTLKLNEHAETVRLIFKLLLSGESLHNIARHLQSNGIKSFSRRKDANGFSVHSVRTILRSETTIGTLPASQRNDRPAIPNYYEAAIDAATFNKAQEILDKNRKGRTPASDNPLTINIFKGLFRCQCGASVHPTGTKNKYAGVYRCNNNPDGRCDVPPLKRKPFDRWMIDNFLGMIDVGNDGEAEGKIASLQHEVEIVTARIKKATALLLEMDDITELKTQVKGLNQKRTELQTTIDNMRRKASLTDKELPQLKDIDLTTKAGRVECQLILSKHLKGLTLGKDSVIVTLQNDTEITIPTNPLPLNDGSPIFEIADKELLDIDAYQL

SEQ ID NO: 27443 - protein, 507 aa, synthetic construct
MKRVISYIRFSSEKQAKGDSLRRQSKMVTDWLKAHPEYYLDESLTFRDLGVSGFTGKHLKGGLGDFLTAIEKGLVKAGDTLLIESLDRLSRQAVDRASELLRNILRSGVDVVTLSDGEHYTRESLKDPLSLIKSILIMQRAHEESLRKSERIQAAWDAKKEAAKAGIKISRRCPAWLKLNDDRKSFSVIPEKVETVKRCFQLRLEGKSIWEIVRTLNDEGHQSMSQYKPGSFGQSSVQDLLKNRSVIGYFTPKGCEEIAGYYPAIIDETTFYKVQQLSHSRYGKRSVSDKPLSVNLFKGVIRCSECGHALIITGFSDTRSGIYRCPLRNENRCSAKGLSRKQTDGTLLALLSRLDRFDSDMTNTIDTLKLHREHISSNIEKLVQLSLEIEDLSAITSKLKQLKNELSQVDADIEKETQRLKSIDVGCLSDCDLTTKAGRIEAQLIIKSAVKEVVLNTAKRRCKVTFHNSKSITLPITENPSEDVTEAIQSLSEVTERGLIDVDEVII

SEQ ID NO: 27444 - protein, 624 aa, synthetic construct
MIKTFIYSRVSSQEQLSGGGLDRQETDVREYVTRNGLDQYEIVAMVDRGISGYDGSNMRDGELGKWYKDAITGMYWGSHLVLEAIDRFSRRDPMLAMEDFTVLVNKGGIKVHIVKFNTFINGDNLPMLSMMMNLAHSESKQKSDRISKGWQRRRRMALDNGTAITARTPYWIDVRDNEYRLNNSSIAVVEAFAMYKQGLSCGLIAKKLNELKHYFPYMWTKTAVQHIVDGLNTSGIIDAPRAIKTIKAFYKSGFSVEDIAKKMNAEFQFMKEWNAPAVHKLLQNKSVTGLVEIQKRKLIQEFDSDGKPLELRTKSEGEKYFESIYPQIISIDDFELIQKLLESNRKVDTKTGKGQTTGGTVTQNEDGELVKQFILSSLCRCYKCGGAMFNNIVRSKRKNGKVDTYSYLRCLNERDAHCDVKALNYPVIERAIIEHVKGLNFDTMFKGTNNSELELLKTREVELLRDIATYEDAIAARKAAGKNTSPVLVTSLVDAQDDLEALQKKIRAISGVTVNAEELTSLNESVFDVAEYELRNMVELELQKIIKRITFNCTEKNIYFITIQYNTGTVLQHGLKVDKKKGVIATYELHEGNKGYVSNGEVITPALIEAAESKNIGIFEGKVM

SEQ ID NO: 27445 - protein, 546 aa, synthetic construct
MNRVALYARYSSDQQSAASIEDQLRVCRERAAREGWHVAGVYEDAAISGASMILRPGIQALVQDAQAGKIDIVLAEALDRVSRDQADVATLFKHLQFARVPLVTLAEGEISELHVGLKGTMNALFLKDLAKKTHRGQRGRVEKGFSAGPVGYGYRTVRRLSSEGELVRGECRIEPSEVPIVERIFREFAAGKSPRAIARDLNADGIPGPSGRPWSDTTIRGKRNLGIGILNNEMYVGVRVWNHKQSVKDPHTGRTVRRPNPESEWVRAEAPQLRIISDDIWQAVKHRQDVLGEQYKPMIDGVHAAQASRMHQARRPVTLLSGLVECGLCGGKVGLAVNGRFGCMNYHRRHTCANGRTIRRDALEERALAGLRERLVSPEKVQAAVAAYAEYINRHNREQRVQIEVDRRSLDKIERAIAGIMTAIEDGLYQPTMKARMAELERQKSEIAARMALAPQAVPDVHPGVAEIYKREMERFTRALEDPETRLDASDAIRSLIHRIVLHPGEKRGEIHATLHGALMGILDFAKEDAQSEPVVTTKVAQGSLA

SEQ ID NO: 27446 - protein, 555 aa, synthetic construct
MLCYSYVRFSTPEQARGDSHRRQMEFAKNYCKLNNLTLVEDLSFNDFGVSAYKGDNLKNGALGKFLELVHSEYIPNGSTLIIESFDRLSRQTAIKAQAIFSEIISAGITIVTAMDNRSYNLKSVTENPFDLMYSLMIMIRANEESETKSKRVKEAIKANIRNKKIVSSKLPYWIKHNKEKDILELIPERVEVILYIIEKYLSGLGISKLTQHLNDNIKPFAGKNWYPAYLQKLLRSPSLYGERQYNIDNTLHIMDNYYPAIINKSKFAVIQENLNLRAPTRGGKISSAITGIRKAYCGYCYGVLVSQSTRRNGKIVDGLRRVRCNSNHNGTHCITSTFRASIVEHAIAEYCSQHIDLSFLEPTSNASKLKLSEYKLELHELNKKINNYVKFISEGHVSPAIIVSLNEAENRKKEIEYNINKLDLDILSDNKEELIKKWREIKTNLESYNEENILKLRELIRISVKTIYVFQYGVWGKESSIILPSGESIPIEKGDFTIQITFKSGVRKTLVLGDKIDDMEVIPQNRTIKKNGKTYTSEEYTKMLEDKIKIEYEQK

SEQ ID NO: 27447 - protein, 628 aa, synthetic construct
MAGIRMENKIYEVGMYCRLSKDDGTDNESASIATQKSILTDYVKKQGWHLAKTYVDDGYSGTNFQRPSFQNMIKDIESGLINCVITKDLSRLGRNYLDCGLYLEVFFPEHNVRYIAVNDGVDTLNKSAMDITPFRNILNEMYSADVSVKIKSAYRARFQQGKFMGTTAPYGYVKDPADHNHLLIDDKVAHVVREIFDLALAGNGIAKIRKHINKQHILRPAAYAAEQGATGYERYFEENEENRYIWSENSVRGILRSPIYAGNLAGYKRIAANMKSKKRPSKLPEEWEVIPDTHEGIVTQEEFDTVQQLITSRRLPENKGGFENIFAGVIKCADCGYAMRAMSANRRKRPDIIDCVQYSCNNYGRYGNIMCTAHSIEARDLFNAVLTDINRFADMAVNDEKAVRAIEKRLTETDQSKAKALEKEQRKLNKRLAELDRLFSSLYEDKVMERITERNFEMMSGKYQKEQLEIEARLKEVTETLSDSYEKTQGVRDFLSLIRNYQGIKELDATIINALIDKILVSEREKLTDGMVRQEIKIYYKFIGFVGELHITPTKRWTALKPKNCTVCGVEYVPRSGISKYCPACAKKIQREKSNESKRRSRERNRQACIELSAKNDRLTLSSVRAEL

SEQ ID NO: 27448 - protein, 594 aa, synthetic construct
MKKDVKVIKGDTTLKRTASGCVQRSIKRVAAYCRVSTDTEDQINSYNSQVEHYTDFIKQNNEWTLAGIYADEAITGTQVDRRIDFQRLINDCMNGDIDMVITKSISRFARNTLDTLKYVRKLKEYNVAVFFEEENINTLTMDGELLLTILSSVAQQEVENISANVKKGLRMKMERGELVGFQGCLGYDYDPETKSISVNEKEAEIVRYIFRRYLEGVGGMVISRELEEQGYLSPRGYKKWTETTVLGIIKNEKYKGDLLMGKTFTVDPISKRRLDNFGEQDKFYIENHHEPIISEEDFEKAQGIRLRRAKNRNTVANNGGKREKYSRKYAFSSMLECGFCGHNLSRRNWHSSSEYTKVIWQCVNATKNGKKYCPHSKGIEEEAIEKAFMESYRQVCHNNVEITNEFLKTVEEELKDNSLAKDLKKITNQLDKILKKEKDLVELRLNESISMDIYQDKYNEIAISKEKLLAEKRTLEVTLTDEKALKKRLEGFKKLLESNKYLEEFDRAVFESIVDKIIIGGTNDEGEIDPAMITIIYKTGKKDSQDGRLFKSRRKNAKEVNEETDNKLYPHSSDEVNNLYSYPIDNTRGVCKFT

SEQ ID NO: 27449 - protein, 553 aa, synthetic construct
MSTITKIQSYHRDIKQLRVAAYCRVSTDNVEQLESLENQREHYQKYISNQPNWQLAKIYYDEGISGIQLTKRDALKKLLTDCHNHQIDLVITKSISRLSRNTTDCLRIVRELQQLNIPIIFEKEHINTGAMASELFLSILSSIAQDESHSTAENLRWSIRQRFASGEFRVSSAPYGYSVEDGNLVIDSVEAGVVREIFQQFLSGMSASQIAKGLNQKHIPTKRSGQWRSNTIINILRNINYTGDMLCQKTYRDDQYHRHFNQGELPQYLIEEHHPSLVNHETFNRAQVLLKEAAQKRHIETGSHKYQHHYLFSGKIICGNCGTTFKRQTRPHKIYWACQKHLRSAKQCPTKAVSEAGLEAAFCNMMNKLVHSRKFLLQPLLEALKEEANANSDGQLISLNKQIKSNDHKAETLTQLMQTGLLDRAIYINQTTKLEQDTYQCQEKIKQLNGKNTDSANNFEDVRTLLNWCQQGKQLTEFDEGIFQEFVQQIVVNSSNKATFILKCGLALPEKLNKAVTIDDHFFRNIIRQRFNEPIKQAEYLYSIIESEGDLIG

SEQ ID NO: 27450 - protein, 525 aa, synthetic construct
MGKVRIIPAHQQKGNSVHHQRSPQPFEKLRVAAYCRVSTDYDEQASSYETQVAHYKELIQKEPTWEFAGIYADDGISGTNTKKREQFNKMIAACKAGKIDLIVTKSISRFARNTIDCLKYIRDLKAINVAIFFEKENINTMDAKGEVLITIMASLAQQESESLSQNVKMGIQYRYQQGKVFVNHNHFLGYTKDAQGNLVIEPEEAKVIKRIFYSYLNGITMKQIADSLKADGILTGGKTKNWRSSSVAKILKNEKYMGDALLQKTYTVDFLNKKRVKNEGIMPQYYVENDHPAIIPKSVFMQVQQIIKQRRNGITTKNGKHRRLNGKYCFSQKLFCGKCGDILQRNMWYRPEKVAVWRCASRIRRSKIGRRCMIRNVKEPLLKEATIEAFNQLIEGHELANKQIKANIMKVIVNSKGPTLDQIDQQLEEVQMKLIQAANQHQDCDALTQQIMDLRKQKGKVQSRETDQQAKLHSVDEINEMVELHKYGLVDFDEQLVRRLVEKITIFQRYMEFTFKDGEVIRVNM

SEQ ID NO: 27451 - protein, 629 aa, synthetic construct
MARKKRFAPNDNNLAIAYYRFSSHSQNDASIDQQRELAHDWADTHGLKIVKEYEDAAISGTTDARPGFQQMLSEVAKIRPHTLIMWKTDRLGRDKYVLAMAKKKIRDAGCEIHLLAEHIPTEGPEGVLIEGLMEAMAEYYSRQLSQNIQRGMDYNAQHALYNGHKLFGYDVDRSTKKYIPDPNTAPFVQWAFKEYASGKPLKAIAEEMNAQGLRTPRNAKFSVNMLNKMLKNRAYIGEYHHGDITVAGGMPVLVDEATFDRAQRRFAENKRKGSQRAHGMDDAEAPRYWLTGKLYCGECGSTMQGVSGTSKTGRTYYYYYCSAQRRKECHLHKARKQDLEDMVLFALHNIVDDEENVTALALDAAEYYEKSHNDTAYLEALEAKRREVEKSLANLVKVIERGVVSDTVTRRLAQLEEQKSALNDAIGTENVRVSLCEDRHSIQAYFDKFLHADVNDPEIRDQVFEYFVDKVYLYDDKLVVSMWFSEDDKQEITWRDWFSLDEYWTDESPFAKGEAVEFDCFPLSSTISNRQVDTHIYLPFYFWSAPRRIELCAGRERKENASVTQSGTCFPNGGPGGKFIPESALRTGRAFPAAVQAESASRNLASNWDTLSASLAASKNLRSRHPKTG

SEQ ID NO: 27452 - protein, 960 aa, synthetic construct
MVLCLVFLPFVWWAAAITACAIAPDKNFIQILETLSEKLEQPFFITYTPYTFKCILIFTAAYFLGIGIYESQKRNYRRGVEHGSAKWGNVSEICRRYCEKRYTQNLLLTQHFRMGLDGYKHKRNLNVLVVGGSGAGKSRTYAIPNIMQCNCSMVITDPKAELLRKTGGVLERNGYEVRVFDLINPETSWCYNPFAYVWDDKDVLKLINNLIRNTTPKGAQSSDPFWEKSETALLQALMLYLLHEAPPEEQNFPMIMEMLGSAQVKEDDEDYQSPLDILFERLEMRDPESIAVKQYAIYKQAAGVVCSKRLLNQAVGKSLRTHNLKPKKGAQVMRKNEKITALYERLSRDDFGKDDDQQRESNSISNQKAMLEEFAARQGFTNIVHFTDDGISGTCFDRPGFLAMMKEVEAGNVEYLCIKDMSRMGRDYLKVGQIMEILRQRGVRLIAINDGVDSARGDDDFTPFRNIMNEYYARDTSRKIRSTFQSKGKSGKHLTGTVIYGYLWNEARDQWLVDPEAAEVVKRIFAMTIEGYGPYQIASKLKEEKILIPSAYLAQHGEGVNKNKTFKDVYGWGSSTICNLLEKREYLGHTINFKTRKHFKDKKSHYVPEDEWTIFENTHEAIIDQQTFDLVQKIRGNVRRYPDGWGEAAPLTGLLYCADCGGKMYVHRTNNGKRISQYTCSQYSKIPVGKLCATQHRINEDVVLSLVSEMLKAIAEYAKHDRAEFVRVVQEAQSSQQTTEVRKQRTRLAAAKQRVSDLEVLLCKIYEDNILGKLSDSRYATLDAQYAKEQAELTDEISALEKAIRSYEKHEKDADRFIALIDKYENFDKLTIAMLNEFIEKILVHERDRKGSIQTTQEVEIYFNFVGRFVPPAFGEAELTPEELEEIRKREERKDRLHQNYLKRKASGAQKRYEDKIKGRKKAEIEAKKAAIRAEDIAKGVFVPVSSLPQREPMKGVQTA

SEQ ID NO: 27453 - protein, 542 aa, synthetic construct
MQQLKTKRVGIYVRVSTEMQSTEGYSIDGQINQIKEYCDFHHFEVKDIYADRGISGKSMNRPELQRMLKDAKEGNIDCVMVYKTNRLARNTSDLLKIVEDLHKQNVEFFSLSERMEVNTSSGKLMLQILASFSEFERNNIVENVFMGQTRRAQEGYYQGNLPLGYDKIPDSKHELMINQHEANIVKYIFECYAKGHGYRKIANALNHKGYVTKKGKPFSISSITYILANPFYIGKIQFAKYKDWSEKRRKGLNDKPVIAEGKHSPIINQDLWDKVQMRKKQVSQKPQVHGKGTNLLTGIIHCPQCGAPMAASNTTNTLKDGTKKRIRYYSCSNFRNKGSKVCSANSVRADVIEDYVMKQILEIVKSDKVIQRVVTHVNQENQVDGAALHHDIAYKQQQYDEVQIKINNLIKTIEDNPDLTSVIRPSIQKYEKQLNDITNQINQLKNQQNEDKTLFDAKEISKLLQHIFHDIKHIEKSRLKALYLSVIDRIDIKKDGNHKKQFYVTLKLNNEIIKQLFNNKHLDEVHLSTSSLFLPQTLYLTI

SEQ ID NO: 27454 - protein, 653 aa, synthetic construct
MFDYDKSIFDGICIPYARFSTTEQDKVGRKSLERQLEEAKRYASQNNLYISDDLIFTDKGVSGFAKQGQLSKTFEKGQMALLLDVLEDVPFKERENIYLCFHAFDRFSRQHPEVAYEQFSRILKRGFNIVTTIDDCLYSSKEADLESMLISIIKMSSAHYESEVKSVYVSDAHRRRREMLEYLYNHPTQKGKHKHIGLKQSTTPRWIIESEIIYDFVDDNGVARKDSFSKFSLDEAKAEIINQIFDWKIQGLGHTKICQLLNQKQIPTFEDGNCRKAEKWHTFAISNLFKNKSTIGTFTLKTVEDEEYFCESERIFKTRSNKVDATSEMENYFPAVVTVEKYEAALKIIAMNNKGEKISEPEDKTHVFSKVLRCTCGGRLVFKGTRKTGKSEKADWFEYLRCEKAILKDGCDAENIIYKDFEMAFLRFATSSNYTVFSTTQSKLKTKLKRLSIKQSYLNGEKEQLLLEAKGLNKTFESIVTQNLDATLLLDSISKNKSLLNTVQNELVKIENQVKGVEREYEKSGKPIDKRIIKKELRSEDYSKRLLMRKAVNQQLRKNVVHMEVCSTKLLKFVIVCFDDYVIRTYAYQDEFSSDLMFNFIKINVENLDESEAYDLIIHLFKEVRISLSGENAVITNFDLKVHLSGIKEKYLK

SEQ ID NO: 27455 - protein, 673 aa, synthetic construct
MIGEETLREEIFQYDKAKFKGICVPYARFSTKGQSKVGKKSLERQLSKAREYAKRNNLFINEDLIFTDKGVSGYSNQGELSKAFKKGQMATMLLLLEEVPPEERDNVYITFHNFDRFSRMSPDAAQAHFNKILNRGFKIVTTIDNQLYDRRDKGMSNMLISIIKMTTAWQESLNKSIYITDALSRKKKVIEYLYNHPSQKGKHKHIGVVQPSIPRWIDQENITYEYIDADGSKRTDTFKKFSLNQYKAEVVRKIFELKIAGLGYTRICQKLNNDGVEVFEQGRFKKAKKWHPYAVQNIITSDKVLGHITLKEMVTEEYHCKETDEIKTKKVKKEVTSKLENYYPSVVDEEVFRLANVLKFQEKKGKPLGRIGERTNIFATFMSCYCGATLQYSRSQINKRSNKAPVYREQLRCNNALVKNGCFDDYINYVELEQAFFKYVHHIDFREVCLVGDKSLETEIKNLQAEITYLNGQKKELKLKNSGLEKTFESAISQGLNADYVLVALNEAKKSADLIETKINDLKVRITKLQLSLDSKESDFLDIVEYSKRIKNSSTETKIMMRKKLNDFLHSKIKWMEVCSSKHSKFVILCFHDDVIRTFAYSENYANDLMFNTIKISYEVEDSQLNYELFLIYIHQIKRSLRGETEVVSNGDLIEALQRLKRKFYAGKGIDYV

SEQ ID NO: 27456 - protein, 634 aa, synthetic construct
MKLEHFSHTEPQIYSYSRFSNIRQEKGRSLARQKKFIDEVSAKFNLKINKDLVMTDRGLSAFHGHHKTKGALGVFLAAVEKQLIKPGSVLIVESLDRLSREQPYIAQATLASLVNADIVVVTAADEKIYSKETMAKDPLGTMILSVLEMVRAHKESLRKTEASIDFLHGQIATHEEGGVSDLAGPLPFWISRKQRPHPKIKTGFELNEHEEIIRLIVDMHFKQGMGLRPISVELLNRGIKPPSQLKHSPANSRKPKNDVWGVSTLSHIVSNQALCGRYVVNLNYQKDGKKHVEDYVLRSYYPAIMSEEEFDTFQAIKKRRYGSNKGDKSKRNGLVYLLTDYGNKSVCAKCGRSIGSQPQKQKHGIRRRLHCSKHKETANCCKSIIQDYIEDAFLISVARHIDYNLINTQVKPADIIRNSDRLEEIDLEMANVIDMRRTVKDEKIKLKLKFDYEALENEKEDLIKQKLEFKQFKIAPNDIKKFIRTVNDARDYNNNEARTFVKSILMQCIRKIEVHMEKKKLECYGYPNLFENAIVNVVDVEFYTDKKLSIFVSAETNTLLFSKISDEFADESLGSFTEEQLKAWNDVGFDNFQNLGERGTLVNENENSTENLWFASDLAEAFMNEIINQSEDES

SEQ ID NO: 27457 - protein, 575 aa, synthetic construct
MSKPKAYSYIRFSTPEQARGDSYRRQREAAEKFCFENDLEFVSSKEYLFFDKGKSAFHGRNVDDAGELARFLGYVNDGHILPGSYLIVESLDRLSRERVREALPRFLELINRGIRIYTSADRMLYTEKSDERDILISVMVMSRAHGESSLKGQRVSAAWKAKQKRARESGEPLGKACPYWLSLEDGKYTPVEGRVDVVKKVFDLSISGHGQRAIAKILNQDGVPAFGSNVRNKSGFWGASSVSKLLSNRALLGEYQPTNIIDGVRTKTGEPVSDFFPRVLSEETFYQAQNTRAVRKAHGSTKNSKEFNVWQGIAKCGLCGGAMHLVNKGSNLKYLRCYNSAKGVCQARSLRLDLTEIAYREVLAKVDSLSLVQDAHAKIKKDLDVADAKYVQLIERQNKLMSQAANVDIDLPELFLQVLSELQQEIDMCSKLREKLRSDLQKDRIINKSEFFSRLDLVSQEGRAKSNYLLKSLDILVSLMAFESAHIFCVYVEGYRSFSIVLNNGVALFYPYTRGALDSIRTQGDESDVSVVGEREIRESELRLVKAAADKIKDLMVSESSSNGLTRLKKRPLQG

SEQ ID NO: 27458 - protein, 565 aa, synthetic construct
MEEKSFVTKQTKKPLTKEKENSQSSKRKRVALYIRVSTQEQAVEGHSIEAQEARAREYAERMDYEITNVYIDEGISGKSTKRPAFQRMMADARMGNFDFVIIWKLTRLGRNMLDILKTVEEFIKLGIELFSISENFDISTSSGKLMLQLLGSFGEFERNQISENVIMAMMSLVRDQKRYAGGRRLGYVSGLDAEGRKQLIIEPEEAKIVQLIYAKFLGGDEFRTIANYLNRQGYQTLKKNKFTPTAVRDILQNKIYAGYIEYARYLNWDTKRRKGKNPNPILVKGEHEPIIDQVTYQAVQERLVLEKDRPRWNLTGENVLTGLLRCPECGAPMGSNGVVNTLKDGTKKTLRYYSCSKFLSKGKKGCHANSIRKEKAEDFVAARLKEIVQVPEILDSLVKEMNRELHEQIAPLEQELAVIATEKQDLAPKLERLQQALEDSPDLHDNLIGRINELTSKIMLHTQRENEILTILSHKDQKIEVENVQQIVSSLDHLLEQSEKKVVKEIYRTFIDKILFDKKNMDDIKIYMKFDQKIVTQLNELYQKVVSDKKDTTSFVLKTPFYSVI

SEQ ID NO: 27459 - protein, 456 aa, synthetic construct
MEEVYSYDRTSVWDTQKVSNDAQWEIIRSRSLEDTECIPQRFSERGKSGGNDDRPALKKLIIEIRSSYIKRKLYVWRYDRIFRETQKALEFVELCHKHNVEIISISEPLPEGSSSLALKTMFVQLLFINASMQRETIIENIRNGLAYKRSNGDYISSAIPFGYRLIEGKIIQNEQEAKAVKRLFELYASDDYGYKRLADKLTEEGYLFNDHPFKVHNIWNILDKSIYYGIVKGGTFGEYKGNFEPIISESEFKKAQAIRESRNVTKVNRREYPLRKKIICPYCGRRLSPTQRWNYSKTKRLHYYHCTKRECSGIYVSATKTENMLLKILKRFVNEDVIYQGIITEIDSQMKQLIKKEKQKDQKNAQSRREIVKQFEDGIITLDEMKDLLSSFDESQSKQTIPIENYRTQLDQLLELRKQSIQQLLLDHVEVVTVQKDKKIDGVFLQGLSENICIKK

SEQ ID NO: 27460 - protein, 506 aa, synthetic construct
MRSVITYLRYSSAIQGAEGADSTRRQNDLFKQWLKKNSDAQVVASFSDEGLSGYKGKHLTGQFGDMLARIEAGEFPEGTILLVESIDRIGRLEHLETEALMNRILGNGIEIHTLQDGLIYTKDALADDLGISIIQRVKAYIAHQESKQKSFRVSQKWGQRAKLALAGKQRLTKMVPGWIDPETFKLNEHAETVRLIFKLLLDGESLHNIARHLQSNGIRSFSRRKDANGFSVHSVRTILRSETTIGTLPASQRNDRPAIPNYYEAAIDASTFNKAQEILDKNRKGRTPASDNPLTINIFKGLFRCQCGASVHPTGTKNKYAGVYRCNNHLDGRCDVPPLKRKPFDKWVLENFLGMIDVGNDGESERKIAALQHEVEIVTARIKKATALLLEMDDIDELKIQLKELNQKRTELQTTIDNMRRKASLTDKELPQLKDIDLTTKAGRVECQLILSKHLKGLTLGKDSVTVTLQNDTEITIPTNPLPLNDGSPIFEIADKELLDIDAYRL

SEQ ID NO: 27461 - protein, 507 aa, synthetic construct
MKRVISYIRFSSEKQAKGDSLRRQSKMVTDWLKAHPEYYLDQDLSFRDLGVSGFTGKHLKGGLGDFLTAIEKGLVKAGDTLLIESLDRLSRQDVDQASELLRNILRSGVDVVTLSDGEHYTSESLKDPLALIKSILIMQRAHEESLRKSERIQAAWNRKKELISEGIKVSKRCPAWLRLNDDRKSFSVIPEKVETVKRCFQLRLEGKSIWEIVRTLNDEGHQSMSQYKPGKFGQTSVQDLLKNRSVIGYFTPKGCEEISGYYPAIIDETTFYKVQQLSHSRYGKRSVSDKPLSVNLFKGVIRCSECGHALIITGFSDTRSGIYRCPLRNENRCSAKGLSRKQTDGTLLTLLSRLDRFDSDTTNTVDMLRLHREHISSNIEKLVQLSLEIEDLSAITIKLKQLKGELSQVDADIEKETQRLKSIDVGCLSDCDLTTKAGRIEAQLIIKSAVKEVVLNTAKRRCKVTFHNGRAITLPITETPSEDVTEAIQSLSEVTERGLIDVDEVII

SEQ ID NO: 27462 - protein, 547 aa, synthetic construct
MKLLVTYIRWSTREQDSGDSLRRQTNLIDAFYSKHKNDYYLLPAHRYVDKGKSGFHQQHKAQGSDFRRMFENVMSGAIPEGSLIVVENFDRFSRADIDTAIDDVRQILRKGVSILTLGDGELYDKSALTDPVKLIKHIIIAERAHQESLVKQKRIAQVWNHKTQLARELKKPMGKQAPGWLELSEDGSHYIVDEDKASLVNIIYDKRLSGMSMFAICKWLNEQGYPTINQRKVRISKTKKPDGNWSALSVKHILTSRSVLGYLPAKISTEDRKTVLREEIEGFYPQIVTDSKFYAVQQLLEETGKGKTSSGEHWLYVNILKGLIRCKCGLVMTPTGIRKPVYQGTYRCNGNKESRCSYGTVSRKLLDTQLCSRLFSKLSQLHDEATDTAKLDELQRRLNTVDSELEKLTETLIQLPNITQIQEALRVKQEEKDELIVQLSREKARVKSVSSLDLSGLDMESVEGRTEAQIIIKRLVKEIVVSGNEKLVDIYLHNGNMIRGFPLDGKDDHTLTLEEATDEMQSLDDMLIFGEPVTRIYPAGDMEEVDA

SEQ ID NO: 27463 - protein, 597 aa, synthetic construct
MKKAYSYIRYSSPQQASGDSYRRQLAATQAYCDANGYELDTELSIYKELGVSGFKGDQEHLKQFINDCETGKVKKGSLLVVENLDRLSRQAINVAMRQFLSLLEYVDIYTLQDEKHYSNNDGRDSENQLLDIMTSLIIMSRAHEESLTKQKRLKESWSNQRKNAHKIKMSGCYPHWLVRADDKTEFYVKEDRAQIIKDMFDMCINGLGATQIVRSLNNNIEKYPPPSTKKEFWVRSTVKRLLSDRRLLGEHQLYKGHHAKREPVGEPIKDYFPQIIDEKTFVNAQISLKSRKIGAGKVKTDSFSNIFRGFLRCGHCDSPVEYVNKAAKQVSTLYLTCSNAKRGGDCNHSKHYRYLPLEHMLIHLSTANGFMPKPEEPNDLQQQMELTIIKRDRANEKLSVLLEKDFTAPVIMAKIEELTSDVGKYDAQIKEVEEKLLTIKPDYEYEDLYYDAVLEADSVKKFTNRTMFNSYLNKKIDSAYLYSIGLFPCMAFKMHDGSVHTLVLDERYNFGGCTLPNEKDTLIRLNGEALAAVDEQIWVMIGYAIDFLNSIDNENEEMVKIGRKVSLLISKFIMDNQNQKLLSEFEKTLNNAITLAQ

SEQ ID NO: 27464 - protein, 535 aa, synthetic construct
MTEEKNRFAVTYQRFSSERQIGNSSLDRQTDTQKEWLKQNPDVTVIDSFVDEAMSGWSGKHLKDGSLGQLMKAIEDGIIQPGTLILVEHFSRLTRQNIDNAEELIKRIWKAGITVVTVRDNTEYTPEAVNNMSLRIRLIVEMEQAFKESEWRSAKVKASYKRREKLAREEGKAPKMRKPFWLKPDGTLNHLHQAVKDIFNWYLNGLGQQRIVVRLREKYPDPAIQKINPATVMRWIQADIVRGYWRENRVYEAAVDDQLFFDVQAIRKSRLYKNVKPDRKWPLSGLMQCGSCGKGMSIQKSGNCNPVVRCSSKQRDRSCDRKTTFPYFVVHMYMMTHVLQHAVRRHSDKSSNKGLQIELSKVERSLAVARTKLTNEKDYYKKVSDEGKSTVMILDLMNETYQTVSDLEEQENSLKASLKENNHSVSPESRDLVLTPETFNLEMHKLGFKIVVDEQVLSTIGFDKPVRKMVYAGYCKKKRAYQYSSASGNYLHVWPSSWVTDELLNMQNLKDYLDSSAGVRDVWNKLYQDDDKAES

SEQ ID NO: 27465 - protein, 506 aa, synthetic construct
MRTVITYLRFSSATQGAEGADSTRRQNELFKQWLRKNSDAQVVASFSDEGLSGYKGKHLTGQFGDMLARIEAGEFPAGTILLVESIDRIGRLEHLETEALMNRILGNGIEIHTLQDGLIYTKDALADDLGISIIQRVKAYIAHQESKQKSFRVSQKWEQRAKLALAGEQRLTKMVPGWIDPDTFKCNEHAETVRLIFKLLLSGESLHNIARHLQANNISSFSRRKDANGFSVHSVRTVLRSESVIGTLPASQRNDRPAIPNYYEAAIDAATFNKAQEILDKNRKGRTPASDNPLTINIFKGLFRCQCGASVHPTGTKNKYAGVYRCNNHLDGRCDVPPLKRKPFDKWMIDNFLGMIDVGNDGEAEGKIASLQHEVEIVTTRIKKATALLLEMDDITELKTQVKELNQKRTELQTTIDNMRRKASLTDKELPQLKDIDLTTKAGRVECQLILSKHLKGLTLGKDSVTVTLQNDTEIIVPTDPLPLNDGSPIFEIADKELLDIDAFRL

SEQ ID NO: 27466 - protein, 604 aa, synthetic construct
MTKIIGYARVSTTKQDLSRQKLKIKEFCENNNYELIEIIEDFGISGVVSDRRGYLELQSRTYKDADMIVISELSRLSRQEDVTETVHNIQQIINKGLSVILLDSPSKIYEANKLLDITEILILTIKAWAAAQERLDIKKKNQDGKQALFQAYPYAVVDQKIPYGYKAVPNPNGKRPKYILEEVPEEVENIKRLFALVNSGKTLGAVARYFNERNITFRGYYSTVAILSNYIHSDIYRGIRRRTQKLGREEPYTIEVRIKPIINEEDFMKAQELIKNNYKNTPTGKVNHNPLKGIIKCRCGRAMTVKDKKPAAGISKLTYRCSCVDRKSHPDFCKYNIDEVSYDLTNEILYSLFKSMHTAEYINFFRNQTDNRVTELQEEIAGIEKRLSTLYLDKENLSNESKENANKFLLTTNPTLLNIIQEKQNQLDDKIKSIDKEIVKYKKSQSKKAADIERIKDNNGKEKLQNLSIEEQGELYHKYLERVNYIPVTTMQGYYIVQFLNGIKFYIAITKVRSIAMASLLLDNWTIDEKGIITANYDTLKSSDMKNFSIEMIRKTKTMTLQEYLKSDLAKERALHLDLSYRERYLKELHKAGLDGRLRPLKKE

SEQ ID NO: 27467 - protein, 510 aa, synthetic construct
MALHENSKIAVYSRKSREDRDSEDTLAKHRNELEYLIKRENFKNVQWFEEVVSGETIDERPMFSMLLPRIENGEFDAVCAVAMDRLSRGSQIDSGRILEAFKQSGTLFITPKKIYDLSIEGDEMLSEFESIIARSEYRAIKRRTINGKKNATREGRLHSGSVPYGYKWDKNLKAAVVVEEKKKIYRMMIKWFLEEEYSCTVIAEMLTELKVPSPSGRSIWYGEVVSEILSNDFHRGYVWFGKYKKSKSNNSIVQNKNLDEVLIAKGHHETMKTDEEHALILNRIEKLRTYKLAGRRLNMNTHRLSGIVRCPYCHKAQAIEQPKGRRKHVRKCLRKSAERTKECEETKGIHEEVLFQSIMKEIKKYNESLFSPTEQDVNDDSYTAQLIGLREKAVKKAKGRIERIKEMYLDGDISKTEYKEKLKISQETLQKAENDLAELIASTEFQNALSAETKKEKWSHHKVQEMIESTDGMSNSEINLILKMLISHITYTVEDLGDGTKNLNIKVYYN

SEQ ID NO: 27468 - protein, 507 aa, synthetic construct
MFFKETETQEIIKYEDYPYAVYARVSSEKDEQVTSIANQIDICHHWIEKNNYEWKDEAIQLDDGISGTVLLDRKAMQLILDKAQKRKLKMVVFKSISRLARDLKDALEIREVLLAHGVRVVTLEEGYDSLYEGKNSMKFEMFSMFAAQYPQTISVAASGALAAKARRGEHSGRVPFGFKKEGKFLAINEEEAKVVRFIFDLHNNHGYGHKRIVLKLNEELALGNIVKPQKTEFWQLSTVQTILKNPIYCGVFIANRHTQVKIGGRKKFIRNPKEKWTVYKDWCPKIISEEEYEKANNKEHKMRKKRFNPRNELRGMMKCGVCGCNMVVLPSYKYNQKREKKEFNYLKCSAYRRGGTALCVNHAPMQYKDLRAFVIKTLKQKGKKLKLDVKSDFEEQKKNRIKRTRIEIENAENKKKRLIELYLEDQLITKAEFQAKRKELEEQIEKLNDKLFMLEREEEETIDISNIKNAFAQLERTDQDLFEAFSALIDKLVIYEDGTVDFHYKFK

SEQ ID NO: 27469 - protein, 547 aa, synthetic construct
MPRLISYVRMSTSEQLKGFSLERQRNLIADFARKNGLSLEDSHILEDIGRSSFSDDTEQKELTKFFEDLGNDKFQKGDVFALENIDRLTRRGPIDALMKVNQIISKGLKLAIISDKEQRILEVIDVFSIITLSIDASRANKESQVKSDKGLQNWAFKRELAATHKIAMTAQAPAWIDTETYYIMDETKNKQVKRRRYVLNEDKAKTVRLIFELFQNGNGSLKIKNILNEQNIPTFKGIEYWEPSTISKIIRNPATYGMYQPKKQNTGKRDLVAIGEPIENYFPAVIGKEVFDQCQQITATNTTRKGRRGKLFTNLFTGLLKCADCDGPIHLLNPGIDKRAKNPKPVNYLICKKGKFTKECITKRLRYEDFENVMLKAIQEINLADVLHENNPLENLIKQQRNLQADIEKKKKLLENFERNFVENDGDLPSFMIAQAKQAEIDIKSLDSEIKSIRLEISQLNVYNSNIDNAIDELKVNGTYEARSKINLILHEIIKHIVIDFELDDYGVMFKNGAKRFINNGIIQNVFRTENTKQRDDEINEILNHKN

SEQ ID NO: 27470 - protein, 540 aa, synthetic construct
MPKAISYIRFSTKIQSVGDSTKRQSKYINDWLKRNPDYYLDESLRFQDLGISGFSGANAKSGAFGEFLAAVESGYIESGSVLLVESLDRVSRQDIDTAGEQLRKILRSGVEVVTLVDNEWYTRDSLKDSLSMIKAMLVMERAHEESAMKSTRLRSVWAAKRERAAKGEIMSKRCAAWLKVSEDRSRFEFIPENVKAVQRVFQLRLEGLSHVKIAKQMNDEGFSTLNQFKSVTGGWSQSSVTELLSNRSVIGFKVPSKSMAVKGVSEIPNYYPSIITDEQFYAVQQLKQGSGRKPSSDLPLLTNLFKGVLRCSECGFIVVVAGVSAKRSGIYKCSMKSEGRCNSVGFSRLQTDRALVQGLLYNANRLFLNRDNGSAIGALQGELEQLQKQRERLIKLAMLADDTESMAKDLKALNSQIKNAEKAVSEVHQREQSSQLETISHLDLTVKKDRIEAQIIIKRIVKEIRLNTAEKKCDVLLHNGLRLLNFPLDRVVDGAQWLEILPLIDGDEFDFEGFSTKPRHLAFEEAPEWVKELEFNSKIQ

SEQ ID NO: 27471 - protein, 506 aa, synthetic construct
MRTAITYLRFSSAIQGVEGADSTRRQNDLFKQWLKKNSDARIIASFSDEGLSGYKGKHLTGQFGDMLSRIEAGEFPEGTILLVEAIDRIGRLEHLETEALMNRILGNGIEIHTLQDGLIYTKDALADDLGISIIQRVKAYLAHQESKQKSFRVSQKWEQRAKLALAGEQRLTKMVPGWIDPETFKLNEHAETVRLIFKLLLDGESLHNIARHLQSNGIKSFSRRKDANGFSVHSVRTILKSETTIGTLPASQRNDRPAIPNYYEAAIDALTFSKAQEILDKNRKGRTPASNNPRTINIFKGLFRCECGATVHPTGVKNTYEGVYRCCRRFDGRCDIPQLKRKPFDKWMIENLLSMIAVGDDGESERKIASLQHEVEVVTARIKKATALLLEMDDITELKAQVKELNQKRTELQTTIDSMRRKASLTDKKLPQLKDIDLTTKAGRVECQLILSKHLESLTLGRGQVTVKLSNGTEIIVPTDPLPLTDGTAIFEIAEKNLLNIDVFQL

SEQ ID NO: 27472 - protein, 506 aa, synthetic construct
MRTAITYLRFSSAIQGVEGADSTRRQNDLFKQWLKKNSDARIIASFSDEGLSGYKGKHLTGQFGDMLSRIEAGEFPEGTILLVEAIDRTGRLEHLETEALMNRILGNGIEIHTLQDGLIYTKDALADDLGISIIQRVKAYLAHQESKQKSFRVSQKWEQRAKLALAGEQRLTKMVPGWIDPETFKLNEHAETVRLIFKLLLDGESLHNIARHLQSNGIKSFSRRKDANGFSVHSVRTILRSETTIGTLPASQRNDRPAIPNYYEAAIDALTFSKAQEILDKNRKGRTPASNNPRTINIFKGLFRCECGATVHPTGVKNTYEGVYRCCRRFDGRCDIPQLKRKPFDKWMIENLLSMIAVGDDGESERKIASLQHEVEVVTARIKKATALLLEMDDITELKAQVKELNQKRTELQTTIDSMRRKASLTDKKLPQLKDIDLTTKAGRVECQLILSKHLESLTLGRGQVTVKLSNGTEIIVPTDPLPLTDGTAIFEIAEKNLLNIDVFQL

SEQ ID NO: 27473 - protein, 527 aa, synthetic construct
MNENVMLIPARKRPGNSISNQKEKPKLKVVAYCRVSTDSEEQAGSYEMQVKHYTDYISRNSDWKFVGIYADDGISGTNTKKREGFNEMINDCMAGKVDMVITKSISRFARNTIDCLKYVRQLKDSNIPIIFEKENINTMEASGELLLTIMASLAQQESASLSQNVKMGLQFRYQEGKVQINTNWFLGYTKDADGNLIIDEEEAKVVKRIYREYLAGSSLRDIVTGLEKDRIKNGAGNLRWHVSNIRGILENEKYIGDALLQKTITTDFINKVRIKNDGTEPQYYVKDNHEPIIPKDIFIQVQEEMLRRANMFSGEGKKKKRVYSSKYALSSLCVCSKCGDIYRRIIWNNRGKRSVVWRCCTRVEHGPKSCDAATIPEEELQKAVVKAMNEILKTSVQTEKNLIKNIEKVVAGSNDEEIEAINRVIEEKQKELLVQVRAKKDYTDIANEVDNLKSEKHKMLVQKALNEDAKRRIKDMEEFLRSQSKDIKEYDEELVRKYIKQIKIYDDMFEITFKSGIEINIERIRID

SEQ ID NO: 27474 - protein, 521 aa, synthetic construct
MAKITKIEKRQQNNRVKKMRVAAYARVSTESAEQLLSLEVQKEHYENYIKANPYWEYAGLYFDEGISGTKIEKRESLLKLLDDCEKGKIDRVITKSISRFARNTVDCLEMVRKLTGLGVAIYFEKENIDTEHMSSELMLSILSSIAESESRSISENSKWSLKRRFENGTYVISYPPYGYENVDGKMVVVPSEAEIVKEIFRMAISGLGSYLIANELNKRGIATKKNSKWHSSTVQAILKNEKYTGDVIFQKTYTDENFNRHQNRGEKVRYMMKNHHEPIISHEDFELVKTVVGQRRKEKNIDGSDNKYQKRYALSGKVYCGECGSKVKRCMRYAQSGDYAAWTCVRHIEDKKSCRMKSIREEHIKAAYVQMMNKLIAGKNTMLKPFVDTLRGGNNKDRLRHILELDEKIEKLNEQAQVLTKLLSSGYIELDVFYAENNNISLELDELEKEKASLSSIISGDLNHLNEAQKLLRFINKSDCIKDFIDDTFSEFVEKITIEDRLKFTFHLKCGLNLTEEVIVK

SEQ ID NO: 27475 - protein, 515 aa, synthetic construct
MKKVITIEPAKQVTHKVELPRFTKRRVAGYARVSTDHEDQTTSYEAQMTYYTDYINSRSDWEFVKMYSDEGISGTNTKKRLGFQEMVEDALDGKIDLILTKSVSRFARNTVDSLSTVRKLKEAGVEIYFEKENIWTFDSKGELLITIMSSLAQEESRSISENVTWGRRRQLAEGQVTFSYSQVLGFKKSDTGGFEIDHEEAKIVRYIFHQVLLGNNPNKIARELTAQGIPTPQGKRQWSYGTVKRMLRNEKYKGDALLQKSFTTDFLTKSTKLNEGELPQYYVENNHEAIIKREVFDLVQVELDKLERKRQTSNIFTGRLFCGDCGSAFGSKVWHSTSKYKRTIYQCNAKYKGEHKCQTPHVTEEEIKGWFLSAINQLLSNRDEIIANTELLIDMAKDTSSLEARLDDLEHHLETIRQDIEDLVDRNARKAQNQDLTLVTAYQEKQKELQETRSVLEEQKSKQLSLDGFIQNFKEQDDLITDFNQELWQTSVERLDIKEDKKIFLTFKNGLRIDL

SEQ ID NO: 27476 - protein, 501 aa, synthetic construct
MKPNIKEVAIYLRKSRDESDGKEDVLAKHESLLLEYAKNHNLKYKIYKEIGSSEYIDSRPKMVRLLIDVSQKLYDAVLVVDLDRLSRGDLEEMGRISRVFRDSKTIVLTPTKTYDFNNEDEALINNFEMVFANHEFRMIKKRMIRGKQQGTKAGKWTNGRPPFPYVYNRLTKELDVDPDKVKVYELMKKMFLGEMKATYEIAWRLNELGFKTNRNSYWYENTVRRILKNEVHLGKVVYGKTSGSGSKKKLNANGVQIKDRSEWIIAEGSHQPLKTEEEHQRILAILESRRYTPKGTRTNVQVLSKLIYCGKCNRVMSFTGKASGKRYVKTCLTTDRFGYRCHNRSLNVEIIYAQLFLDLEQYEQQLLSHEPKEKQGDSSTLQLALQNKHEELERLEKGIERIKDLFIDEMIDKSEMQMRIEKQKQSMQTKKEEIRSIEQSLAVIGNVRTDDDRLYAIKEFKKAWNTEGISKRELNTLAKQLIDRIEYVREGNNVKINIKFL

SEQ ID NO: 27477 - protein, 644 aa, synthetic construct
MLRPICYERVSSIQQVEMGNGLDDQRSSLTAYLDKNSDKFTNDRVFITDAGLSAFKNANISPESQLGIFLQDVGNRKYGKGDALIVISLDRLSRRSSWAESTIQYIVNSGVEIHDISTNLVLRADDPMSKIHMEFIQHRSHNESLMKSVRAKLAWDNKILRALQNGEVISNRMPNWLKNVDNKYQVIPEQAELIVKCFEWYREGLSTGEIVKRIGKKWQMVTVSRLIRDRRLLGEHERYNGEVVPNVYPKIIDEDLFLTANRMMDRVMLEKKKPAEDLLLEPDVVREIFKLYESGLGSGAIVKRLPKGWSTVNVLRVLRDKKVVTMKIIDNLTFERVNEKLSRNGIANRIRKDITIAQDDYITNLFPKILKCGNCGGNIAIHYNHVRTKYVICRNREEKKICDAKSFQYTRIEKNILQLVKNIDFNKLMMEGQSDSDLLLASLREELSTLKKEEETYQIKINERKVAGKKTSLPLMTGLTEVQDRIEEIESDILNAKNIKEIPVFDFDINKVLDPMNVELRAKLRKELRLVLKSVKYWVFGKRIFVQLEYFNEILSHVLVIDNKRGGGEVLHEIVISESNGERVYTVNEEGKTVFIASVTSGTDMWSLAISRTKTLDDVGLYLNLLNRENFEIVVNEDLIDWID

SEQ ID NO: 27478 - protein, 539 aa, synthetic construct
MKAAIYSRKSMFTGKGDSVENQVQMCKDYGNRLNVDEYLIYEDEGYSGGNVNRPKFQELLQDVKKKKFDVLICYRLDRISRNVADFSSTLELLQDNNISFVSIKEQFDTSTPMGKAMVYIASVFAQLERETIAERVRDNMLELAKSGRWLGGQTPLGFESEKISYFDAEMKERTMYKLSPESKELELVKLIYNKYLETGSIHLTLKYLLSNNIKGKNGGEFASMSINDILRNPVYAKSNEMVLNYLEDKGMNICGTANGNGILIYNKRNSKYKKKSVNEWIAAVSKHKGIIPANTWLEVQKTLDKNSKKDTPRQGTSKKALLSGVLKCSRCGAPMRVTYGRKRKDGTSIYYYTCTMKAHSGKTRCDNPNVRGDYLEKNIITELKNLNSDVVIKGLEEHKKQLAATTENSIIKNISKEIEGKKKEMDSLINKLSKIESDIASEFVLSKVDSLGKEIKELEVNLLKRTDKKKENCDIELNIEIVLQAIKEFNDFFNSVESFKDDELTIQRKRYLLERAVDEIRIDGETNRIDIDLWRAKKK

SEQ ID NO: 27479 - protein, 522 aa, synthetic construct
MKRTFDHIKHVAIYLRISQEKRGENVETLENHRQILFEFCKENGYTYEEYGEVISGGKSEIEQRKELQRLLEDIEKFDAILCFELTRLSRNGLISQTVKQYCIDYDKPILTPYQSYDLANSETDRLLYDVGSMISSHEHGTIGKRSKANKKQMSKAGLHVSGNVPFGYRRNNETKKLEIYEEEAKVVRYIFKLHSEGLGSFKIRDILNSEGYKSATGKAFELPTIKRIIKNPTYKGTIVFNDRKKVKKNGKFVYEPVETIQVENAHPAIIPPDEWDRANRERLNRAKQAAVIREKPASTTGTTMLKDLIYCGVCGRKMRIFFDDRSSTGYVIQRCYHLYNGEKCPNRGIKLELVEKEVAKALPNFKSLLKKSVQRLQQEKEAGVETDIKRKIKQQERKLKDLNDQQDKLIDLALKGIFNEEEIRNKKQGLIDEIKYTESAIADLKEKMSNIDINDHINSLMNIIELIEKLPNMEPEEVNQSLKTFISKIVYTRVLPPELLNKSTRNKQRKEYPFEIEIEFIE

SEQ ID NO: 27480 - protein, 597 aa, synthetic construct
MSANQKPRAYSYIRFSNATQAAGDSYRRQREAAEAYCAQHGLELVDAKEYSFFDQGRSAYKARHLDDTGELARFLAFVQDGTIPKGSTLLVESLDRLSRERVKDALPRFLDLLNQGINVVTLADGRLYTSAYNELDLIISIVQMSRAHEESATKGKRVSAAWRRKQDSARTESLPIGKLRPLWLDYTPDGYIPNPERVEVVQRIYKLAQDGYGHRAIAAQLNQSGVPSFSADRKNASGLWGNSGIARMLSNRAVLGEYQPHQFIDGKRVPVGAPITGFYPPIITEDEFYAAQQAVSSRRQSQATKPGKRFNVWQGVSQCGICAGPMHISKRGNSRILRCFRNIQGLCPAKPILLPRSEEVFREILAKVDSLALVQSNQGKLQRQIAVCDGRIAEAQERIESLQSQILNLSGALPVSIISVMQRLEEDLARHQQERDSLKEDIAREQIINKDEFFSRLDLVSYEGRARANSLLKSLSVEVAIERIGELRGKKAPVHYRVSKEGFPIFSFLDTSGELEFLPLTTPSIAIAEVQGEVIRPEFHQYVLTRERQFAWEASERTRLEELCKTSSFKDVASAEGISVRELKRILAGERSNRSAP

SEQ ID NO: 27481 - protein, 569 aa, synthetic construct
MTDIKDVFKHHKSRVDKIDTIEEKTKKDTYGVLIRVSDVKQVTKDSIPMQRERAYKFIKERDGILYKEYIEEAVSASKNSIKQRPVLQELLKDIEDGKINKVIAYKRDRLSRIQKDWLTILDTIFKNNCDIEFTSAEEQPISSNPMVRGIMEPVLGFLANMESNNTSMRVKETRASIAAKGRWTGGTLPYGYDLNKNKEIVVIKEVIPSLIEIEDLYLNGIGVGSITRYMNGHEVKHLGKRKKGADIKRVVYKGRKTYWTESAVEGVLFNPFYAGIIEYSKEGNKHLQYDQDKFVREKGFHEAIRTLDKQEKIYEMKSKKSISAPRKFSTTFLLTGLVYCSECGSPIQSRTVLKKERNNEKYCYYVCASKQNKDKTSRNEICPSKNFKQNILEDFVVSKLLEMFDGFNKDNLKEEILKGIDQGKSTIETDIVSAQAELKELQSELVSIMNLMKRVSPESPLYEEIITDYEKSYTETLLKKKEIEEKLESLQQSIKENNDKEIEQNIVLDALKNFSIVFKEASQVQRKTLLDSIIKRIDISQDGKLNILCNFEIPKDEKSYVHPINRRPV

SEQ ID NO: 27482 - protein, 510 aa, synthetic construct
MALHESSRIAVYSRKSREDRDSEDTLAKHRNELEYLIKRENFKNVQWFEEVVSGETIDERPMFSMLLPRIENGEFDAVCAVAMDRLSRGSQIDSGRILEAFKQSGTLFITPKKTYDLSIEGDEMLSEFESIIARSEYRAIKRRTINGKKNATREGRLHSGSVPYGYKWDKNIKAAVVVEEKKKIYRMMIKWFLEEEYSCTVIAEMLNELKVPSPSGRSIWYGEVVSEILSNDFHRGYVWFGKYKKSKSNNSIVQNKNLDEVLIAKGHHETMKTDEEHALILNRIEKLRTYKVAGRRLNMNTHRLSGIVRCPYCHKAQAIEQPKGRKKHVRKCLRKSAERTKECEQTKGIHEEVLFQSIMREIKKYNEALFSPTEQDVNDDTYTTQLIGLREKAVKKAKGRIERIKEMYLDGDISKTEYKEKLKISQETLQKAENDLAELIASTEFQNALSAETKKEKWSHHKVQEMIESTDGMSNSEINLILKMLISHVTYTVEDLGDGTKNVNIKVYYN

SEQ ID NO: 27483 - protein, 452 aa, synthetic construct
MKAAIYIRVSTQEQIENYSIQAQTEKLTALCRSKDWDVYDIFIDGGYSGSNMKRPALNEMLSKLHEIDAVVVYRLDRLSRSQRDTITLIEEYFLKNNVEFVSLSETLDTSSPFGRAMIGILSVFAQLERETIRDRMVMGKIKRIEAGLPLTTAKGRTFGYDVIDTKLYINEEEAKQLRLIYDIFEEEQSITFLQKRLKKLGFKVRTYNRYNNWLTNDLYCGYVSYADKVHVRGIHEPIISEEQFYRVQEIFSRMGKNPNMNKESASLLNNLVVCSKCGLGFVHRRKDTVSRGKKYHYRYYSCKTYKHTHELEKCGNKIWRADKLEELIIDRVNNYSFASRNIDKEYELDSLNEKLKIEHAKKKRLFDLYINGSYEVSELDSMMNDIDAQINYYEAQIEANEELKKNKKIQENLADLATVDFNSLEFREKQLYLKSLINKIYIDGEQVTIEWL

SEQ ID NO: 27484 - protein, 452 aa, synthetic construct
MKAAIYIRVSTQEQIENYSIQAQTEKLTALCRSKDWDVYDIFIDGGYSGSNMNRPALNEMLSKLHEIDAVVVYRLDRLSRSQRDTITLIEEYFLKNNVEFVSLSETLDTSSPFGRAMIGILSVFAQLERETIRDRMVMGKIKRVESGLPLTTAKGRTYGYDVVDTKLYINEEEAQHLQLIYDIFEEEKSITFLQKRLKKLGFKVKSYSSYNKWLMNDLYIGYVSYSDKVHAKGIHEPIISEDQFYRVQEIFSRMGKNPNMNKESSSLLNNLIVCEKCGLGYVHRAKDTVSRGKKYHYRYYSCKTYKHTHELEKCGNKIWRADKLEEIIIDRVKNYSFATRNVDKEDELDSINAKLKVEHSKKKRLFDLYINGSYEVAELDKMMADIDAQINYYNSQIEANKELKRNKKVQESLAELATVDFDSLEFREKQIYLKSIINKIYIDGEQVTIEWI

SEQ ID NO: 27485 - protein, 552 aa, synthetic construct
MSKMRTALSTLVALNLRASYRGAVNAAFVHHSAGALISATESIDQSPSGALLHGIMSSIAEFYSRNLAHEVTKGMTQKVQKGGTPGRAPLGYLNVREFDSDGRESRTVRPDADRAPLITWAFHRYTEPSVSLSQLALELAQRGLTTRRTPQIPSRALTDRDLHKILTNSYYLGLVSFSGATYAGKHEPLIDQETWDKVQDALQSRRSGERRRRHDHYLKSTVYCGNCHNRLIVQMTRSKSGEIYPYFYCSARQAKRNDCTQKAVLIHVVEEKIVEEYKNSLRLDRIARADLERLFHDELVATRGDAERQRAQIKTDLERLEREQLRLLQAHYADAISLDLFKKEQDRIRAERTIAERDEARLTQDVADVEYAIGLALDVSAECASAYGWAPDHVKRLFNQVFLARVLVHADETITVELNEPFATIASTAFQLVSHEKSTTRKSGARTLTGFLEAEIGAVPTFFSGEGFSNDTLVPLEGLEPPTCSLGRSRSSIELQRLAEPVYPPCPAPREAPTGRPPQRSRSTPRPSSRRPSGTHLLTRTSPASMVSYNTN

SEQ ID NO: 27486 - protein, 584 aa, synthetic construct
MKKVEVIKASSSISKSKRGKMIECLRVAAYCRVSTDSEDQLNSYKSQKTYYTDLIQKNNEWIFVGIYADEAITGTQVTNRQDFQRMINDCMNGEIDMIVTKSISRFARNTLDTLKYVRMLKEKNIAVFFEDENINTLTMDGELLLVVLSSVAQQEVENISSNVKKGLKMKMKRGELVGFQGCLGYDYHPEDKSITVNKEEAEIVRYIFNRYIEGAGGSVIGKELENLGYLTKYGNATWAPTTVLGIIKNEKYKGDILLGKTFTVDPISKRRLENMGEEDQFYIRNHHEPIISEEVFDKAHEILNRRNKNRGKIGNGNTKREKYSRKYAFSCLLECGFCKGTLTRRKWHSGSEYSKVIWQCVTATKKGKKHCPESKGIPEQAIEDAFIESYRILSDDNKDVLDEFLKIMDETLSSSSINKQLTKVDKEIEAIEKKKSKLVDMRLEDIIDSDTYESKFSNMTNKQENLLKERIKLQKTATTEKDVKRRLREFKKTLENNEVLHEFDRHVFESIVEKVIVGGYDEDGNIDPAQLVFVYKTGFKNSLDGNQFKPARKNARGNRKSNKLCSQTNDDVKDLCSYTSTNTY

SEQ ID NO: 27487 - protein, 452 aa, synthetic construct
MKAAIYIRVSTQEQVENYSIQAQTEKLTALCRSKDWDVYDTFIDGGYSGSNMNRPALNEMLSKLHEIDAVVVYRLDRLSRSQRDTITLIEEYFLKNNVEFVSLSETLDTSSPFGRAMIGILSVFAQLERETIRDRMVMGKIKRIEAGLPLTTAKGRTFGYDVIDTKLYINEEEAKQLRLIYDIFEEEQSITFLQKRLKKLGFKVRTYNRYNNWLTNDLYCGYVSYKDKVHVKGIHEPIISEEQFYRVQEIFSRMGKNPNMNKESASLLNNLVVCSKCGLGFVHRRKDTVSRGKKYHYRYYSCKTYKHTHELEKCGNKIWRADKLEELIIDRVNNYSFASRNVDKEDELDSLNEKLKIEHTKKKRLFDLYISGSYEVSELDAMMSDIDAQINYYEAQIEANEELKKNKKIQENLADLATVDFNSLEFREKQLYLKSLINKIYIDDEQVTIEWL

SEQ ID NO: 27488 - protein, 520 aa, synthetic construct
MRKITTLDMTTFSVVKPKQKVAAYIRVSTSNEDQLISLEAQRQHYKILIENNDEWQLVDIYSDEGITGTKKDRRSGLLRLISDCENGKIDFILTKSISRFARNTIDCLELVRKLMDLGVHIYFEKENINTNSMESELMLSILSSLAENESVSLSENSKWSIRQRFKRGTYKLSYPPYGYDYIDEMVVVNEEQAQVVKRIFNSVLEGIGTERIARQLNEERIPTKRNGNWTGSTIRGIVKNEKYTGDVLLQKTFTDEHFNRKVNQGELDQYLIENHHEAIITHADFEAANRMLEYQASQKNVAAGSRKYLNRYPFSGKIECMECGDTFKRRIHTSTHSKYIAWCCSTHIKNKDECSMLFIREERIHQAFITMMNKLKFGYSYVLIPLSKQLETSNQDENYQMISEIEAQLEVTKDELNTLIQLMTKGFLEPAIFNQQKIELSQKNMKLKEEREQLLYLINDSSNQLSEVNRLIKYFKQGIFIDAFDEESFQDIVKKIIVYSPNEIGFHLNCGITLRERIDR

SEQ ID NO: 27489 - protein, 452 aa, synthetic construct
MKAAIYIRVSTQEQIENYSIQAQTEKLTALCRSKDWDVYDIFIDGGYSGSNMNRPALNEMLSKLHEIDAVVVYRLDRLSRSQRDTITLIEEYFLKNNVEFVSLSETLDTSSPFGRAMIGILSVFAQLERETIRDRMVMGKIKRIEAGLPLTTAKGRTFGYDVIDTKLYINEEEAKQLRLIYDIFEEEQSITFLQKRLKKLGFKVRTYNRYNNWLTNDLYCGYVSYKDKVHVKGIHEPIISEEQFYRVQEIFSRMGKNPNMNRDSASLLNNLVVCGKCGLGFVHRRKDTVSRGKKYHYRYYSCKTYKHTHELEKCGNKIWRADKLEELIIDRVNNYSFASRNVDKEDELDSLNEKLKIEHTKKKRLFDLYISGSYEVSELDSMMSDIDAQINYYEAQIEANEELKKNKKIQENLADLATVDFDSLEFREKQLYLKSLINKIYIDGEQVTIEWL

SEQ ID NO: 27490 - protein, 452 aa, synthetic construct
MKAAIYIRVSTQEQIENYSIQAQTEKLTALCRSKDWDVYDIFIDGGYSGSNMNRPALNEMLSKLHEIDAVVVYRLDRLSRSQRDTITLIEEYFLKNNVEFVSLSETLDTSSPFGRAMIGILSVFAQLERETIRDRMVMGKIKRIEAGLPLTTAKGRTFGYDVIDTKLYINEEEAKQLQMIYDIFEEEKSITSLQKRLKKLGFKVKSYSSYNNWLTNDLYCGYVSYADKVHTKGVHEPIISEEQFYRVQEIFSRMGKNPNMNRDSASLLNNLVVCGKCGLGFVHRRKDTVSRGKKYHYRYYSCKTYKHTHELEKCGNKIWRADKLEELIIDRVNNYSFASRNVDKEDELDSLNEKLKTEHVKKKRLFDLYISGSYEVSELDAMMADIDAQINYYEAQIEANEELKKNKKIQENLADLATVDFDSLEFREKQLYLKSLINKIYIEGEQVTIEWL

SEQ ID NO: 27491 - protein, 452 aa, synthetic construct
MKAAIYIRVSTQEQIENYSIQAQTEKLTALCRSKDWDVYDIFIDGGYSGSNMNRPALNEMLSKLHEIDAVVVYRLDRLSRSQRDTITLIEEYFLKNNVEFVSLSETLDTSSPFGRAMIGILSVFAQLERETIRDRMVMGKIKRIEAGLPLTTAKGRTFGYDVIDTKLYINEEEAKQLQMIYDIFEEEKSITTLQKRLKKIGFKVKSYSSYNNWLTNDLYCGYVSYADKVHTKGVHEPIISEEQFYRVQEIFSRMGKNPNMNRDSASLLNNLVVCGKCGLGFVHRRKDTVSRGKKYHYRYYSCKTYKHTHELEKCGNKIWRADKLEELIIDRVNNYSFASRNVDKEDELDNLNEKLKTEHKKKKRLFDLYISGSYEVSELDAMMADIDAQINYYEAQIEANEELKKNKKIQENLADLATVDFDSLEFREKQLYLKSLINKIYIDGEQVTIEWL

SEQ ID NO: 27492 - protein, 452 aa, synthetic construct
MKAAIYIRVSTQEQVENYSIQAQTEKLTALCRSKDWDVYDTFIDGGYSGSNMNRPALNEMLSKLHEIDAVVVYRLDRLSRSQKDTITLIEEYFLKNNVEFVSLSETLDTSSPFGRAMIGILSVFAQLERETIRDRMVMGKIKRIEAGLPLTTAKGRTFGYDVIDTKLYINEEEAKQLRLIYDIFEEEQSITFLQKRLKKLGFKVRTYNRYNNWLTNDLYCGYVSYKDKVHVKGIHEPIISEEQFYRVQEIFSRMGKNPNMNKESASLLNNLVVCSKCGLGFVHRRKDTVSRGKKYHYRYYSCKTYKHTHELEKCGNKIWRADKLEELIIDRVNNYSFASRNVDKEDELDSLNEKLKTEHTKKKRLFDLYISGSYEVSELDAMMSDIDAQINYYEAQIEANEELKKNKKIQENLADLATVDFDSLEFREKQLYLKSLINKIYIDGEQVTIEWL

SEQ ID NO: 27493 - protein, 452 aa, synthetic construct
MKAAIYIRVSTQEQVENYSIQAQTEKLTALCRSKDWDVYDIFIDGGYSGSNMNRPALNEMLSKLHEIDAVVVYRLDRLSRSQRDTITLIEEYFLKNNVEFVSLSETLDTSSPFGRAMIGILSVFAQLERETIRDRMVMGKIKRVESGLPLTTAKGRTYGYDVVDTKLYINEEEAQHLQLIYDIFEEEKSITTLQKRLKKLGFKVKSYSSYNNWLTNDLYCGYVSYADKVHAKGVHEPIISEEQFYRVQEIFSRMGKNPNMNKESSSLLNNLIVCEKCGLGYVHRAKDTVSRGKKYHYRYYSCKTYKHTHELEKCGNKIWRADKLEELIIDRVNNYSFASRNVDKEDELDSLNEKLKIEHTKKKRLFDLYISGSYEVSELDAMMSDIDAQINYYEAQIEANEELKKNKKIQENLADLATVDFNSLEFREKQLYLKSLINKIYIDDEQVTIEWL

SEQ ID NO: 27494 - protein, 452 aa, synthetic construct
MKAAIYIRVSTQEQIENYSIQAQTEKLTALCRSKDWDVYDTFIDGGYSGSNMNRPALNEMLSKLHEIDAVVVYRLDRLSRSQRDTITLIEEYFLKNNVEFVSLSETLDTSSPFGRAMIGILSVFAQLERETIRDRMVMGQIKRVESGLPLTTAKGRTFGYDVVDTKLYINEEEAKHLQLIYDIFEEEKSITFLQKRLKELGFIVKSYSSYNKWLMNDLYIGYVSYSDKVHVKGIHEPIISEDQFYRVQEIFSRMGKNPNMNKESSSLLNNLIVCEKCGLGYVHRAKDTVSRGKKYHYRYYSCKTYKHTHELEKCGNKIWRADKLEEIIISRVKNYSFATRNLDKEDELDSITEKLKTEHSKKKRLFDLYINGTYEVAELDKMMADIDAQINYYNSQIEANKELKRNKKVQESLAELATVDFDSLEFREKQIYLKSIINKIYIDGEQVTIEWI

SEQ ID NO: 27495 - protein, 538 aa, synthetic construct
MTNQSTNNLKITALYVRLSNDDEREGESNSIVNQKKMLSKYASDHNLRKTTFYIDDGVSGTTFNRKGFQAMITDIEAGIVGTVVVKDMSRFGRDYLQVGMYTDIMFPEHDIHFIAINDGVDSEQGDNEFTPFRNIINEWYAKDTSKKIRAVFKAKGLSGVPLTANPPYGYIKDPNNQTQWLVDDYSAMVVRRMFQLTMEGYGPTQIAKKFQAEKILVPTHYAISQGRKTNTVPSQSPYYWSDRTIAKLLEKPEYLGHTVNFRTTRKSYKDKRKIERDKKDWVIFENTHEAIIEQSVFDTVQELRKHKRRLTKQKELPLFSGLLFCADCGGKLYFCRGKGVTRNQENYICSSYRRRTTECTSHYIRSVVLEEVVTNNLRKTMAYIQANGKSFFGDVLKGDQQAKKKEAQNQQKQLHDAQKRITELDAIFPQLYEDMVSGRINSERFDKLSSNYEEEQVLLKQQVVDISKEIQTELDVNVYIRDLRKFVHKHVNFDSLTPELLHEMIDKIIVHTGKKIEVHYKFGLGELGNLVDEHIIKK

SEQ ID NO: 27496 - protein, 452 aa, synthetic construct
MKAAIYIRVSTQEQIENYSIQAQTEKLTALCRSKDWDVYDIFIDGGYSGSNMNRPALNEMLSKLHEIDAVVVYRLDRLSRSQRDTITLIEEYFLKNNVEFVSLSETLDTSSPFGRAMIGILSVFAQLERETIRDRMVMGKIKRVESGLPLTTAKGRTYGYDVVDTKLYINEEEAQHLQLIYDIFEEEKSITTLQKRLKKLGFKVKSYSSYNNWLTNDLYCGYVSYADKVHAKGVHEPIISEEQFYRVQEIFSRMGKNPNMNKESSSLLNNLIVCEKCGLGYVHRAKDTVSRGKKYHYRYYSCKTYKHTHELEKCGNKIWRADKLEELIIDRVNNYSFASRNVDKEDELDSLNEKLKIEHTKKKRLFDLYISGSYEVSELDAMMSDIDAQINYYEAQIEANEELKKNKKIQENLADLATVDFNSLEFREKQLYLKSLINKIYIDDEQVTIEWL

SEQ ID NO: 27497 - protein, 452 aa, synthetic construct
MKAAIYIRVSTQEQIENYSIQAQTEKLTALCRSKDWDVYDIFIDGGYSGSNMNRPALNEMLSKLHEIDAVVVYRLDRLSRSQRDTITLIEEYFLKNNVEFVSLSETLDTSSPFGRAMIGILSVFAQLERETIRDRMVMGKIKRIEAGLPLTTAKGRTFGYDVIDTKLYINEEEAKQLQMIYDIFEEEKSITSLQKRLKKLGFKVKSYSSYNNWLTNDLYCGYVSYADKVHTKGVHEPIISEEQFYRVQEIFSRMGKNPNMNRDSASLLNNLVVCGKCGLGYVHRRKDTVSRGKKYHYRYYSCKTYKHTHELEKCGNKIWRADKLEELIIDRVNNYSFASRNVDKEDELDSLNEKLKTEHTKKKRLFDLYISGSYEVSELDAMMSDIDAQINYYEAQIEANEELKKNKKIQENLADLATVDFDSLEFREKQLYLKSLINKIYIDGEQVTIEWL

SEQ ID NO: 27498 - protein, 452 aa, synthetic construct
MKAAIYIRVSTQEQIENYSIQAQTEKLTALCRSKDWDVYDIFIDGGYSGSNMNRPALNEMLSKLHEIDAVVVYRLDRLSRSQRDTITLIEEYFLKNNVEFVSLSETLDTSSPFGRAMIGILSVFAQLERETIRDRMVMGKIKRIEAGLPLTTAKGRTFGYDVIDTKLYINEEEAKQLQMIYDIFEEEKSITSLQKRLKKLGFKVKSYSSYNNWLTNDLYCGYVSYADKVHTKGVHEPIISEEQFYRVQEIFSRMGKNPNMNRDSASLLNNLVVCSKCGLGFVHRRKDTVSRGKKYHYRYYSCKTYKHTHELEKCGNKIWRADKLEELIIDRVNNYSFASRNVDKEDELDNLNEKLKTEHTKKKRLFDLYISGSYEVSELDAMMADIDAQINYYNSQIEANEELKRDKKVQESLAELAAVDFDSLEFREKQIYLKSIINKIYIDGEQVTIEWI

SEQ ID NO: 27499 - protein, 452 aa, synthetic construct
MKAAIYIRVSTQEQTENYSIQAQTEKLTALCRSKDWDVYDTFIDGGYSGSNMKRPALNEMLSKLHEIDAVVVYRLDRLSRSQRDTITLIEEYFLKNNVEFVSLSETLDTSSPFGRAMIGILSVFAQLERETIRDRMVMGKIKRIESGLPLTTAKGRTFGYDVVDTKLYINEEEAKQLQMIYDIFEEEKSITFLQKRLKKLGFKVRTYNRYNNWLTNDLYCGYVSYKDKVHVKGIHEPIISEEQFYRVQEIFSRMGKNPNMNKESASLLNNLVVCSKCGLGFVHRRKDTVSRGKKYHYRYYSCKTYKHTHELEKCGNKIWRADKLEELIIDRVNNYSFASRNVDKEDELDYLNEKLKIEHAKKKRLFDLYINGSYEVSELDAMMADIDAQINYYEAQIEANEELKKNKKIQENLADLATVDFDSLEFREKQLYLKSLINKIYIDDEQVTIEWL

SEQ ID NO: 27500 - protein, 452 aa, synthetic construct
MKAAIYIRVSTQEQIENYSIQAQTEKLTALCRSKDWDVYDIFIDGGYSGSNMNRPALNEMLSKLHEIDAVVVYRLDRLSRSQRDTITLIEEYFLKNNVEFVSLSETLDTSSPFGRAMIGILSVFAQLERETIRDRMVMGKIKRIEAGLPLTTAKGRTFGYDVIDTKLYINEEEAKQLRLIYDIFEEEQSITFLQKRLKKLGFKVRTYNRYNNWLTNDLYCGYVSYADKVHVRGIHEPIISEEQFYRVQEIFSRMGKNPNMNKESASLLNNLVVCSKCGLGFVHRRKDTVSRGKKYHYRYYSCKTYKHTHELEKCGNKIWRADKLEELIIDRVNNYSFASRNIDKEDELDSLNEKLKIEHAKKKRLFDLYINGSYEVSELDSMMNDIDAQINYYEAQIEANEELKKNKKIQENLADLATVDFSSLEFREKQLYLKSLINKIYIDCEQVTIEWL

SEQ ID NO: 27501 - protein, 523 aa, synthetic construct
MRQVITYLRFSSKPQERGDSIRRQKGLFERWLKDNPDAKVVDEFSDEGASAYHGHHLKGDFGRMLQKIQDGKYLSGQTVLLVESETRLNRQKARNTENLVDLITGKGVDVICLESGKIYTSTNIDDLDTSIQLKIAAHIAHQQSKEKSIKVSAAWEHRAQLALEGKQQLTKNVPGWIDPDTRKLNEHSSTVVTIFDLLLSGESLHNIARYLQANNFKSFSRREKANGFSVHSVRTILRSESTVGTLAASKRNDRPAIPNYYEPAIDVATFNKAQEILSKNRVGRAPASDNPITINLFKGIIRCQCGASVHPTGVKSTYQGVYRCNNVPDGRCNVPTIKRKPFDKWMLDNIIGFLERSDGNNTDKRKAEIEYQISLVTSKLKKATPLLLELDDVTELKEQVKELNIQRSNMQSELDELNQRETLSDKPLHHLSEIDLTTKAGRVEAQLILSKFVQSIELQREMIIITLRNGTVIGKSRDLSPVLSQDLMKQVVSSPSPTDIDMFSVITSDEEFRKSGKQVTKRS

SEQ ID NO: 27502 - protein, 548 aa, synthetic construct
MELKNIVNSYNITNILGYLRRSRQDMEREKRTGEDTLTEQKELMNKILTTIEIPYELKMEIGSGESIEGRPVFKECLKDLEEGKYQAIAVKEITRLSRGSYSDAGQIVNLLQSKRLIIITPYKVYDPRNPVDMRQIRFELFMAREEFEMTRERMTGAKYTYAAQGKWISGLAPYGYQLNKKTSKLDPIEDEAKVVELIFDLFLNGLNGKDYSYNAIATHLTNLQIPSPAGKKKWNRFTVKAILENEVYIGTVKYKVREKEKDGKRTIRPENEQIIVPDAHTPIIDKDQFEEANKKIENKIPLLPNRSDYKLNELAGVCICADCGGPLSKYEAKRKRQNKNGTESLYHVKVLRCLNNKCMNVRYNDVEEAILDYFRLLQSLNDKELTNLIEEMVHTHENKNNIKSQKQINEQFEQREKELQNKLNFIFDKYESGIYSDEIFLQRKATLDKEMKDLKKAKDELNGLTDIKSGIDISKVRGQMKNLIQIYETSNDKEEKNHLLRIALEKVIVKMTAKRKGPVPAQFEITPILRFDLLTGDTLTGTEESSFS

SEQ ID NO: 27503 - protein, 452 aa, synthetic construct
MKAAIYIRVSTQEQVENYSIQAQTEKLTALCRSKDWDVYDIFVDGGYSGSNMNRPALNEMLSKLHEIDAVVVYRLDRLSRSQKDTITLIEEYFLKNNVEFVSLSETLDTSSPFGRAMIGILSVFAQLERETIRDRMVMGKIKRVESGLPLTTAKGRTFGYDVVDTKLYVNKEEAQHLQLIYDIFEEEKSITFLQKRLKKLGFKVKSYSSYNKWLMNDLYIGYVSYGDKVHVKGVHEAIISEEQFYRVQEIFSRMGKNPNMNRDSASLLNNLIVCEKCGLSFVHRVKDTVSRGKKYRYRYYSCKTYKHTHELEKCGNKIWRADKLEEIVIDRVKNYSFATRNLDKEDELDSINAKLQVEHSKKKRLFDLYINGSYEVAELDKMMADIDAQINYYNSQIKTNEELKRNKKVQESLAELATVDFDVLEFREKQIYLKSIINKIYIDGEQVTIEWI

SEQ ID NO: 27504 - protein, 452 aa, synthetic construct
MKAAIYIRVSTQEQVENYSIQAQTEKLTALCRSKDWDVYDTFIDGGYSGSNMNRPALNEMLSKLHEIDAVVVYRLDRLSRSQRDTITLIEEYFLKNNVEFVSLSETLDTSSPFGRAMIGILSVFAQLERETIRDRMVMGQIKRVESGLPLTTAKGRTFGYDVVDTKLYINEEEAKHLQLIYDIFEEEKSITFLQKRLKELGFIVKSYSSYNKWLMNDLYIGYVSYSDKVHVKGIHEPIISEDQFYRVQEIFSRMGKNPNMNKESSSLLNNLIVCEKCGLGYVHRAKDTVSRGKKYHYRYYSCKTYKHTHELEKCGNKIWRADKLEEIIISRVKNYSFATRNLDKEDELDSITEKLKTEHSKKKRLFDLYINGTYEVAELDKMMADIDAQINYYNSQIEANKELKRNKKVQESLAELATVDFDSLEFREKQIYLKSIINKIYIDGEQVTIEWI

SEQ ID NO: 27505 - protein, 384 aa, synthetic construct
MKAAIYIRVSTQEQIENYSIQAQTEKLTALCRSKDWDVYDIFIDGGYSGSNMNRPALNEMLSKLHEIDAVVVYRLDRLSRSQRDTITLIEEYFLKNNVEFVSLSETLDTSSPFGRAMIGILSVFAQLERETIRDRMVMGKIKRIEAGLPLTTAKGRTFGYDVIDTKLYINEEEAKQLQMIYDIFEEEKSITTLQKRLKKLGFKVKSYSSYNNWLTNDLYCGYVSYADKVHTKGVHEPIISEEQFYRVQEIFSRMGKNPNMNRDSASLLNNLVVCGKCGLGFVHRRKDTVSRGKKYHYRYYSCKTYKHTHELEKCGNKIWRADKLEELIIDRVNNYSFASRNVDKEDELDSLNEKLKTEHVKKKRLFDLYISGSYEVSELDAMMG

SEQ ID NO: 27506 - protein, 452 aa, synthetic construct
MKAAIYIRVSTQEQIENYSIQAQTEKLTALCRSKDWDVYDIFIDGGYSGSNMNRPALNEMLSKLHEIDAVVVYRLDRLSRSQRDTITLIEEYFLKNNVEFVSLSETLDTSSPFGRAMIGILSVFAQLERETIRDRMVMGKIKRIEAGLPLTTAKGRTFGYDVIDTKLYINEEEAKQLQMIYDIFEEEKSITTLQKRLKKLGFKVKSYSSYNNWLTNDLYCGYVSYADKVHTKGVHEPIISEEQFYRVQEIFSRMGKNPNMNRDSASLLNNLVVCSKCGLGFVHRRKDTVSRGKKYHYRYYSCKTYKHTHELEKCGNKIWRADKLEELIIDRVNNYSFASRNVDKEDELDSLNEKLKTEHAKKKRLFDLYISGSYEVSELDGMMADIDAQINYYEAQIEANEELKKNKKIQENLADLATVDFDSLEFREKQLYLKSLINKIYIDGEQVTIEWL

SEQ ID NO: 27507 - protein, 435 aa, synthetic construct
MKAAIYIRVSTQEQIENYSIQAQTEKLTALCRSKDWDVYDIFIDGGYSGSNMNRPALNEMLSKLHEIDAVVVYRLDRLSRSQRDTITLIEEYFLKNNVEFVSLSETLDTSSPFGRAMIGILSVFAQLERETIRDRMVMGKIKRIEAGLPLTTAKGRTFGYDVIDTKLYINEEEAKQLQMIYDIFEEEKSITTLQKRLKKIGFKVKSYSSYNNWLTNDLYCGYVSYADKVHTKGVHEPIISEEQFYRVQEIFSRMGKNPNMNRDSASLLNNLVVCGKCGLGFVHRRKDTVSRGKKYHYRYYSCKTYKHTHELEKCGNKIWRADKLEELIIDRVNNYSFASRNVDKEDELDSLNEKLKIEHTKKKRLFDLYISGSYEVSELDAMMSDIDAQINYYEAQIEANEELKKNKKIQENLADLATVDFNSLEFREKQIYLNH

SEQ ID NO: 27508 - protein, 452 aa, synthetic construct
MKAAIYIRVSTQEQVENYSIQAQTEKLTALCRSKDWDVYDTFIDGGYSGSNMNRPALNEMLSKLHEIDAVVVYRLDRLSRSQKDTITLIEEYFLKNNVEFVSLSETLDTSSPFGRAMIGILSVFAQLERETIRDRMVMGKIKRVESGLPLTTAKGRTYGYDVVDTKLYINEEEAQHLQLIYDIFEEEKSITFLQKRLKKLGFKVKSYSSYNKWLMNDLYIGYVSYSDKVHAKGIHEPIISEDQFYRVQEIFSRMGKNPNMNKESSSLLNNLIVCEKCGLGYVHRAKDTVSRGKKYHYRYYSCKTYKHTHELEKCGNKIWRADKLEEIIIDRVKNYSFATRNVDKEDELDSINAKLKVEHSKKKRLFDLYINGSYEVAELDKMMADIDAQINYYNSQIEANEELKRDKKVQESLAELATVDFDSLEFREKQIYLKSIINKIYINDEQVTIEWI

SEQ ID NO: 27509 - protein, 452 aa, synthetic construct
MKAAIYIRVSTQEQIENYSIQAQTEKLTALCRSKDWDVYDIFIDGGYSGSNMNRPALNEMLSKLHEIDAVVVYRLDRLSRSQRDTITLIEEYFLKNNVEFVSLSETLDTSSPFGRAMIGILSVFAQLERETIRDRMVMGKIKRIEAGLPLTTAKGRTFGYDVIDTKLYINEEEAKQLQMIYDIFEEEKSITSLQKRLKKLGFKVKSYSSYNNWLTNDLYCGYVSYADKVHTKGVHEPIISEEQFYRVQEIFSRMGKNPNMNRDSASLLNNLVVCGKCGLGFVHRRKDTVSRGKKYHYRYYSCKTYKHTHELEKCGNKIWRADKLEELIIDRVNNYSFASRNVDKEDELDSLNEKLKIEHTKKKRLFDLYISGSYEVSELDAMMSDIDAQINYYEAQIEANEELKKNKKIQENLADLATVDFNSLEFREKQLYLKSLINKIYIDDEQVTIEWL

SEQ ID NO: 27510 - protein, 558 aa, synthetic construct
MTKLYSYIRFSSTRQADSSSFERQKRTAKEIAEKYGLELVTSYQDLGVSAFKGANSKTGALSRFMEEIGRSVPVGSWLVVENLDRLSRQSIIEAQELFLSIIRRGITIVTGMDGKVYSKESVNANPLDLLLSVMMFARANEESQTKRNRTNSSALLKIKAHQQNPQSPAVAIEEIGKNMWWTDTTSGRVLPHPVYFPVLQKIVQLRQEGHSAGAILDYLNEHHEPPAPTSNKKHGKWSRAMVSRLFHTKALIGVKTVNVDGVEYELRDYYPRVLSDSEFYFLRKNIVKKAWDYNHDKEKVIPLLSGIGVLRCVHCGATMVKQTAANGKREQYRYCCDGRKSGRTDCPYPNWGFRAVTLEGAVLQLLADKIWIAEDKTNPIPEIQVKIDEISRKIDNLINLSAMMGATKELANQITDLNSQREALHEEIRLFEREMYSVDSQGWDKLAQFDLSDVQNEERLKVRMKIKGALHEIECSRIDSKKNLFVLVYLDGLRQRLVIENNRGLKKGQVFVDLKTINDRQILESAGMVLHPCIEMIIDADWKAPEEIPGLLSEEFGI

SEQ ID NO: 27511 - protein, 479 aa, synthetic construct
MRYAVYVRVSTDKDEQVSSVENQVDICRYWIEKNGYEWDQNAVYFDDGISGTAWLERHAMQLILQKVRKNELDTVVFKSIHRLARDLKDALEIKEILLGHGVRLVTIEEGYDSYYEGNNDMKFEIYAMFAAQLPKTLSTSISAALSAKVRRGEHTGTIPFGYDRIDKKLIINDEEALLVKEMFDWYEDGRGYRMIANNLNKKGCRTRFGNLWSEASVKTIVTNSLYTGEHVMHKYKTVKIDGKKKTVKNPKEKWLVFENHHDAIISKEQWERINPVSGVKDKKTKSDYRNEFRGIVWCAHCGKRVRAIYAGVRSKYERVYMKCSTYKAYGTCVNHIPIRYEDFRNLILERLKQKQEYIETRLVAQIKDKLQGKIAKSKKTIKQLESKKEKLLELYMDSFIDKETFVNRNRKLEDEMTAQELQLLKLKDKDIQNRETKDIQDAFMLLQEEQDLHKAFQKLIKKIVFYQDGKLDIEYTFDI

SEQ ID NO: 27512 - protein, 522 aa, synthetic construct
MKLSHILQSKMNAAFYGRHSTDKQDMDMQLNSVMEIIRKYECIHTHSFLDKAVSARKNKMTSRKELENMFKSAKRKEFDFVIVYKSDRLARDPLEHQTIRIVMKTLGIPIIISSTESVYNTDTDLIVQLMEDGFTKYEVDTIIARTQSGLENKAKQGKWLGGKPPFGYTYDKTNGQFIEYPEELCYVREIFNLYVNGHGFQYIANTLPNGSRRGKDWGKENVKAIVLNPFYCGLLSWRRQTDGKQNARDIWIEAPNHYVKPIISRTTWESCWHIYSEKRNGNMVPKHYKTSFLLQGLLSCENCQELMKTKNQQTVSSTNKQYGGKIYFCTNCKLRIDADLLHDKVVNQTLTDVKISGFHNVYHAIEQKIQYEIQELNSNIQKHQRLFENYTIKLHNITEELKQRMKNNDDKRFLKSLAIYRLDVQRKLDGVTQQINDFKQQITLKEKVEKSKETWLHTLNEVFQDDVTLQEISDMDKRRFLLPLIQSVSIKENKKRNEYDISLQLRTDFSKRDVKNQISLIL

SEQ ID NO: 27513 - protein, 515 aa, synthetic construct
MYRPQELDVFIYLRKSRKDLEEEKKVMEHGQHYDTLERHRTQLLELAHKEHHNIIDIFEEVVSGEYISERPMMQKLLREVETGIADAVLVMDLDRLGRGDMVDQGTIYRVFRYSETFIITPTEVINPNDENQELTFSIKSLIAREELKTIVKRMQRGRRASAKEGKSISRVPPYGYLRDNNLKLYPDPEKSWVISKIFELMARGTGRQAIAQELDRLGLAPPEGEYWNPSTISSIIKNEVYLGHIIWGKIRYTKQNGKYSRKKVSKERWQRHDNAHPPLVSEELFQRANTAHSKRWRPPTIKTKKLSNPLAGILLCELCGHSMLYQPRKDRPNPQVRCIQPSCKGIQKGAALALVEQRILDGLKQIIENFEIQENMIQKKKSSNNIHLQQKALEKKEQQINDLQKQKGNLHDLLEKSVYDVDTFFERQKSITARLKTTKEEIEELKHEVEKILEKEKHLHEFVPKVKNVLEAYFTTSHIERKNLLLKSVFEKVTYLRKKEWKRKDEFIVELYTKI

SEQ ID NO: 27514 - protein, 662 aa, synthetic construct
MSIRSKFNEDEIRKLDKGKYMNNSSFDDIMQYSDMVFDVAALIRESTDSEEQKRAFAVQKDMVLDLIEKRDNFRLDNNNVFEELGKSGLRASGRPAFQLMRHRASQHKFDILIVDAVSRLARNIRELFDVVYDFQELGIGIIILKERYWTFNMTHTDIVRLAIDGGIAQAESMNTGRRVENHMLDLAKKGQLLGGDMYGYRLKKAVDDMGNTMPNKNSLVQEPVEAYVVKTIFDLYTSDDKDIVKTSSSICKYLIENNMRTYKGDLRWTPSKVIRILANTKYMGYQLPEKSKVTDTVRKKKVLTHIEPVKDVLDANGNLIEKGNLVRISCEPIVPEETWWKAYDRRMSRSSKGSENIKGRKSGLRVSADALGRKAYCSCGYCLSRQYTHTATETKSATYRYKCRWQVDHASKYTIEAALKENNVVCDNPAVSDVKLWLCEKQVFSYVFKNGKSAVLQALEIIEHCKQEEEVLEDGTSLQTLESRRNELKKKRKKLLELSLEDDYDMNDYKELKAEIDDEIATVEDSIAHFEIEKAKQQKKVFNIEDIRQRLNTIINLRDYKVSDEVIDMFVERIIYRGVVDGNDEFVWVMNLSGECTDTSAKYKIRGYDKDYADSLKSDKNFNIVARMLIPMEECKRFCQEEAGRRFKKKYWNPITIKIAIQ

SEQ ID NO: 27515 - protein, 604 aa, synthetic construct
MKKVFVYHRVSSDQQLDGSGIARQAELLEGYLERTGICADMDDPAPVVLSDQGVSAFKGLNISEGELGAWMEQVRNGMWDSSILVVESIDRFSRQNPFDVMGYINALMAHNVAIHDVMANIVISRSNSKDLPFVMMNAQRAYDESKYKSDRIRKGWAKKREQAFNKGTIVTNKRPQWIEVENDKYVLNHKAAVVKEIFALYQTGMGCPTIAKQLQTKEGEQYKFNRPWTGELVHKILTNRRVTGKIFISEIIRNHDDIENPVTQKKYDMDVYPVVINEEEFELVQELLRSRRPNAGRVTVKKDGQEEVLIKSNLFSGIARCTECGGPMYHNVVRAKRTPKKGDPKIEEYRYIRCLNERDGLCENKAMTYETVERFVVEHLLGMDLNTVIKEHEFNPEIEVLRIQIDQVKDQITNYENGIERRKSAGKPISFDMREELDDAKSALERLLARQASLATVQVDVPVLQDVNVTELYDVNNVDIRTRYENELNKIVSNIRLKRNGKSYTIDINYKQNKLKRHVLFVENKKKEQTLISEVIIEDVDSAKFYYTPSFMIMLKDGEIRFQQTNEDLSIIDYSLLLNYIDAVDRNDAVGVWMRNQFNFLTSN

SEQ ID NO: 27516 - protein, 557 aa, synthetic construct
MTKLYSYIRFSSMRQSDGSSFERQIRMAKEIADKHGLELVNDYQDLGVSAFKGANSKTGALARFLDEIGRSVPVGSWLFIENLDRLSRQDIISAQELFLSIIRRGITIVTGMDNKIYSLDTVTANPMDLMFSILLFIRGNEESQTKRNRTNSSALLKIKAHQQNPQSPAVAIEEIGKNMWWTDTSTGYVLPHPVYFPIVQKIVQMKQDGHSTGSVLEYLNEHHEPPAPTSNKKHEHWSKAMVSRLFHTKALIGIKTVNVDGVEYELKDYYPRVMSDSDFYYLKQNVAKKAWDYGTTSEKVIPLLSGIGVLRCHHCGATMVKMSAANGKREQYRYCCDGRRSGRTDCINPNWGFRASILEEAVLRLLADKIWTTEDKTNPIPEIRIKLDDISRQIDNLIALSAMTGATKELAEQITALNSQREALHEEIGRWEREMYSVDSQGWEKLAEFDLGDVANEERLKVRMKIKGALREIECSKIDGKKNLFVLVYLDGLRQRIVIENARGAKPAKVYVDLKSINDRQILESNGMILHPCIEMLTDPNWEPEKEIPGPLQEYGI

SEQ ID NO: 27517 - protein, 624 aa, synthetic construct
MIKTFIYSRVSSQEQLSGGGLDRQETDVREYVTRNGLDQYEIVAMVDRGISGYDGSNMRDGELGKWYKDAITGMYWGSHLVLEAIDRFSRRDPMLAMEDFTVLVNKGGIKVHIVKFNTFINGDNLPMLSMMMNLAHSESKQKSDRISKGWQRRRRMALDNGTAITARTPYWIDVRDNEYRLNNSSIAVEEAFAMYKQGLSCGLIAKKLNELKHYFPYMWTKTAVQHIVDGLNTSGIIDAPRAIKTIKAFYKSGFSVEDIAKKMNAEFQFMKEWNAPAVHKLLQNKSVTGLVEIQKRKLIQEFDSDGKPLELRTKSEGEKYFESIYPQIISIDDFELIQKLLESNRKVDTKTGKGQTTGGTVTQNEDGELVKQFILSSLCRCYKCGGAMFNNIVRSKRKNGKVDTYSYLRCLNERDAHCDVKALNYPVIERAIIEHVKGLNFDTMFKGTNNSELELLKTREVELLRDIATYEDAIAARKAAGKNTSPVLVTSLVDAQDDLEALQKKIRAISGVTVNAEELTSLNESVFDVAEYELRNMVELELQKIIKRITFNCTEKNIYFITIQYNTGTVLQHGLKVDKKKGVIETYELHEGNKGYVSNGEVITPALIEAAESKNIGIFEGKVM

SEQ ID NO: 27518 - protein, 558 aa, synthetic construct
MTKLYSYIRFSSMRQSDGSSYERQIRMAKEIADRYNLELVNDYQDLGVSAFKGANSKTGALSRFLDEIGRSIPVGSWLFIENLDRLSRQDIISAQELFLSIIRRGITIVTGMDNKIYSIETVTANPMDLMFSILLFIRGNEESQTKRNRTNSSALLKIKAHQQNPQNPAVAIEEIGKNMWWTDTTSGRVLPHPVYFPVLQKIVQLRQEGHSAGAILDYLNEHHEPPAPTSNKKHGKWSRAMVSRLFHTKALIGVKTVNVDGVEYELRDYYPRVLSDSEFYFLRKNIVKKAWDYSHDKEKVIPLLSGIGVLRCVHCGATMVKQTAANGKREQYRYCCDGRKSGRTDCPYPNWGFRAVTLEGAVLQLLADKIWIAEDKTNPIPEIQVKIDEISRKIDNLINLSAMTGATKELANQITDLNSQREALHEEIRLFEREMYSVDSQGWDKLAQFDLSDVQNEERLKVRMKIKGALHEIECSRIDSKKNLFVLVYLDGLRQRLVIENNRGLKKGQIFVDLKTINDRQILESVGMVLHPCIEMIIDADWKAPEEIPGLLSEEFGI

SEQ ID NO: 27519 - protein, 624 aa, synthetic construct
MIKTFIYSRVSSQEQLSGGGLDRQETDVREYVTRNGLDQYEIVAMVDRGISGYDGSNMRDGELGKWYKDAITGMYWGSHLVLEAIDRFSRHDPMLAMEDFTVLVNKGGIKVHIVKFNTFINGDNLPMLSMMMNLAHSESKQKSDRISKGWQRRRRMALDNGTAITARTPYWIDVRDNEYRLNNSSIAVVEAFAMYKQGLSCGLIAKKLNELKHYFPYMWTKTAVQHIVDGLNTSGIIDAPRAIKTIKAFYKSGFSVEDIAKKMNAEFQFMKEWNAPAVHKLLQNKSVTGLVEIQKRKLIQEFDSDGKPLELRTKSEGEKYFESIYPQIISIDDFELIQKLLESNRKVDTKTAKGQTTGGTVTQNEDGELVKQFILSSLCRCYKCGGAMFNNIVRSKRKNGKVDTYSYLRCLNERDAHCDVKALNYPVIERAIIEHVKGLNFDTMFKGTNNSELELLKTREVELLRDIATYEDAIAARKAAGKNTSPVLVTSLVDAQDDLEALQKKIRAISGVTVNAEELTSLNESVFDVAEYELRNMVELELQKIIKRITFNCTEKNIYFITIQYNTGTVLQHGLKVDKKKGVIETYELHEGNKGYVSNGEVITPALIEAAESKNIGIFEGKVM

SEQ ID NO: 27520 - protein, 506 aa, synthetic construct
MRHVITYLRYSSAIQGAEGADSTRRQNDLFKQWLKKNSDAQVVASFNDEGLSGYKGKHLSGQFGDMLSRIESGEFSEGTILLVEAIDRIGRLEHLETEALMNRILGNGIEIHTLQDGLIYTKDALADDLGISIIQRVKAYIAHQESKQKSFRVSQKWGQRAKLALAGKQRLTKMVPGWIDPETFEVNEHAETVRLIFKLLLDGESLHNIARHLQSNGIKSFSRRKDANGFSVHSVRTVLRSESVIGTLPASQRNDRPAIPNYYEAAIDASTFNKAQEILDKNRKGRTPASDNPLTINIFKGLFRCQCGASVHPTGTKNKYAGVYRCNNHLDGRCDVPPLKRKPFDKWMIDNFLGMIDVGNDGESERKIAALQHEVEIVTARIKKATALLLEMDDIDELKIQIKELNQRRTELQTTIDSMRRKTSLTDKELPQLKDIDLTTKAGRVECQLILSKHLKGLTLGKDSVTVTLQNDTEITIPTDPLPLNDGTSIFEIAEKELLEIDAYQL

SEQ ID NO: 27521 - protein, 624 aa, synthetic construct
MIKTFIYSRVSSQEQLSGGGLDRQETDVREYVTRNGLDQYEIVAMVDRGISGYDGSNMRDGELGKWYKDAITGMYWGSHLVLEAIDRFSRRDPMLAMEDFTVLVNKVGIKVHIVKFNTFINGDNLPMLSMMMNLAHSESKQKSDRISKGWQRRRRMALDNGTAITARTPYWIDVRDNEYRLNNSSIAVVEAFAMYKQGLSCGLIAKKLNELKHYFPYMWTKTAVQHIVDGLNTSGIIDAPRAIKTIKAFYKSGFSVEDIAKKMNAEFQFMKEWNAPAVHKLLQNKSVTGLVEIQKRKLIQEFDSDGKPLELRTKSEGEKYFESIYPQIISIDDFELIQKLLESNRKVDTKTGKGQTTGGTVTQNEDGELVKQFILSSLCRCYKCGGAMFNNIVRSKRKNGKVDTYSYLRCLNERDAHCDVKALNYPVIERAIIEHVKGLNFDTMFKGTNNSELELLKTREVELLRDIATYEDAIAARKAAGKNTSPVLVTSLVDAQDDLEALQKKIRAISGVTVNAEELTSLNESVFDVAEYELRNMVELELQKIIKRITFNCTEKNIYFITIQYNTGTVLQHGLKVDKKKGVIETYELHEGNKGYVSNGEVITPALIEAAESKNIGIFEGKVM

SEQ ID NO: 27522 - protein, 606 aa, synthetic construct
MVASVLVKPGSGNPPVPTGDMHSAPRNPIAGTVYETRTLRGVRCVRLSVLTDETTSPERQREADDRVAAELNIDFGTGDALREAVDLDVSASTFGPFERPELGGWLNRPDEYDALVWWRFDRAIRSMAHMHELAKWAREHRKMLVFAEGIGGGKLVFDFRNPMDPMAEFQMMMLAFAAQVESQSIKDRVTGAMAAIRRMPLRWRGGGRPPYGYMPAAMPKEHGGIGWTLVPDPDAVVIIERIVRELLEGATVSAVAAGLNVDGKASPRDHWAVKMEREKGGKTGGAKGSHVVREAFKWTPAVISRMLRNPTMLGWKMHKGKPVRDAEGNPIMATETPIMTRTEFDRIGALLASRSIENGERKDTDALLLRVIHCNSCEGRMYMSKPTKNGASVNPFYKCNSHARGDQCALPASIRASWVDEYVEAEFLRVLGPVQTTHVVEIPGYDPEPELRATVAEFEEHQRQEGRQKSKHAARAWQERADALDNRIATLEAAEKVEPQRIVTNTGRTFADEWAEKDTAGRRAMLIEAGVRLNVRRGVRGGWRKLDVRRVDFTMRGELDPAAEALAGEVTELASETRGDSPTPGASVRLVEPATVAEPVRELVAA

SEQ ID NO: 27523 - protein, 544 aa, synthetic construct
MTAPAPIPATLQGSPSEEEGEPWLGYIRVSTWKEEKISPELQETAIRAWAARTGKRLLEPLIIDLDMTGRNFKRRIMGGIKRVEAGEARGIAVWKYSRFGRTRDGVPLNLKRLEDAGGQLVSATEEADARTATGRLQRGILFEFAAYESDVRGEQWKETHDYRRYKLHLPACGKRRFGYIWTPRRVPDPTSPTGFRLQEETYKADPVTGPVMADAYRAYVDGSAFYALVANLNDAGHRTLRGGVWTVQTLIRYMDSGFCAGLLRIHDPACHCPPEKRSNCSAPHLFIPGAQEELIDAELWQLYRERREQIKKTPPRARRALYPLTNLVRCGGCRGTAPVQSAQRLRNGQLTNVQGYSYACGKRGTTGTKGCPGVWAVRTLIEDQVRTWLRDEVAEEVDATPAIPVQRAPEADLRVAAALERARLEAEATKLASGLTNLRAQRALDPDEFGPGEYEAIRDKIRAQQTANRTAMERVATIESTPVRSDYALLMIGLLDAWEDMNEAERNGLLRQLVRRVVLVRTEGAATIAVHPAWEPDPWATPIK

SEQ ID NO: 27524 - protein, 563 aa, synthetic construct
MHRDDYPALRSLGFEDDELKELGLWEPAVGSPADLAEMYVRRSKKKDSLSALREQIRRMCAHAVRESKRIRHVWFEQKSASKSYVRREEFEKATAAVTEVGLSKALYVYKTSRLSRRGMGQVGLLLDTFEEQGAYIFVVSEGLDSRTSRTVLAFLSEQARDQVKDLGDFVKLGMDSHKADGKWTGGVTPYGLRAVKGEGRLEHDPKEYPTARRIAEYLLDRKTPAWIADTLNEEGLKTRHGRNWQATGIIALAHAVTWAGLVAQRERMLDKNGQWTGKYHRGGTPMFDKKGKPVSFGEGVITFAEHVKIKSILASRAQKNGPVGNRARGKREVSNLLSGIMHCGRCAVQEVSSGPAYRCYARTNEGAHVCEGVSIGRERADDAVTQAWFGHILSLSPESATLHEIAREWLAYKDPEKEARKAQVTAALESAVSREMKLNKEFFVLGRMTEDMFDSMRVQVGEQITALKAELAELTREADLSPLMDPEALAALWNGAGIAGQRALLRAALTSKGIILKPSQGRGHRVPAIDRLDFHWREASSPEWEAAFEAGVRLVERTRTQNG

SEQ ID NO: 27525 - protein, 558 aa, synthetic construct
MTKLYSYIRFSSMRQSEGSSYERQIRMAKEIADRHGLELVNDYQDLGVSAFKGANSKTGALSRFLDEIGRSIPVGSWLFIENLDRLSRQDIISAQELFLSIIRRGITIVTGMDNKIYSIETVTANPMDLMFSILLFIRGNEESQTKRNRTNSSALLKIKAHQQNPQSPAVAIEEIGKNMWWTDTTSGRVLPHPVYFPVLQKIVKMRQDGHSAGSILDYLNEHHEPPAPTSNKRHGKWSRAMVSRLFNTKALIGVKTVNVDGVEYELRDYYPRVLSDSEFYFLRKNIIKKAWDYGHDKEKVIPLLSGIGVLRCVHCGATMVKQTAANGKREQYRYCCDGRKSGRTDCPYPNWGFRAATLERAVLQLLADKIWIAEDKTNPIPEIQVKIDDISRKIDNLINLSAMMGATKELANQITDLNMQREALHEEIRLFEREMYSVDSQGWEKLAEFDLSDVQNEERLKVRMKIKGALHEIECSRLDSKKNLFVLVYLDGVRQRLVIENNRGLKKGQIIVDLKTINDKQILESAGMVLHPCIDMIVDKNWKAPEEIPGLLSEEFGI

SEQ ID NO: 27526 - protein, 557 aa, synthetic construct
MTRLYSYIRFSSMRQSDGSSYERQIRMAKEIADKHGLELVNDYQDLGVSAFKGANSKTGALSRFLDEIGKSVPVGSWLFIENLDRLSRQDIISAQELFLSIIRRGITIVTGMDNKIYSLDTVTANPMDLMFSILLFIRGNEESQTKRTRTNSSALLKIRAHMNDPKSPAVAIEEIGKNMWWTDTSTGYVLPHPVYFPIVQKIVSMKRDGHSTGEVLDYLNEHHEPPPATSNKKHTHWSKAMVSRLFQTKALMGIKTITVDGVEYELKDYYPRVMSDSDFYFLKQNVAKKAWSYGTTSEKVIPLLSGIGVLRCAHCGATMVKMSAANGKKEQYRYCCDGRRSGRTDCINPNWGFRASILEEAVLRLLADKIWIAEDKTNPIPEIRVKIDEISRQIDNLINLSAMTGATKELAEQITSLNSQREALHEEIGRWETEMYSVDSQGWEKLAQFDLSDVQNEERLKVRMKIKGALREIECSKIDGKKNLFVLVYLDGLRQRIVIENARGSKPAKVYVDLKAINDRQILESNGMILHPCIEMLTDPNWEPEKEIPGPLQEYGI

SEQ ID NO: 27527 - protein, 454 aa, synthetic construct
MECVAYLRVSTEKQAEEGNGLDSQKRDIENYCRKNQLIISDWYEDDGFTGSNMNRPALQRLINDCSKKKLKCVVAFKLDRLSRSMVDGIYLIERVFIPNGVDFRCVHDSVSYDSPMEQAYTQMMAVFAQLDKNTMLLRMRGGMLERVKQGYWMGGGNTPYCYRYSKEDGILVPIPERKEMALRAMNLYISGYSDVRIQKLIGFKSEFVTRQVLTSPVNIGMIPYKGKLYKGRHEPIFDIKVFELAQELRKTRKQSKSFCVNHENQLLTGLCYCGVCGCKMRYQKWTHGKHKIYCYSRDNGMSYLPNYNPNCSNSLEWAEDIEKQVEDEILKISLNLSSHKPKERESCLDILSKQLQKEKTKLKRLYVLYAEGNDTVLEMIKETESGIDELKLKIQNEMKSPDNSQKKEFVYDNIKKLADVWEHIDKQNKNRILKTIISKIIIVNGNIEIQLKKF

SEQ ID NO: 27528 - protein, 559 aa, synthetic construct
MKTKLYSYIRFSSMRQNDGSSYERQIRMAREIAVKYDLELVNDYQDLGVSAFKGANSKTGALSRFLDAIGRSVPVGSWLFIENLDRLSRADIVSAQELFLSIIRRGITIVTGMDNKIYSLDTVTANPMDLMFSILLFIRGNEESQTKRNRTNSSALIKIKAHQENPQNPAVAIEEIGKNMWWTDTTSGYVLPHPVFFPIVQEVVELRRNGRSTAEILDHLNATYTPPPAASHKRHSNWSRAMIERLFHTRALIGIKEISVDGVKYELKDYYPRVLDDAEFYHLKKSIGVRACNFGDKEEVKPIPLLSGVGLLKCEHCGSAMVKVKGTNRRPNQYRYSCDAMRSSRIECVHTNWSFRGDQLEKAVLQLLADKIWIAEDKANPVPALKVQIDEISRKIDNLITLSAMTGATKELADQITTLNSERETLYNQIKMAEEEMYSVDSQGWEKLAEFDLEDVYNEDRIKVRFKIKQALKRIGCSRIDKYKNLFVLEYIDGKTQRVVIENSRGPRKGRIFIDLKTINDRQILESNGLVLHPCLDMLTDKNWKPEEEIPGPLQEFGI

SEQ ID NO: 27529 - protein, 490 aa, synthetic construct
MKVLESYAVYVRVSTDRDEQVSSVENQIDICRNWLERNGFNWDEKRVFKDEGISGTLFVDRPSIQLLLQKAKAKEINMVVFKSISRLARDLKDSLEIREVFLAHHVRIISVEEGYDSVKAGKNDMAFELWSLFSAQYSRTLSSSITAALSVKVRRGEHIGKVPYGYNRENQKLVINEEEAKGVQMMYKWYLEGWGYKKITNELNQLGIKSKTKKNWQMTSVQRILQNPIYKGTFILNQYTSVKVGGKKKQIRNPKEKWFVFPNHHPRIVEEEIWNQANRKKNKKNKTKITAWNEFRNLAKCAACGSNMVIVQSHLKKKSGERTEWKYLKCSQYRRAGKHGCVNHVPIQYGDFREFIINLLVEKGESVTLKLQNNVEKGQEKKIKKLQQLMSANQQKKKALLDLYLEELINKEEFEKKRNDLEAEITKANHELFILQNSEAVQMDIKTIKQAFEQLRQQEKDLIHVFQTLIQKISIHQDGTVDITYTFEST

SEQ ID NO: 27530 - protein, 558 aa, synthetic construct
MTKLYSYIRFSSMRQSDGSSYERQIRMAKEIADRYNLELVNDYQDLGVSAFKGANSKTGALSRFLDEIGRSIPVGSWLFIENLDRLSRQDIISAQELFLSIIRRGITIVTGMDNKIYSIETVTANPMDLMFSILLFIRGNEESQTKRNRTNSSALLKIKAHQQNPQSPAVAIEEIGKNMWWTDTTSGRVLPHPVYFPVLQKIVQLRQEGHSAGAILDYLNEHHEPPAPTSNKKHGKWSRAMVSRLFATKALIGVKTVNVDGVEYELRDYYPRVLSDSEFYFLRKNIIKKAWDYNHDKEKVIPLLSGIGVLRCVHCGATMVKQTAANGKREQYRYCCDGRKSGRTDCPYPNWGFRAVTLEGAVLQLLADKIWIAEDKTNPIPEIQIKIDEISRKIDNLINLSAMMGATKELANQITDLNSQREALHEEIRLFEREMYSVDSQGWDKLAQFDLSDVQNEERLKVRMKIKGALHEIECSRIDSKKNLFVLVYLDGLRQRLVIENNRGLKKGQVFVDLKTINDRQILESAGMVLHPCIEMIIDADWKAPEEIPGLLSEEFGI

SEQ ID NO: 27531 - protein, 551 aa, synthetic construct
MATKARVYSYLRFSDPKQATGSSADRQLEYAKRWAAEHGMALDAALSMQDEGLSAYHQRHVTKGALGVFLAAIDEGRIPAGSVLIVEGLDRLSRAEPIQAQAQLAQIINAGITVVTASDGREYNRAGLKAQPMDLVYSLLVMIRAHEESDTKSKRVRAAIHRQCKGWQDGTWRGVIRNGKDPSWTRLDPETKAFQLVPERAEAVRLAIRMFRDGHGAVRIMRTLAEEGLQLTNGGNPAGQLYRILRNRALIGEKVLEIDGEEYRLAGYYPPLLSAEQFADLQQATEQRAKQKGTGEIPGLITGLRISYCGYCGSAMVAQNLMNRGRREDGGPQHGHRRLICVGNSQGMGCAVAGSCSVVPIEHAIMSYCADQMNLARLFEGGDRSEALAGKLAIARARVADTTAKVERITDAMLADDAGDAPAAFMRRARELEASLVEQQAEVDALEHELAAVASSPTPAVAKAWAGLQEGVKTLNYDARTKARQLVADTFERISIYHRGTEPEQTRSWKGTIDLVLVAKRGSARILHVDRQTGEWRGGEEVQDLPDDPIQ

SEQ ID NO: 27532 - protein, 559 aa, synthetic construct
MKTKLYSYIRFSSMRQNDGSSYERQIRMAREVAAKYDLELVNDYQDLGVSAFKGANSKTGALSRFLDAIGRSVPVGSWLFIENLDRLSRADIVSAQELFLSIIRRGITIVTGMDNKIYSLDTVTANPMDLMFSILLFIRGNEESQTKRNRTNSSALIKIKSHQENPQNPAVAIEEVGKNMWWTDTTSGYVCPDPVYFPIVKEIVELRKNGRSTSEILNYLNETYTPPPAVSNKKHSKWPRAMIGRLFHTRALIGIKEVSVDGVKYELKDYYPRVIDDATFYHLKKNIGARAWNFGDKEEVKPIPLLSGIGLLKCEHCSSAMIKVKGTNKRADQYRYSCEGIRSHRFDCEHPNWSFRGDQLEKAVLQLLADKIWIAEDKANPVPALKVQIDEISRKIDNLIALSAMTGATKELADQITTLNSERETLYNQIKMAEEEMYSVDSQGWEKLAEFDLEDVYNEDRIKVRFKIKQALRRIGCRRIDRNKNLFVLEYVDGKTQRVVIENSRGTRKGRIFIDLKTINDRQILESNGLVLHPCLDMLTDKNWKPEEEIPGPLQEFGI

SEQ ID NO: 27533 - protein, 539 aa, synthetic construct
MPKAISYIRFSTKIQSVGDSTKRQSKYINDWLKRNPDYYLDESLRFQDLGISGFSGANAKSGAFGEFLAAVESGYIEAGSVLLVESLDRVSRQDIDTAGEQLRKILRSGVEVVTLVDNEWYTKESLKDSLSMIKAMLVMERAHEESAMKSTRLRSMWAAKRERAANGEIMSKRCAAWLKVSEDRSHFEFIPENVKAVQRVFQLRLEGLSHVKIAKQMNDEGFSTLNQFKSVKGGWSQSSVTELLSNRSVIGFKVPSKSMAVKGVAEIHNYYPSIITDEQFYAVQQLKQGSGRKPSSDLPLLTNLFKGVLRCSKCGFIIVVAGVTAKRSGIYKCSMKSEGRCNSVGFSRLQTDKALVQGLLYNTNRLSLNRDNGSAIGSLQSELEELHKQRERLIKLAMLADDTESMAKDLKALNSQIKDAEKAVSEVHQREQSSQLETISHLDLTVKKDRTEAQIIIKRIVKEIRLNTAGKKCDVFLHNGLKLLNFPLDRVVDGAQWLEVLPLINGDEFDFEGFTTKPRHIALEEAPEWVKEMEEQPNQ

SEQ ID NO: 27534 - protein, 596 aa, synthetic construct
MSKIIPYGYLRVSSLEQVKHTRGLDSQDDAVRTYINNHSDIFDTEKTVMMSDAAMSAYSGKQISDGELGRFLGDVEAGKIPTNSALVCFSIDRLSRQNPWIGTKLISTLIGAGIEIHSVAERQVLKSDDPVGAIMSTIYLMRANNESVIKSERAKSGYAKRLNESIEGKKILTRQMPRWLYELDGLYTIDAEMKRVIDFTFDSYIAGQSTGYIASDLNNKGWLYGDTKWRGSYVAKLIRDERLIGTHIRYSKQTKGVKREIIEKIPNFYPVAVDVEKFHLANNMLTNVAENIRGRTRVTYGDKTTLKNIFNTVLKCGVCGGDTSVVQNTRLKIVDGVKKYIPYKMFLRCRNKYELRRCKQGDIRYEIIEQAVLKHMKDLDIASLLTKPVDNTVELYRSELAQCIADESQFREIIEQRKSAGKRVRPDTTNALEEILDRIDELNRLIESHVEENFIPNFDVDLNKIADVKNVAERSLIKKGISTVAKSIVYKRIDNFILLEIKYSNLNTKHILVIDNKSSRVVVNFSIDYGEKINIYTCNTFTMIYNKKKSTFKIKRSTMIDYGHMLNFIDYVSDAECRSAKDFLEVNFKKISFKKI

SEQ ID NO: 27535 - protein, 507 aa, synthetic construct
MKRVISYIRFSSEKQAKGDSLRRQSKMVTDWLKAHPEYYLDESLTFRDLGVSGFTGKHLKGGLGDFLTAIEKGLVKAGDTLLIESLDRLSRQAVDQASELLRNILRSGVDIVTLSDGEHYTRESLKDPLALIKSILIMQRAHEESLRKSERIQAAWDAKKEAAKAGIKVSKRCPAWLKLNDDRKSFSVIPEKVATVKRCFQLRLEGKSIWEIVRTLNDEGHQTLNQYKPGKFGQTSVQDLLKNRSVIGYFTPKGREEIAGYFPPIIPETDFYKVQQLSYSRYGRKPASDKPLSVNLFKGVIRCSECGHALIITGFSDTRNGIYRCPLRNENRCNAKGLSRKQTDGTLLALLSRLDRFDSDMTNVIDALKLHREHISNNIEKLVQLSLEIEDLSAITIKLKQLKGELSQVDADIEKETQRLKSIDVGCLSDCDLTTKAGRIEAQLIIKSAVKEVVLNTAKRRCKVTFHNGKVIDLPITENPSEDVTEAIQSLSEVTERGLIDVDVVEI

SEQ ID NO: 27536 - protein, 503 aa, synthetic construct
MIEAFSYVRFSTKSQATGTSLERQLNASRLFCTQHGLRLSNQSYHDLGISGFKNVRRPELEQMFEAIQTGVIPAGSFILIEAIDRLSRKGISHTQDILKKILQHDIKVAFVGEDAKTLQGQVLNKDSLNDLSSVIMVALAADLAHKESLRKSKLVRESKAIAREKAQNGVILPGKSMFWLDYDKEQRHYVLNDRATIAKEIIELRLLGHGPRKIAKILNERQIPGPTGKEWYQPSIKRIITSPVLYGAYQSHQVIEGQYIPVALVENYYPALIDYNLFSQIQFDNKNASKGRPSRVNPFGGVFYCECGNAICFKKSYSKTAKKVKNEYHYHYCIAAREGRCKNTKAIPNFTPILINLLDKLEIKSTSTKNIRTESIISKRNKIEQLNEMLLKLDSPPVSVLKTISNLEKELQTLLEQPEITAPKQEDIVVLSTIKDPLKYNMHLKRLVKRITVYQINGPKSLRIKVDKTDGHYQNFLIQNGKTIFKSDTERLKKLLAGFKDGF

SEQ ID NO: 27537 - protein, 523 aa, synthetic construct
MRQVITYLRFSSKPQERGDSIRRQQGLFERWLKDNPDAKVVDEFSDEGASAYHGHHLKGDFGRMLQKIQDGKYLSGQTVLLVESETRLNRQKARNTENLVDLITGKGVDVICLESGKIYTSTNIDDLDTSIQLKIAAHIAHQQSKEKSIKVSAAWEHRAKLALEGKQQLTKNVPGWIDPDTRKLNEHSSTIVTIFDLLLSGESLHNIARYLQAHNIKSFSRREKANGFSVHSVRTILRSESTVGTLAASKRNDRPAIPNYYEPAIDIATFNKAQEILSKNRVGRAPASDNPITINLFKGIIRCQCGASVHPTGVKATYQGVYRCNNVPDGRCNVPTIKRKPFDKWMLDNIVGFLERSDGNNTDKRKAEIEYQISLVTSKLKKATPLLLELDDVTELKEQVKELNIQRSNMQSELDELNQRETLSDKPLHHLSEIDLTTKAGRVEAQLILSKFVQSIELQREMIIITLRNGTVIGKSRDLSPVLSQDLMKQVVSSPSPKDIDMFSVITSDEEFRKSGKQVTKRS

SEQ ID NO: 27538 - protein, 518 aa, synthetic construct
MGHFMNTAYAYIRFSSEKQSTGDSVRRQQSLIDSWGKNNPDYILSQKIYKDEGLSAFTGKHAAGDLGRLMNDISNGSITAGDVILIESLDRLSRENISTATDRLKAILIHGVNVVTLTDQKQYTPESLNSPMDLIMSILTAQRAHEESESKSKRMREVWAKKRTEAEENGKIITKSCPRWLTVNSDRRGFDPIPDRVQTINRIFSLRVKGESLSAISKILNEEGKLTFTGKAGKWNQSTIQQLVSNRALIGYKVQSRNSVVNHPDIPDYYPVVVDLQTFQAVQQLKSDQFGKKQTSDIPALVNLFKSVLRCKECGNIMILNSVTVNRDGYYVCSMRRQGRCEAKPINRKATDEALVNGLFYNLDRLMLSKPEQSPVTALEAQKQDLTERLNKLVVALEIAPDITEIISRMNAIKGDIQAIESQIAQHKQRIQSHVSETVQGLDLLVKAERVEFQLVMKRHVETILINTLRKSADIHMFNGLKLLNFPLDRVVDGEIFLEVLPLLEADEFDFDTYRVIE

SEQ ID NO: 27539 - protein, 518 aa, synthetic construct
MPKAISYIRFSTKIQSVGDSTKRQSKYINDWLKRNPDYYLDESLRFQDLGISGFSGANAKSGAFGEFLAAVESGYIEAGSVLLVESLDRVSRQDIDTAGEQLRKILRSGVEVVTLVDNEWYTKESLKDSLSMIKAMLVMERAHEESAMKSTRLRSMWAAKRERAANGEIMSKRCAAWLKVSEDRSHFEFIPDHVKAVQRVFQLRLEGLSHIKIAKQMNDEGFYTLNQHKSVKGGWSQSSVTELLSNRSVIGFKVPSKSMAVKGVSEIPNYYPAIISEQQFHAVQQLKQGAGRKPSSDLPLLTNLFKGVLRCSECGFIIIVSGVTANRSGNYRCSMRYEGRCNAKGFSRLQTDRALVQGLLYNTNRLSLNRDNGSAIGTLQSELEQLQKQRERLIKLAMLADDTESMAKDLKALNSQIKDAEKAVSEVHQREQSSQLETISHLDLTVKKDRVEAQIIIKRIVKEIRLNTAQKKCDVFLHNGLRLLNFPLDRVVDGEIFLEVLPLLEADEFDFDTYRMIE

SEQ ID NO: 27540 - protein, 518 aa, synthetic construct
MPKAISYIRFSTKIQSVGDSTKRQSKYINDWLKRNPDYYLDESLRFQDLGISGFSGANSKSGAFGEFLAAVESGYIEAGSVLLVESLDRVSRQDIDTAGEQLRKILRSGVEVVTLVDNEWYTKESLKDSLSMIKAMLVMERAHEESAMKSTRLRSMWAGKRERAANGEIMSKRCAAWLKVSEDRSHFEFIPENVKAVQRVFQLRLEGLSHVKIAKQMNDEGFSTLNQFKSVTGGWSQSSVTELLSNRSVIGFKVPSKSMAVKGVSEIPNYYPSIITDEQFYAVQQLKQGSGRKPSSDLPLLTNLFKGVLRCSECGFIVVVAGVSAKRSGIYKCSMKSEGRCNSVGFSRLQTDKALVQGLLYNTNRLSLNRDSGSAIGTLQSELEQLHKQRERLIKLAMLADDTESMAKDLKALNSQIKDAEKAVSEVHQREQSSQLETISHLDLTVKKDRIEAQIIIKRIVKEIRLNTAQKKCDVFLHNGLRLLNFPLDRVVDGEIFLEVLPVLEADEFDFDTYRMIE

SEQ ID NO: 27541 - protein, 525 aa, synthetic construct
MPSAFSYVRFSSGKQAKGSSEHRQRAMLGQWLEQHPSFTLSDLRFEDLGRSGFSGEHLDHGLGQLLAAIDSGAIKSGDVILVEAVDRIGRLEPLEMLPLFSRIVKAGVSVITLEDGHVYDRSSVNETSLFLLVAKIQQAHEYSNRLSRRINASYTARREKAKAGLGIKRETPVWLTTDGQLVPHVAPHIAQAFQDYADGLGERRICRKLRESGLEEFSKTNATTVRRWLKNRTAIGYWNDIPDVYPHVVDPALFYRVQQRLDAPKVDRAKPSAHYLTGLVKCAVCGRNYNYKQRKHTDPAMLCTSRARLAGEGCTNSKTFPVIVLDQVRKLTSLPFLQHAMESASSQVDPSSQRLAVIDGEIGELSRKIGEATKALLALGFTPEIQESLEQLKTAREALEEERATLLLPQAEKLTAAQLEAFSNGLLDDEPMKLNHVLQTAGYSMVVHPDGSIDVDGKRFIYEGANRKKKVYKLHLLGEDRQWELPILSPEQAASLARSVAGAYLPPNSSEEVARYYEKVKHLVR

SEQ ID NO: 27542 - protein, 501 aa, synthetic construct
MAKHGLEVDRHLEDAGTSAFHGKHAGSDGVLGQFLKEVRKGEIEKGSYLLIENFDRLSRDKIVRSNKIFTDLLFSGIKIVILDKNKIYDADNLDFGDWITALVEFERANAESQRKSDFSSKAWKLNRDKMHNGEIVTKKVPTWLKVENNTFIIDEVKIDRIRTLFRLSLSKGLQEATKEYNTLYGEKLAIHQAQYLLGNRKLIGEHQPQKIHYNENGRLIRKDEGNPIPDYYPQVIDEDLFLKVQSVITSRKPFSGRYSAQRYNVFRDLIFCRFCSGTIRYMNKGERDYFICTNSMTGKCGLKGQQSIRGKKVFSRFFKFTNGINIGTLLEENTNADEIKNELMKLENQKTKISNRLDGFKSQIKKMILDGEAIPETYNEIIVDLENSIIKYDDEIEIKNKELNKIISSFKSFYDLKEIDIEKIIYDKSQEAIEKRVQYNNELKNIIKKIQIDYLNDILHVEFSNGVNRHILNDELANEYNKDEIENSWASVVKSIAQKTN

SEQ ID NO: 27543 - protein, 551 aa, synthetic construct
MPTAYAYIRYSSKAQGEAGRDSVDRQMASIQAITKQQGIELRTENIFSDTGISGFDGSNKNKGKLKDLIDLIISQKIQDGDFVFVESIDRLSRQKMRLSKDLVYTILDRGVTLVTTIDGQMYSRAKDGMEQDIMLSVIAQRAHEESKTKSVRRKSAWNRAKKLADEEKEIFNGHNPPYGISFNKEESRFEIVEEEAQEIRDIFESLKYVGVSLTIKKVNEYSKRKWTNRNIKHLLDTKYVLGSYMAQRRDENKKKVFERYIENYYPQIVSFELFNEAVASMKNRAHRKHYGNQTVGSLNIFRHSIKCSNCNASMLFEKQTNPKGVVYPYFQCFTRKELKNGCDQPRFRFDLAFGVFLELVKFATTSSETINPNDWNNETTSVGSFHKTLFKLLTSTEKDKELEKKISHVKNLLLEQKNYQDNINKSFEAFTDGIIPAAFIKKASETEIKIEALERELAELNIESSTRNISLMVHSYNDIIDLYKTEAGRLKINSFFTSNNIAFSFSFDQKARMLRCKIYYKDIHVDVINKKFPLHNPLKEFGIDNLNQYFN

SEQ ID NO: 27544 - protein, 532 aa, synthetic construct
MKQYNEMRLEDVLQPGKRVAFYARYSTKDQGYEMQKHSVEEFVKKFGCRIDYEYIDAGVSATKVPFEERPYLQKLICDAADKKFDCIVVYKNDRIARHIEEHDKFRKQMFEMNMHVVVSSSQELYTVGEIVPQTVKDGLTRIEAALIQERTKDTFHSKAKRGAWLGGKASYGYEYRVIVENNGGIKSRIEQFDDVEQEQQVVKEIYRLFELGFGFQQIADEIRNKKWDERIKWTKERIRYIITNPFYSGLITMNRYYKGVLNNKSEWIKGKVPNMNPIFSQEYWEYIIGLFEERKERKIHSKDYSTPFLLRNILYCEHCKKSMTTKNQEPGGTKSKNKKVEKIRRIYDCKNCNFKLQAEMVHEQFRKKYLPYVLEQVTQGKKEQVELSIEKRFKKELSDLRSANRKLETEAIELNQKIEELNREIKLHYEQEIIQEEVLEFMKILMSHRSNKMHELNVIKDNQDELKKRMNRIEQTIKEKSYLPPHDLLSEVAQENVNSQKLRAFLLQFFKCVYITSDGELLMTVNNSLIES

SEQ ID NO: 27545 - protein, 487 aa, synthetic construct
MGSYAIYVRVSTDRDEQVSSVENQIDICRNWLERNGFIWDEKRVFKDEGISGTLFVNRPAIQLLLQKAKAKEIDMVVFKSISRLARDLKDSLEIREVFLAHNVRIISVEEGYDSIKAGKNDMAFELWSLFSAQYSRTLSSSITAALAVKVRRGEHIGKVPYGYNRENQKLVVKEEEAKFVQRMYKWYIDGWGYKKITNELNRLGVKSKTKKNWQMTSVQRILRNPIYKGTFILNQYTSVKVSGKKKQIRNPKEKWFVFPNHHPAIIDEEVWNQVNPKDTNTNKTKITAWNEFRNLAKCAVCSSNMVIVQSHSKKKNGERTEWKYLKCSQYRRAGKHGCVNHVPIQYDDFRQFIISLLVEKGEMLTLNFQNTMEKGKKEKIKRLQQLLKTNEQKKKALLDLYLEQLINKEEFEKKRSDLELEIAKLNQDLFVIQQNNSSSMEIKTIKEAFQQLKQQEQDLLHIFQTLIQEIMIHQDGTVDIAYTFEIS

SEQ ID NO: 27546 - protein, 558 aa, synthetic construct
MTKLYSYIRFSSMRQSDGSSYERQIRMAKEIADRYNLELVNDYQDLGVSAFKGANSKTGALSRFLDEIGRSIPVGSWLFIENLDRLSRQDIISAQELFLSIIRRGITIVTGMDNKIYSIETVTANPMDLMFSILLFIRGNEESQTKRNRTNSSALLKIKAHQQNPQIPAVAIEEIGKNMWWTDTTSGRVLPHPVYFPVLQKIVQLRQEGHSAGVILDYLNEHHEPPAPTSNKKHGKWSRAMVSRLFHTKALIGVKTVNVDGVEYELRDYYPRVLSDSEFYFLRKNIIKKAWDYSHVKEKVIPLLSGIGVLRCVHCGATMVKQTAANGKREQYRYCCDGRKSGRTDCPYPNWGFRAVTLEGAVLQLLADKIWIAEDKTNPIPEIQVKIDEISRKIDNLINLSAMTGATKELANQITDLNSQREALHEEIRLFEREMYSVDSQGWDKLAQFDLSDVQNEERLKVRMKIKGALHEIECSRIDSKKNLFVLVYLDGLRQRLVIENNRGLKKGQIFVDLKTINDRQILESAGMVLHPCIEMIIDSDWKAPEEIPGLLSEEFGI

SEQ ID NO: 27547 - protein, 557 aa, synthetic construct
MTKLYSYIRFSSMRQSDGSSFDRQIRMAKEIADKHGLELVNDYQDLGVSAFKGANSKTGALARFMDEIGKSVPVGSWLFIENLDRLSRADIISAQELFLSIIRRGITIVTGMDNKIYSLDTVTANPMDLMFSILLFIRGNEESQTKRNRTNSSALLKIKAHQQNPQSPAVAIEEVGKNMWWTDTTSGYVLPHPIYFPIVQKIVQMKQDGHSTGDVLNYLNEHHEPPAPTSNKKHEHWSKAMVSRLFHTKALIGIKTVNVDGVEYELKDYYPRVMSDSDFYFLKQNVAKKAWDYGTTSEKVIPLLSGIGVLRCAHCGATMVKMSAANGKREQYRYCCDGRRSGRTDCINPNWGFRASILEEAVLRLLADKIWTTEDKTNPIPEIQVKLDDISRKIDNLINLSAMTGATKELAEQITSLNSQREALHEEIGRWEREMYSVDSQGWEKLAEFDLGDVANEERLKVRMKIKGALREIECSKIDGKKNLFVLVYLDGLRQRLVIENARGAKPAKVYVDLKSINDRQILESNGMILHPCIEMLTDPNWEPEKEIPGPLQEYGI

SEQ ID NO: 27548 - protein, 558 aa, synthetic construct
MTKLYSYIRFSSMRQSDGSSYERQIRMAKEIADRYNLELVNDYQDLGVSAFKGANSKTGALSRFLDEIGRSIPVGSWLFIENLDRLSRQDIISAQELFLSIIRRGITIVTGMDNKIYSIETVTANPMDLMFSILLFIRGNEESQTKRNRTNSSALLKIKAHQQNPQSPAVAIEEIGKNMWWTDTTSGRVLPHPVYFPVLQKIVQLRQEGHSAGVILDYLNEHHEPPAPTSNKKHGKWSRAMVSRLFNTKALIGVKTVNVDGVEYELRDYYPRVLSDSEFYFLRKNIIKKAWDYSHDKEKVIPLLSGIGVLRCVHCGATMVKQTAANGKREQYRYCCDGRKSGRTDCPYPNWGFRAVTLEGAVLQLLADKIWIAEDKTNPIPEIQVKIDEISRKIDNLINLSAMTGATKELANQITDLNSQREALHEEIRLFEREMYSVDSQGWDKLAQFDLSDVQNEERLKVRLKIKGALHEIECSRIDSKKNLFVLVYLDGLRQRLVIENNRGLKKGQIFVDLKTINDRQILESAGMVLHPCIEMIIDSDWKAPEEIPGLLSEEFGI

SEQ ID NO: 27549 - protein, 554 aa, synthetic construct
MKPKAYSYIRMSTDVQLRGDSLRRQSEESRRYADDNDLDLVEDFRLEDIGVSAFHGKNVAQGALGKFLVLCEQQIIQAGSYLIVESLDRISRQNPQAATTLFLQILGAGINIVTLTDRHVYRAGSSDFTDIIVSVVIMSRAYEESRTKSLRVGAAWENKRRNIHDKKLTQVAPIWLRLSADRTAFETVPERVAVLRWIFDEADQGKGSLQISRVLNQRGVPTFAPSKGWYESYVSKVLTNRAVLGEFQPHRYIDGKRVRSGEPIPNYFPAIVAREQFERIQVGRAVRRLRGAGRKGQNNINLFQGVATCGYCNARMMIVNKGAGPKGGVYLRCDRARRSADCSASGWPLDHFEGAFLWFVEELDIAAIVQGASSEETRKALEGQSATISADLETQKKMRERAFDLLGEPTSATAFVRGKIDDASMKIDELERKLASIKEATMIAAASQKRPLEEVRLMIKEIGGWQTADGDSRSRVADWIKRNVKELLLFTDGLDQSDQVAADAKLRQFSVALAGGEFRTVQINGDDPTVASYSVHANDDRWVLTQDGEHLVHH

SEQ ID NO: 27550 - protein, 532 aa, synthetic construct
MKRAVIYARYSTDLQTDKSVEDQISLCRDFAGRIGAVITNLYYDKAKSGASMFGRPGLAELMVAAEQNDFDILITESTDRVSRDIADLAHVHKVLKFRNIQLQCVNGGLMDTVQIGMYGIVGQMQREEGARKVKRGMMGVVRSGRNAGGKAYGYQPIAGKPGELGIVEEEASVIHRVFDLYAAGVSPRSIAGILNRDQIPAPRGRQWNASTINGNGQRGNGILRNPIYAGRIVWNRVHMVKDPSTGRRVSRTNDEADLEMVDVPHLRIIPQDLFDAVQLRKEDASKMGSKTPRSKRILSGLLRCGACEGGMTLVGADRNGRRIQCSTHRESSTCSNSRRYYLNRIEALVLSRLRSQFADTSIIEAYVSAYQDEQKRIRSSALRDRAGAARLLEEAKKEITEIVRMLSKGLIEEDEATELLGPLRQQRDKQQVLLESIEEPTNVIELQPKAVRRFRENIENLSAILAQGEEEPPPELLGPFRQLVAAVVVYPTENGQVYEIGIKGYLSSLIDTDLSVIKMVAEEGFEPPTQGL

SEQ ID NO: 27551 - protein, 514 aa, synthetic construct
MIQAPAPKAFSYIRFSTPDQMKGDSFRRQYSMAESYALRRGLVLDDGLALKDFGISAFRGQNAKTGALGYFLEHVRSGDVPKGSILLIEALDRLSRQAPLDALDTLREIMREGVTVVTLDNEMVYTTETLTTNFMQLMVTLMVFARANEESATKARRLKQAWIGKRLKAASVPLTAICPAWLKLNDSRTAYEVIPERAEVVRSVFMMCLDGLGQHAIATKLNMTGTRTFGGSDMWHRSYVKKLLDNPAVIGRFTPHTLSVVDGRKVRTPTEAIEGYFPAILDVEAFEKVASMSSLRGQTIATGPQGTTANILGGLAKCPACGSTMTRVNKGGRKGGKPYLVCTKAKVGSGCEYRQVKLEAIEVAVLALGTYLHSLTPSPNAEYEAKYREMVIVAEVVEEEIQNLVEEIAKGAERGVNSRALPKALAAREAELDGLREQLGALAHRAADTITNRIENTVEEFCRATEGGDIAKINATMRQLFAKVVVDYYAGYLRLHWRHTEGTTTEVLYTFAKE

SEQ ID NO: 27552 - protein, 533 aa, synthetic construct
MKRAVIYARYSTDLQNDKSVEDQFSLCRDFAARLGAEVVKQYSDRAKSGASMFGRPGLADMMTAAERGDFEILVTESTDRVSRDIADLAHVHKVLKFRNIEMQCVNGGLMDTVQIGMYGIVGQMQREEGARKVKRGMTGVVRSGRNAGGKAYGYRPVTGRKGELEIVEYEANVVRRVFDMYVAGISPRSIASTLNHDAVPAPRGKQWNASTIHGNDRRGNGILRNPLYVGKLVWNRVQMIKDPSTGKRVSRANDEDKVETIDAPHLRIVDEELFQAAKDRLAARGGSHAHHAPRNKRLLSGLLKCGACGGGLATVGSDRSGPRVMCSTYRESHSCSNYGKYYVEKIERDVVDRLRRIFADTSYIDAYVEEYRAESKRIAADRRTSRGAKESALENVQRQIERVIEQVSKGTIEEEDVLAILPGLKAKRAALRTELDAEHAPTNVIEIKPRAVTKFKEDLESLAKILEDRAAEPTLAMATAFREVVSGVIVHPRIPGEPYSYEIKGLLAGIAGPELSAVLLVAEEGFEPPTQGL

SEQ ID NO: 27553 - protein, 494 aa, synthetic construct
MIKAVIYARVSTAEQAEEGYSIDAQFDVVKKKCEQEGRIVVDRYVDRGISGKNMENRPDLQRLLRDARGDKFQEIWVWKTNRLARNHLDLLKIVDELDKNNVGFKSCSEAFDTATPTGKLLMNVLASIGEFERESIVENVKMGMKQRAREGKWNGGIVLGYNTVKINEDENTTRLGIDEKEAFIVKEIFNLYAKGRGLKAITNLVNKRGYKTKKGNFFTPIAIRTILLNPVYIGKIRYNVRENWNEKGRKGINKNPIYAEGKHEAIISLELWNKVQEIYINRSRRPQRIFDGTFPLSGLIKCPMCGAPMVAGRVKKKLKDGNIKIIKYYQCGVWRNKGTAACHSNGIRADKIEEVVLGRISTILTKDKILRDIINNLNLNIKNKVKPLEDELNIINKSILNFEDKKCKVFDLYEEGIILKDVLTNRLEYISNQIEVYLINKSRIEKELQENTSEPITFDKVKQLLQKFNDLIRGTESTKQKLSTTIQISPISTK

SEQ ID NO: 27554 - protein, 479 aa, synthetic construct
MAKAKTPGQRVGVRSAAIYARISADAEGTGLGVARQVQDCRKLAADRGWPVGDEYVDNDVSAYSGKPRREYARMLDDLKSGARDAVIVYNLDRLHRRPLELEDFVTLCESVGVRDVATVTADIDLGNDDGLFMARIFAAFAAKESGRKSARIRRKMLQNAEQGLPHGPARPFGYENDKITVRPAEAKVIREMVDRYLAGASIRSLTIWLNDTGIAPPASTSWQTTTVRNILASGRIAGLREHHGEVIGPAAWPAVITPAERDRILARMAARSVTKTRAPRTYLLSGMLRCGRCGNRLFSQARHNNPTNRVRRYVCLKGPDHGGCGRLTVVARPVEELLTDAVLTRLDSPQLADALNGKARVDADVAALAAQLEADQARLDELAALYAEGAVSAREWIAARDPITDRITQARRDIAKATDTSSVVDLVGTGEMLRGQWDDLDIDRQQAIIKSVLDHAVIAPGTPGSRKLDINRVQPQWRL

SEQ ID NO: 27555 - protein, 558 aa, synthetic construct
MTKLYSYIRFSSMRQSDGSSYERQIRMAKEIADRYNLELVNDYQDLGVSAFKGANSKTGALSRFLDEIGRSIPVGSWLFIENLDRLSRQDIISAQELFLSIIRRGITIVTGMDNKIYSIETVTANPMDLMFSILLFIRGNEESQTKRNRTNSSALLKIKAHQQNPQSPAVAIEEIGKNMWWTDTTSGRVLPHPVYFPVLQKIVQLRQEGHSAGAILDYLNEHHEPPAPTSNKKHGKWSRAMVSRLFATKALIGVKTVNVDGVEYELRDYYPRVLSDSEFYFLRKNIIKKAWDYSHVKEKVIPLLSGIGVLRCVHCGATMVKQTAANGKREQYRYCCDGRKSGRTDCPYPNWGFRAVTLEGAVLQLLADKIWIAEDKTNPIPEIQVKIDEISRKIDNLINLSAMMGATKELANQITDLNSQREALHEEIRLFEREMYSVDSQGWDKLAQFDLSDVQNEERLKVRMKIKGALHEIECSRIDSKKNLFVLVYLDGLRQRLVIENNRGLKKGQIFVDLKTINDRQILESAGMVLHPCIEMIIDADWKAPEEIPGLLSEEFGI

SEQ ID NO: 27556 - protein, 560 aa, synthetic construct
MTKLYSYIRFSSMRQGEGSSYERQIRMAKEIADRYDLELVNDYQDLGVSAFKGANSKTGALSRFLDEIGRSIPVGSWLFIENLDRLSRQDIISAQELFLSIIRRGITIVTGMDNKIYSIETVTANPMDLMFSILLFIRGNEESQTKRNRTNSSALLKIKAHQQNPQSPAVAIEEIGKNMWWTDTTSGYVLPHPVYFPILQKIVKMKQEGHSTGSVLDYLNEHHTPPAPTSNKQHRKWSIAMVSRLFKTKALIGVKEVTVDGVQYELKDYYPRVLSDSEYYFLKNNLIKKAWSFGHAQEKTIPLLSGIGLLKCAHCGSPMVKRKAANGKVEQYRYTCDGEGSGRTDCLYPNWGFRASSLEGAVLQLLADKVWVAEDKANPIPEIQVQIDEISRKIDNLINLSAMTGATKELANQITDLNTQREALHEEIRLFEREMYSVDSQGWEKLAQFDLSDVQNEERLQIRLKIKGALRSIECARIDRNKNLFVLVYLDGLRQRIVIENNRGIRKGQIFVDLKTINDRQILESAGMVLHDHIDILIDEKAFYDGLPKEEDGPLSKFGI

SEQ ID NO: 27557 - protein, 560 aa, synthetic construct
MTKLYSYIRFSSSRQADSSSYERQKRTAKEIADRYGLELVTSYQDLGVSAFKGANSKTGALSRFLDEIGKSVPVGSWLVVENLDRISRQSIIEAQELFLSIIRRGITIVTGMDGKVYSKESVNANPLDLLLSVMMFARANEESQTKRNRTNSSALLKIKAHQQNPQSPAVAIEEIGKNMWWTDTTSGYVLPHPVYFPILKKIVKMKQEGHSTGSVLDYLNEHHTPPAPTSNKQHRKWSIAMVSRLFKTKALIGVKEVTVDGVQYELKDYYPRVLSDSEYYFLKNNLIKKAWSFGHAQEKTIPLLSGIGLLKCAHCGSPMVKRKAANGKVEQYRYTCDGEGSGRTDCLYPNWGFRASSLEGAVLQLLADKVWIAEDKANPIPEIQVQIDEISRKIDNLINLSAMTGATKELANQITDLNTQREALHEEIRLFEREMYSVDSQGWEKLAQFDLSDVQNEERLQIRLKIKGALRSIECARIDRNKNLFVLVYLDGLRQRIVIENNRGIRKGQIFVDLKTINDRQILESAGMVLHDHIDILIDEKAFYDGLPKEEDGPLSKFGI

SEQ ID NO: 27558 - protein, 558 aa, synthetic construct
MTKLYSYIRFSSMRQSDGSSYERQIRMAKEIADRYNLELVNDYQDLGVSAFKGANSKTGALSRFLDEIGRSIPVGSWLFIENLDRLSRQDIISAQELFLSIIRRGITIVTGMDNKIYSIETVTANPMDLMFSILLFIRGNEESQTKRNRTNSSALLKIKAHQQNPQNPAVAIEEIGKNMWWTDTTSGRVLPHPVYFPVLQKIVQLRQEGHSAGAILDYLNEHHEPPAPTSNKKHGKWSRAMVSRLFATKALIGVKTVNVDGVEYELRDYYPRVLSDSEFYFLRKNIVKKAWDYSHDKEKVIPLLSGIGVLRCVHCGATMVKQTAANGKREQYRYCCDGRKSGRTDCPYPNWGFRAVTLEGAVLQLLADKIWIAEDKTNPIPEIQVKIDEISRKIDNLINLSAMMGATKELANQITDLNSQREALHEEIRLFEREMYSVDSQGWDKLAQFDLSDVQNEERLKVRMKIKGALHEIECSRIDSKKNLFVLVYLDGLRQRLVIENNRGLKKGQIFVDLKTINDRQILESAGMVLHPCIEMIIDSDWKAPEEIPGLLSEEFGI

SEQ ID NO: 27559 - protein, 558 aa, synthetic construct
MTKLYSYIRFSSMRQSDGSSYERQIRMAKEIADRYNLELVNDYQDLGVSAFKGANSKTGALSRFLDEIGRSIPVGSWLFIENLDRLSRQDIISAQELFLSIIRRGITIVTGMDNKIYSIETVTANPMDLMFSILLFIRGNEESQTKRNRTNSSALLKIKAHQQNPQSPAVAIEEIGKNMWWTDTTSGRVLPHPVYFPVLQKIVQLRQEGHSAGVILDYLNEHHEPPAPTSNKKHGKWSRAMVSRLFNTKALIGVKTVNVDGVEYELRDYYPRVLSDSEFYFLRKNIVKKAWDYSHDKEKVIPLLSGIGVLRCVHCGATMVKQTAANGKREQYRYCCDGRKSGRTDCPYPNWGFRAVTLEGAVLQLLADKIWIAEDKTNPIPEIQVKIDEISRKIDNLINLSAMMGATKELANQITDLNSQREALHEEIRLFEREMYSVDSQGWDKLAQFDLSDVQNEERLKVRMKIKGALHEIECSRIDSKKNLFVLVYLDGLRQRLVIENNRGLKKGQIFVDLKTINDRQILESAGMVLHPCIEMIIDADWKAPEEIPGLLSEEFGI

SEQ ID NO: 27560 - protein, 558 aa, synthetic construct
MTKLYSYIRFSSMRQSEGSSYERQIRMAKEIADRHGLELVNDYQDLGVSAFKGANSKTGALSRFLDEIGRSIPVGSWLFIENLDRLSRQDIISAQELFLSIIRRGITIVTGMDNKIYSIETVTANPMDLMFSILLFIRGNEESQTKRNRTNSSALLKIKAHQQNPQSPAVAIEEIGKNMWWTDTTSGRVLPHPVYFPVLQKIVQMRQDGHSAGSILDYLNEHHEPPAPTSNKRHGKWSRAMVSRLFTTKALIGVKTVNVDGVEYELRDYYPRVLSDSEFYFLRKNIIKKAWDYGHNKEKVIPLLSGIGVLRCVHCGATMVKQSAVNGKREQYRYCCDGRKSGRTDCPYPNWGFRAATLERAVLQLLADKIWIAEDKTNPIPEIQVKIDDISRKIDNLINLSAMMGATKELANQITDLNTQREALHEEIRLFEREMYSVDSQGWEKLAQFDLSDVQNEERLKVRLKIKGALHEIECSRLDSKKNLFVLVYLDGLRQRLVIENNRGLKKGQIIVDLKTINDRQIIESAGMVLHPCIEMIVDKNWKAPEEIPGLLSEEFGI

SEQ ID NO: 27561 - protein, 509 aa, synthetic construct
MRRAISYIRFSSERQLKGDSVRRQSKLVTDWLDKNPEFYLDSSLSFKDLGKSAFSGKHLKGGLGDFLTAIEKGLVKAGDTLLIESLDRLSRQDIDIASELLRRILRAGVDVVTLSDGEHYTRESLKDPLSLIKSILIMQRAHEESLRKSERVQAAWNRKKELISEGIKVSRRCPAWLRLNDDRRTFTIIPDKVEVVKRAFDLRLQGLSFWAITRTLNDEGHLSLNQYTPKQKGWSDTAVKKLLRNRAVIGCFTPAGREEVQGYYPAIISESLFYRVQQLNTGQYGRASVSSNPLSVNLFRGIIKCSECGATIVLGGYALKRFGMYRCPNRSANRCSAKAISRKQTDTTILYMLALCDRFETENTDTIDSLKLQREDLQRKISKMAELAIELDDMTIITEKLRDMKNALSKLNHDIEEETKRIKAITTGSLKDIDRTTKEGMIETQLLIKGVLKEIVIDAAKRRCKVTFHNGRIIGLPITENPSEDVTEAIQSLSEVTERGLIDVDEVII

SEQ ID NO: 27562 - protein, 558 aa, synthetic construct
MTKLYSYIRFSSMRQSDGSSYERQIRMAKEIADRYNLELVNDYQDLGVSAFKGANSKTGALSRFLDEIGRSIPVGSWLFIENLDRLSRQDIISAQELFLSIIRRGITIVTGMDNKIYSIETVTANPMDLMFSILLFIRGNEESQTKRNRTNSSALLKIKAHQQNPQSPAVAIEEIGKNMWWTDTTSGRVLPHPVYFPVLQKIVQLRQEGHSAGVILDYLNEHHEPPAPTSNKKHGKWSRAMVSRLFNTKALIGVKTVNVDGVEYELRDYYPRVLSDSEFYFLRKNIVKKAWDYSHDKEKVIPLLSGIGVLRCVHCGATMVKQTAANGKREQYRYCCDGRKSGRTDCPYPNWGFRAVTLEGAVLQLLADKIWIAEDKTNPIPEIQVKIDEISRKIDNLINLSAMTGATKELANQITDLNSQREALHEEIRLFEREMYSVDSQGWDKLAQFDLSDVQNEERLKVRLKIKGALHEIECSRIDSKKNLFVLVYLDGLRQRLVIENNRGLKKGQIFVDLKTINDRQILESAGMVLHPCIEMIIDADWKAPEEIPGLLSEEFGI

SEQ ID NO: 27563 - protein, 557 aa, synthetic construct
MTKLYSYIRFSSMRQSEGSSYERQIAMARRVAEEHGLELVNDYQDLGVSAFKGANSRTGALSRFLDEIGRSIPVGSWLFIENLDRLSRADIVTAQELFLSIIRRGITIVTGMDNKIYSLETVNANPLDLLISIMMFTRGNEESQTKRNRTNASALLKVKAHQQNPQSPAVAIEEIGKNMWWTDTTSGRVLPHPVYFPVLQKIVQMKMEGHSTGSVLNYLNEHHEPPPAQSNKKHSKWSIAMISRLFQTRALIGVKEVSIDGVTYELKDYYPRVMSDTDFYFLKKNMITKSWSFGKEIDHIIPLLTGIGVLRCAHCGSAMIKQKGANGKPDHYRYTCDGSRSGRVDCPYPNWGFRGATLDAAVLRLIADKIWINEDKTNPIPEIRVKIDDISRKIDNLINLSAMTGATKELADQITTLNSQREALHEEIRLYERESYSVDSEGWEKLAEFDLNDVYNEERLKVRLKIKSALRTIECMRVNKKFNLFTLEYIDGKKQRVVIENGRGVRAGQTFVDLKTINDKQIIESGGMVLHPCIDMLIDPNWKPEEEQAGPLQEFGI

SEQ ID NO: 27564 - protein, 558 aa, synthetic construct
MTKLYSYIRFSSMRQSDGSSYERQIRMAKEIADRYNLELVNDYQDLGVSAFKGANSKTGALSRFLDEIGRSIPVGSWLFIENLDRLSRQDIISAQELFLSIIRRGITIVTGMDNKIYSIETVTANPMDLMFSILLFIRGNEESQTKRNRTNSSALLKIKAHQQNPQSPAVAIEEIGKNMWWTDTTSGRVLPHPVYFPVLQKIVQLRQEGHSAGAILDYLNEHHEPPAPTSNKKHGKWSRAMVSRLFATKALIGVKTVNVDGVEYELRDYYPRVLSDSEFYFLRKNIIKKAWDYSHDKEKVIPLLSGIGVLRCVHCGATMVKQTAANGKREQYRYCCDGRKSGRTDCPYPNWGFRAVTLEGAVLQLLADKIWIAEDKTNPIPEIQVKIDEISRKIDNLINLSAMMGATKELANQITDLNSQREALHEEIRLFEREMYSVDSQGWDKLAQFDLSDVQNEERLKVRMKIKGALHEIECSRIDSKKNLFVLVYLDGLRQRLVIENNRGLKKGQIFVDLKTINDRQILESAGMVLHPCIEMIIDADWKAPEEISGLLSEEFGI

SEQ ID NO: 27565 - protein, 560 aa, synthetic construct
MTKLYSYIRFSSMRQGEGSSYERQIKMAKEIADRYGLELVNDYQDLGVSAFKGANSKTGALSRFLDEIGRSIPVGSWLFIENLDRLSRQDIISAQELFLSIIRRGITIVTGMDNKIYSIETVTANPMDLMFSILLFIRGNEESQTKRNRTNSSALIKIKAHQQNPQSPAVAIEEIGKNMWWTDTTSGYVLPHPVYFPILQKIVKMKQEGHSTGSVLDYLNEHHTPPAPTSNKQHRKWSIAMVSRLFKTKALIGVKEVTVDGVQYELKDYYPRVLSDSEYYFLKNNLIKKAWSFGHAQEKTIPLLSGIGLLKCAHCGSPMVKRKAANGKVEQYRYTCDGEGSGRTDCLYPNWGFRASSLEGAVLQLLADKVWVAEDKANPIPEIQVQIDEISRKIDNLINLSAMTGATKELANQITDLNTQREALHEEIRLFEREMYSVDSQGWEKLAQFDLSDVQNEERLQIRLKIKGALRSIECARIDRNKNLFTLVYLDGLRQRIVIENNRGIRKGQIFVDLKTINDRQILESAGMVLHDHIDILIDEKAFYDGLPKEEDGPLSKFGI

SEQ ID NO: 27566 - protein, 624 aa, synthetic construct
MIKTFIYSRVSSQEQLSGGGLDRQETDVREYVTRNGLDQYEIVAMVDRGISGYDGSNMRDGELGKWYKDAITGMYWGSHLVLEAIDRFSRRDPMLAMEDFTVLVNKGGIKVHIVKFNTFINGDNLPMLSMMMNLAHSESKQKSDRISKGWQRRRRMALDNGTAITARTPYWIDVRDNEYRLNNSSIAVVEAFAMYKQGLSCGLIAKKLNELKHYFPYMWTKTAVQHIVDGLNTSGIIDAPRAIKTIKAFYKSGFSVEDIAKKMNAEFQFMKEWNAPAVHKLLQNKSVTGLVEIQKRKLIQEFDSDGKPLELRTKSEGEKYFESIYPQIISIDDFELIQKLLESNRKVDTKTGKGQTAGGTVTQNEDGELVKQFILSSLCRCYKCGGAMFNNIVRSKRKNGKVDTYSYLRCLNERDAHCDVKALNYPVIERAIIEHVKGLNFDTMFKGTNNSELELLKTREVELLRDIATYEDAIAARKAAGKNTSPVLVTSLVDAQDDLEALQKKIRAISGVTVNAEELTSLNESVFDVAEYELRNMVELELQKIIKRITFNCTEKNIYFITIQYNTGTVLQHGLKVDKKKGVIETYELHEGNKGYVSNGEVITPALIEAAESKNIGIFEGKVM

SEQ ID NO: 27567 - protein, 686 aa, synthetic construct
MTRRLFGWRWLLLAALAAWPSGLRPTRKLHPAEDCFRATGYRIEQIQLRKRVGAEGLQLCFVVTRDGVTLQVCDYIQDAALGAGQLVVAVAVGGVVHHHAGGLHAGVTYSYSARIRLGRPRRPAMRRRTPVYAYIRMSTLEQAKGDSERRQLGQIERFLQENNGELVEPVFLDRLSSFNGKNIKKGAIKDFLEKVKNGQIEKGSILVIESFDRISRQGGYIAHSVILDIIKNGVDIATLSPYKRYSINSDNQFIEGIEIQTLLYRAHEESRTKSERITIQHEARREKAKDKKIVYGSLPFWLVRTEDWIEFREPEASDVKLCLSLLKTYGMYTATAKVNEQRRSSKPFTKETVSHLLNRSAVCGDLQTHRIEYDDNGNKIRVPGEVIHDYYPALITRSEFEELRAEIQNRKTSNTRGRVSGFKNIFRNVMTCDNCFAPMRLAHMKWKGGEKKYLICTKSETNQCAESGRVWFDYDDVERVFFREINLSILKKSLTQKSVFNDEEAEKLRSGFLKTEEQKANILKAIEMGTVSKALVNRLEALEKLSDETQKRIDEIKAENALKRSQNEADTFDYEQLDAALNDEEQRAVINKILRTNTSKISISKCEVGYDFVIDISINDKLETQILYNKNDDFVNRYEFNLPQNQSGDLVIHEDQTDPYADEEIELFDPTTMPIIDIDQHKKSPD

SEQ ID NO: 27568 - protein, 490 aa, synthetic construct
MKKIAIYIRKSVKGDENSISLEAQTEVIKHYFKGENKFTVYKDDGFSGGNTNRPAFQKLMADAMEGKFDTVACYKLDRIARNTLDFLTTFNTLKEYNIDLICVEDKYDPSTPAGRLMMTLLASLAEMERENIKQRVSDSMLNLAKQGRWTGGTAPFGYRVISKDGGKYLELEDEKNIKYIFHQFINGKGIIRLGNEFNCDKKKISRMLHNITYLQSSKDANIYLKQVLGYEVVGEPNGYGYLPYGKNKVVNGKKVRNYDGLKVATVSKHEAVIDLDTFIKVQNRLKTFEGKKAPRISNKSFLAQMVKCGGCGSNMLIALGHKKNDGTRKIYFYCPNKCGNCYVQVDKVEYTTLATLKDVDFFNKINKNKSVINKDNSKIKKSMLKELEEKKKILDGLMNKLALVDSNLANVIIEKMNSVNVDINDLQNKIDLLEKEEIASSYNKEDFKLKEENRKHFIEDFENMDMEEKQNSIRGIINKVVWDGKNIIIS

SEQ ID NO: 27569 - protein, 562 aa, synthetic construct
MPNYARQLDDQLDQFSRTGTQKRAAIYARVSTLEQAEEGYSIDEQVRVLKEMCEREGYVVHKEYVDRGKSGKNIKGRPALQQLLHDAKGKDFDLVLVWKVNRFSRKTKDLLNIVEELEMRNIVFRSFTERYETETPAGKMQFRMLAVIAEFERDNIAQNVKMGMLARAKEGSWNGGQVLGYDVVSVPGENRKRKLSTLVVNPTEAQTVRKVFDLYVEGNGYKSIANKLNNEGHRTKKNKDFSINGVKTILSNPLYAGFIRYNVRRDWNEKRRNNINPHPVIEKGRHEAIISEETWEKAKNIMSSRSGKPNRIHDGEFPLTGIMKCPACGAGMVIGRTTNTLKDGTKKVLEYYVCGAWKNKGSAVCRSNGVRTDYADPHVLEKLSNIATSDVLIEQIVERINNKKEQDSSPLQHEYETLKKAIESNQQKKEKVLGLYEDDLIQKADLVQRLSTLNEEKERLEERLSPIVLQIGQGGTQLINFSMVKQVMQNFKSAYQESLTREQRKRLMHLLIRQITINEDRKIDTIQIQLNKEVAKHFTFKGGEDSSITDEFSPPFSILIDL

SEQ ID NO: 27570 - protein, 545 aa, synthetic construct
MNQKKKYQRLEDVIKTGSKAAFYARYSTDQQDENMQVHSAKNVLEEYGCEWQEDNKYIDQKTSAVKNTAEQREEFQRLIRDARKKKFDFIISYKSDRIARNTKEHYEFRREMNKLGIPVILSSTKEIYTEGEIVPQTVKDALTQIEPAITAERTRDTFESKVERGEWIGGEAPYGYAYDKSTGDFITIGKEKRVVMEIFRLFKLGYGLQQITDKLSSGQWDVTQKWYKDKIKYIITNPFYSGYLTMNRYSRGKLNVNMSNWTWSKKQESIQMFMSREEWEFCFRLYLQRRESHTVRKINTPFWLRDILFCEECQSPFRTKNQRTTNKRKSGEKIKYGKMIYECKKCKLKLEMETIHEKFKIHMVPIIKNTLEKHREDFIQKTKRNIEEECESISQTQQELENTQMKLLKNIYKLDMKISQLYEDVMTGRAEIDKSMEDQKDVDTQEEQKENPNNKLIEILLTGRSKKYSELEGGKQQQEMLKEKLKKLKNSIYVLENGVQDEFFHFSLEEEQIQSVRNFLLQFVQGVYVRKDLSLRYEVYENLIH

SEQ ID NO: 27571 - protein, 488 aa, synthetic construct
MESYGVYVRVSTDRDEQISSVENQIDICRNWLERNGFTWNEKCVFKDEGISGTLFVNRPAIQLLLQKAKAKEIDMVVFKSISRLARDLKDSLEIREVLLAHNVRIISVEEGYDSVKAGKNDMAFELWSLFSAQYSRTLSSSITAALAVKVRRGEHIGRVPYGYDRIDQRLIINKEEANVVRKIYEWYNSGWGFKKITNELNKLGVKSKRKSIWQMTSVQRILRNPIYKGTFILNQYTTVKITGKKKQIRNPKEKWFIFPNHHPKIVEVEVWEQANQKDITSQRRKITAWNEFRNLAKCAVCGSNMVIVQSHVKKKNGERTEWKYLKCSKYRRAGRHGCVNHIPIQYREFRQFIISLLIDKGKSITLNFRNNFEEGKKAKIKNLQQKLNINEQKKKSLLDLYLEKLINKDEFEKKRSEIEMEIMKINQDLFLIRQNDSIPVDINMIKEAFQQLEQQECDLLHVFQTLIQEIVIHQDGTVDITYTFENPR

SEQ ID NO: 27572 - protein, 477 aa, synthetic construct
MRCAIYARVSTDEQAVEGYSISAQKKKLTAYCEAQDWDVVGYYVDEGISAKNTNRPELTRMIDHIKKGLIDCVLVYRLDRLTRSVLDLYTLLDVFEKYECKFKSATEVYDTTTAIGRLFITIIAALAQWERENIGERVRVGQQEKVRQGKYTSGRKPYGYNADHKEGILTIVEEEAKVVRSIFNDYLKGHSAMRIGKKLNSIGTPGRDYWNEKAVMYILENPLYVGTLRWRKETEHYFEIPNSVPAIIEKELFDNVQKLRESRRESHPRSAYGSYIFSGIIKCPRCGRPLVGNYVTSKKKDGTVTKYKHYFCRGRKLGVCNMGSMSERKLEKTIIPHILSLHVHATDEDVSIGQNNTEDEIIQIKNELKIIEKRRKKWQYAWANEHLKDEEFTELMQEENAREKVLTEELYKLKPAENKKLKNEELKEILNDMKLNWNNLNDEEKKILMQIILKKLVVERSDEWQAYELKIVEMEFN

SEQ ID NO: 27573 - protein, 507 aa, synthetic construct
MKRVISYIRFSSEKQAKGDSLRRQSKMVTDWLKAHPEYYLDESLTFRDLGVSGFTGKHLKGGLGDFLTAIEKGLVKAGDTLLIESLDRLSRQAVDRASELLRNILRSGVDVVTLSDGEHYTRESLKDPLSLIKSILIMQRAHEESLRKSERIQAAWDAKKEAAKAGIKISRRCPAWLKLNDDRKSFSVIPEKVETVKRCFQLRLEGKSIWEIVRTLNAEGHQTLNQYKAGKFGQTSVQDLLKNRSVIGYFTPKGCEEISGYYPAIIDETTFYKVQQLSHYRYGRKPVSAKPLSVNLFKGVIRCSECGHALIITGFSDTRNGIYRCPLRNENRCSAKGLSRKQTDGTLLTLLSRLDRFDSDMTNTLDTLKLHREHISSNIEKLVQLSLEIEDLNAITSKLKQLKGELSQVDADIEKETQRLKSIDVGCLSDCDLTTKAGRIEAQLIIKSAVKEVVLNTAKRRCKVTFHNGRIIDLPITENPSEDVTEAIQSLSEVTERGLIDVDEVIV

SEQ ID NO: 27574 - protein, 576 aa, synthetic construct
MAYEVEVIKASRKITDRKTGGLSDILRVAPYARVSTDTEEQLSSYKSQVAYYTELVNKRSDWQLVDIYADEAVTGTQVNKRENFQRMIDDCMNGKIDMVITKSISRFARNTLDTLKYVRMLKEQNVAVFFEDENINTMTMDGELLLVILSSVAQQEVENISSNVKKGLKMKMKRGELVGFQSCLGYDYDVQTKKISINEKEAELVRYIFERYIAGYGAYMIAKELTAAGYKTRSGRSNWQDTAILGIVKNEKYKGDLLQGKTFTVDPISKRRLENYGEEDQFYIRNHHEPIVSEEVFEKAQAILHRRGARLRGVEKGKRDKYSRKFAFSSKLECAFCGSNLSRRNWHSGTTHEKTIWQCVTATKKGKKYCPHSKALIENVIESAFLESYRRLCSNHMDVLDELMKHMETVLGNQNHMRKLNKVNNEIKLMEQKRCKLIDLCLDEKIDRATYESKYAELESQLSELLNEQVQLEQSSRQELDVEKRLEHLRKVLQKNEVLSSFDRNVFESIVEKVIVGDSTDPTQSDPHRLMFIYKTGFTNSVESKMIKQKKLSKNERGEPHSYTLNDTCGVSGFAE

SEQ ID NO: 27575 - protein, 528 aa, synthetic construct
MIKAAFYGRFSSNNQREESIDAQLRATEEFAEKNGYYIVCNYADKAKSGTSDKRPEFLKMIKDAEKGLFNVVIVHKLDRFSRDKYHSAVYKRKLKQYGVRLVSVTEQLDGSPESVILESVIEGMAEYFSKNLARETMKGLKENAYQCKHTGGLAPLGYEVNEEKKYVINEREAESVRSIFDMYISGYSHSQMVDELNARGFKTKVGAIFRTNSINSVLNNEKYTGVYIYNKSAKKDAFGKRNSHAYKDPSEIIKIEGGMPQIVSKDTFKKAQDILKSRKRKPGANKAKENYLLSGLIKCGCCGKSYQGNRRQAKDKPMYTSYRCSYRGATSSKVCDNKEIRKEYIEEYVLSELERKIFNDGAIAYLVEGINNNLQKQNKIDDEKKEVIVNELKEIDAKINNIVTAIASGFMQEEFKMKMDELKEKKSDLEFKQAQLKSNDITEVVTEKDVRNLLNNFSGYVISRNIPECKKFIQDFVKEVVVYKEHIEVIFNVSFNMLKNCEEVEVFSKIKRYDLYSRYSKSFYINVS

SEQ ID NO: 27576 - protein, 541 aa, synthetic construct
MKKIIAIYARKSLFTGKGDSIGAQVDTCKRFIDYKFANEDYEIRTFKDEGWSGKTTDRPDFTNMVNLIKSKKIDYVITYKLDRIGRTARDLHNFLYELDNLGIVYLSATEPYDTTTSAGRFMISILAAMAQMERERLAERVKSGMIQIAKKGRWLGGQCPLGFDSKREIYIDDMGKERQMMKLTPNKEEIKIVKLIYDKYLEMGSMSQVRKYCLENSIRGKNGGDFSTNTLKQLLTSPIYVKSSDNIFKYLESQNINVFGTPNGNGMLTFNKTKEIRIERDKSEWIAAVGKHKGIIDDNKWLQIQQQLQQQSEKQIKSSGRQGTTSTGLLSGIIKCAKCDSNLLIKTGHKSKKNPGTTYSYYVCGKKDNSYGHKCDNKNVRTDEADSAVITQLKLYNKKLLIKNLKKALVQNKKADTDNIQILESKLKEKEKAVSNLVKKLSLVDDENISNIILNEITNINKEINDIKLQLSNETLKINEVTQATLDTEIYIKILENFNKKIDDITDPIEKRNLLKSALESVEWNGDSGEFKINLIGSKKK

SEQ ID NO: 27577 - protein, 601 aa, synthetic construct
MKTVAIYSRKSKFTGKGESIENQVQMCTEYIKQRLNKDTEILIYEDEGFSGGTTNRPKFKEMIKDIKSKKIHILICYRLDRISRNVADFSNTLEILQENNCSFISIREQFDTSTPMGRAMIYIASVFAQLERETIAERVRDNMLELAKNGRWTGGKIPLGFTSERVKYTDDTGLQREYSKLKINKEEIKFVEFLYKKYLELGSLHKLEVYITQNELKSRNGIMFEKSSLKLILQNPIYVKANYEVINYLKENNWTIYGEIDNKHSLLSYNKTEQSFKNGKHTKVKKSENERFVAISNIEGFINPDLWLNVQRQFDKNRTRFPRLGKTHNALLVGKLRCGKCKEYMLVQHGRVSKTTGKKLFYYTCSLKRKSHKKLCDNGNAKADYVENLVINSLKLLSKSKKKFINGLKILYKNKLKSNEASIERLSLEKSLNEKRNQIDNLVLALSKSREIEDILLDKIKSLKNDCVEIENKIKNIETSKKEQKLNNINLSLIESIIDECSMIDQLSRNEQKRIIDILIDTIYWYGSGNGKGKIKIKFIGADENTKEIVLSEEKLQQKMLQFYSPSTCKINDFLLSFRKTKKTKGIGKGKIYRSLCRWKR

SEQ ID NO: 27578 - protein, 596 aa, synthetic construct
MKKVEIIKANRSLSDRNKNNMNSFLRVAAYCRVSTDSDDQINSYNSQVSYYTDLIKKNNEWNFVDIYADEGITGTQISKRTNFQRLINDCMNGEIDMVITKSISRFARNTLDTLKYVRMLKEKNIAVYFEDEKINTLTMDGELLLVVLSSVAQQEVENISANVKKGLKMKMSRGELVGFQGCLGYDYNVEDKSITINKEEAEIVRYIFNRYIEGAGGRLIGNELEQLGYKTKRGSSTWHESTILGIIKNEKYKGDVLLGKTFTLDPISKRRLENYGEEDQFYLREHHEPIVSEEVFDKAQAIRLKRSIPRGSHETEGFKRQKYSRKYSFSCMIECAFCGGTFTRRCWHSGTNHSKVVWQCVVSTKKGKKYCEHSKGIPEKVFEDAFIESYRQLCGNNKQVLEEFLARLSDTLNESNVEKRFLDLEKQIDTLDKKRKKLIDMRLEDIIDKESYEEKYDDLTVEIKKLSKEKQTLKASLINEKSIKARLKEFRKTLERNEVLEKFDRYVFESIVDKVIVGAINEDGTVDPYKITFVYKTGFDDKQDGHKFINKSPLEVYSKDNNDNKKECSYTKNETCGDGNSTTSGEIMESDELTGY

SEQ ID NO: 27579 - protein, 505 aa, synthetic construct
MDRICIYLRKSRADEELEKVIGQGETLFKHRKALLKFAKEKNLNIVEIKEEIVSGDSLFFRPKMLELLKEIEAKMYTGVLVMDMQRLGRGNMKDQGVILETFKNSNTKIITPMKTYDLNDDFDEEYSEFEAFMSRKELKMINRRMQGGRVRSVEDGNYIATNPPFGYDIHWIKKSRTLKINPKESEIVKLIFKLYAEGNGSGAICDYLNNLGYKTKFGNDFSRSSVLSILKNPCYIGKITWGKKEIKKSKTPGKTKDTRTRDRSEWTVVDGKHEAIIDMNTWDKTQEILNNRYHIPYKQTCGPANPLAGVVICSKCNNKMVMRKYGKKLPHLICNNKECNNKSARFDYIEKAVLEALEEHFKTYDINIKADNIKSNIKVYEQQLNSLNKEFKLLHEQKLKLFDFLERGLYSEETFLERSNNLDERIGKINLSINEVKKLIDTENNKIKKDDIIEFKKLLEGYKRSDDISDKNELMKLMVFKIEYLKQPYQRNDDFEIKLFPKLLR

SEQ ID NO: 27580 - protein, 540 aa, synthetic construct
MKTIAIYARKSLFTGKGDSIGAQVDTCKRFIDYKFANENYEIKIFKDEGWSGKTTDRPDFTNMVNLIQSKKIDYVITYKLDRVGRTARDLHNFLYELDNLGIVYLSATEPYDTTTSAGRFMISILAAMAQMERERLAERVKSGMIQIAKKGRWLGGQCPLGFDSKREIYIDDMGKERQMMKLTPNKEEIKIVKLIYDKYLEMGSMSQVRKYCLENSIRGKNGGDFSTNTLKQLLTSPIYVKSSDNIFKYLESQNINVFGTPNGNGMLTFNKTKEIRIERDKSEWIAAVGKHKGIIDDNKWLQIQQQLQQQSEKQIKSSGRQGTTSTGLLSGIIKCEKCGSNLLIKTGHKSKKNPGTTYSYYVCGKKDNSYGHKCDNKNVRTDEADSAVITQLKLYNKKLLIKNLKEALIKNEKADTDNIEILESKLKEKEKAVSNLVKKLSLVDDENISNIILNEITNINKEINDIKLQLSNETLKINEVTQATLDTEIYIKILENFNKKIDDITDPIEKRNLLKSALESVEWNGDSGEFKINLIGSKKK

SEQ ID NO: 27581 - protein, 508 aa, synthetic construct
MKIAIYSRKSIETDTGESIKNQIQICKDYFLRRKNNIEFEIFEDEGFSGGNTNRPAFKLMMSKIKEFNIVACYKIDRIARNIVDFVNVYNELEKHNIKLVSITEGFDPSTPLGKLIMMILASFAEMERENIRQRVKDNMKELAKAGRWTGGNVPFGYISKRIDEGNKKATYLVLDTLKENLIKEIFNTYISTNSMHKVQKWLYDTKNIKWCLSTIKNILTSPVYVKCNKEIIKYLSNFGEVFGDPNGVNGMITYNRRPYTNGKHRWNDKSMFYAVSKHTGVIEPNIWLKVQSIQEKSKITPRPKNSQVSYLTGVLKCAKCKAPMTISYNHKNKDGSITYVYLCTGRKTYGKKYCDCKQIKQNIIDPLVEEGLNAYAKLDIKQFNKIVGTRSKPENNISKIEKSIQKNNIKINNLVDKISMLSNAASNVLLKKIEELTSQNEEFKRELLFLKQEEINNQMTSPEEKFEKIKLFSNALKYADIDTKRELLHSITEEIYWDEDIKDINIVI

SEQ ID NO: 27582 - protein, 540 aa, synthetic construct
MKAIAVYARKSLFTGKGDSIGAQVDTCKRFIDYKFANEDYEIKIFQDEGWSGKTTDRPDFINMVNLIKSKKIDYVITYKLDRVGRTARDLHNFLYELDNLGIVYLSATEPYDTTTSTGRFMISILAAMAQMERERLAERVKSGMIQIAKKGRWLGGQCPLGFDSKREIYIDDMGKERQMMKLTPNKEEIKIVRLIYDKYLEMGSMSQVRKYCLENSIRGKNGGDFSTNTLKQLLTSPIYVKSSDNIFKYLESQNINVFGTPNGNGMLTFNKTKEIRIERDKSEWIAAVGRHKGIIEDNKWLQIQQQLQQQAEKQIKSSGRQGTTSTGLLSGIIKCKKCGNNLLIKTGHKSKKNPGTTYSYYVCGKKDNSYGHKCDNKNVRTDEADSAVITQLKLYNKELLIKNLKEALIQNEKTDTDNIEILESKLKEKEKAVSNLVKKLSLIDDESISNIILNEVTNINKEINDIKLQLSNETVKINEVNKATLDTEIYIKILENFNEKIDVITDPIEKRNLLKSALESVEWNGESGEFRINLIGSKKK

SEQ ID NO: 27583 - protein, 541 aa, synthetic construct
MKKTIAIYARKSLFTGKGDSIGAQVDTCKRFIDYKFANEDYEIRTFKDEGWSGKTTDRPDFTNMVNLIKSKKIDYVITYKLDRIGRTARDLHNFLYELDNLGIVYLSATEPYDTTTSAGRFMISILAAMAQMERERLAERVKSGMIQIAKKGRWLGGQCPLGFDSKREIYIDDMGKERQMMRLTPNKEEIKIVKLIYDKYLEMGSMSQVRKYCLENSIRGKNGGDFSTNTLKQLLTSPIYVKSSDNIFKYLESQNINIFGTPNGNGMLTFNKTKEIRIERDKSEWIAAVGKHKGIIEDTKWLQIQKQLQQQAEKQIKSSGRQGTTSTGLLSGIIKCEKCGNNLLIKTGHKSKKNPGTTYSYYVCGKKDNSYGHKCDNKNVRTDEADSAVITQLKLYNKELLIKNLKEALIQNEKTDTDNIEILESKLKEKEKAVSNLVKKLSLIDDESISNIILNEVTNINKEINDIKLQLSNETLKINEVTKATLDTEIYIKILENFNKKIDDITDPIEKRNLLKSALESVEWNGDSGEFKINLIGSKKK

SEQ ID NO: 27584 - protein, 539 aa, synthetic construct
MKAAIYSRKSMFTGKGDSVENQVQMCKDYGNRLNIDEYIIYEDEGYSGGNINRPKFQELLQDVKEKKFDVLICYRLDRISRNVADFSSTLELLQDNNISFVSIKEQFDTSTPMGKAMVYIASVFAQLERETIAERVRDNMLELAKSGRWLGGQTPLGFESEKISYFDAEMKERTMYKLSPESKELELVKLIYNKYLETGSIHLALKYLLSNNIKGKNGGEFASMSINDILRNPVYAKSNEMVLNYLKDKGMNVCGTANGNGILIYNKRNSKYKRKDINEWIAAVSKHKGIIPANAWIEVQKTLDKNSSKSTPRQGTSKKSILSGVLKCDRCGAPMRVTYGRKRKDGTSIYYYTCTMKAHSGKTRCDNPNVRGDYLEKSIIKKLQNLNSDVVIKELEEYKKQLVATTENSIIKNISKEIEEKKKEMDSLLKQLSKVESPVASEFIISKVDSLGTEIKDLEISLTKTTDKKKENSNIELNIEIVLQALNEFNDFFNSVESLKNDELTIQRKRYLLERAVDEITIDGETKKIGIDLWGSKKK

SEQ ID NO: 27585 - protein, 536 aa, synthetic construct
MKAAIYSRKSVFTGKGESIENQINLCKDYGKKNLGIEDYLIYEDEGFSGGNTNRPKFKQLIKDAKNKKFDVLICYRLDRISRNVADFSSTLELLQENNISFVSIKEQFDTSSPMGKAMVYIASVFAQLERETIAERVRDNMLELAKTGRWLGGQTPLGFKSEKISYFDAEMKERTMYKLSPVKEELDKVKLIYKKYLELKSLRKVTQYLLENNFKTKLGANWHTSVVSDLLQNPTYVKSSEAVFNYLRESGITCVGTPDGIHGLLTYNKKKGTKKQRDKTDWIATVAKHKGIIDSDIWLQIQSKMNCNKAKAPKLGRTHNALLTGLLRCEKCGSPMSVIHGPKDKNGNKTYFYGCSMKIYSKGTRCDNSNIRTTEMETVVINKLKSVTKNNGLLLEELNAVKEQLAPSKEETNELTLLNSKIKSNKQAIENLVKQLSLNPSSTASKYIIEEIEKKEEEIKQTESKIESLKEDKMEMNKLEIDLDLIIGNLKNFYATIDNVDIENKKYLISVLVDKITWNGSTGEVDIKLWGSSKKK

SEQ ID NO: 27586 - protein, 528 aa, synthetic construct
MAARAVTVIPATANGFASTCAEMVHIKKVAAYARVSTDYDEQLSSYEAQVDYYTKHIKSNSNWSFVEVYTDEGISATSTKKRNGFNRMISDALKGKIDLIITKSVSRFARNTVDTLTTVRKLKGKGVEVYFEKENIYTLDSKGELLITIMSSLAQEESRSISENVTWGQRKRFADGKVSLPYKHFLGYEKGEDGLPKIVEKEARIVRKIYKLFLEGKTPSAIARQLTENKIPTPAGKEIWQPSTVMSILKNEKYKGSAILQKSFTVDFLTKKKKINQGEVPKYYVQNSHPAIISTEVYDLVQQEIKKRKKVKGYKTSGNCFSGKIVCGECGSFYGSKVWHSNSKYRRVIWQCNSKFKNDEKCSTTHLYEDKIKQAFVEAFNSLIENKEEILQGYDEIIQVVTDTSRLDKESNKLKSEIEIVTEMLRKCVEENAHNALNQAEYEERYKALAARYESIKKDIEGIKEKRLEKSVKHKRIVEFIKELEQRKELITEFDEELWNGTVEKVMVNTEEKIMFVFKDGIEIEWNI

SEQ ID NO: 27587 - protein, 548 aa, synthetic construct
MKKELIKVACYCRVSTKKEEQEQSFEAQQKYFKEKLSKDNGYDLVEIYADRGLSGTDFSKREQFNKMLEDCGIIKKEVKARETEIRKQFISIDYVADADIKPKFTLIYVKDSSRFARNTEVNRIISRLRDKGVYVYFEDLNKSTENPSEKMLIDFMFSMNEQESISRSAKVRFGNMQSAKDGKVRSTKLYGYLYNKEENSLRIIKDEEEVVKLIFKLRLEGNGGRAIATILNSKGIKNRKGNEWRPNTINSMLQNPTYCGKVVRNRWYSSRMYGKDIVKLNDTKEWIIEDSNKVDKIINEETFTIIQDMIEKNRNKVGRPIGKYHGRSEFAGKIKCEKCGKYYVRNTDRGRVFYNCSTKKQSGLKKCNSRNIQEYEIENLINPYLEKDGYKNLTKKYIDILIEKEEEKKASLYSGTCTDEVNNIKEKVFKYKGKLSKLTDILLADDSESVRDVFNIKKKEINNKLKELDSELDKLTTSDKQKEEKLNNMNMCIKTLQERYNDIPNEITREYFINNCLNEIRVSEKGDLKLSTYTHYLFEEIMNLMDEY

SEQ ID NO: 27588 - protein, 528 aa, synthetic construct
MIKAAFYGRFSSNNQREESIDAQLRATEEFAEKNGYDIVCNYADKAKSGRSDKRPEFLKMIKDAEKGLFNVVIVHKLDRFSRDKYHSAVYKRKLKQYGVRLVSVTEQLDGSPESVILESVIEGMAEYYSKNLARETMKGLKENAYQCKHTGGLAPLGYEVNEEKKYVINEREAESVRLIFDMYISGYSHSQMVDELNARGFKTKVGAIFRINSINSVLNNEKYTGVYIYNKSAKKDAFGKRNSHAYKDPSEIIKIEGGMPQIVSKDTFKKAQDILKSRKRKPGANKAKENYLLSGLIKCGCCGKSYQGNRRQAQNKPMYISYRCSYRGATSSKVCDNKEIRKEYVEEYVLSELERKIFNDGAIAYLVAGINNNLQKQNKIDDEKKEVIVNELKEIDAKINNIVTAIASGFMQEEFKMKMDELKEKKSDLEFKQAQLKSNDITQVVTEKDVRNLLNNFSGYVISRNIPECKKFIQNFVKEIVIYKEHIEVIFNVSFNMFKNCEEVEVFSKIKRYDLYSRYSKSFYINVS

SEQ ID NO: 27589 - protein, 523 aa, synthetic construct
MAVSRNVTVIPAIKRVGNNKNSESKPKIRVAAYCRVSTDSEEQASSYEIQIEHYTNYIKKNKEWELAGIFADDGITGTNTKKRDEFNRMIEECMAGNIDMIITKSISRFARNTLDCLKYIRQLKDKNIAVFFEKENITTMDSKGEVLLTIMASLAQQESQSLSQNVKLGIQYRYQQGEVQVNHKRFLGYTKDENKQLVIDPEGAEVVKRIYREYLEGASLLQIARGLEADGILTAAGKAKWRPETLKKILQNEKYIGDALLQKTYTVDFLSKKRVKNNGIVPQYYVENSHEPIIPRDLFMQVQEEMVRRANLRGGKGGKKRVYSSKYALSSIVYCGQCGDIYRRVHWNNRGYKSIVWRCVSRLEEKGSECTAPTINEEILQTAVVKAINELLANKEPFLSTLQKNIAAILNEGNDNATDDIDSKLEELQQQLLIQAKSKNDYEDVADKIYRLRELKQNALVESAEREGKRQRIAEMTDFLNEQSCELEEYDEQLVRWLIEKVTIHANRVEVEFKSGISIDVKN

SEQ ID NO: 27590 - protein, 548 aa, synthetic construct
MKKELIKVACYCRVSTKADEQEQSFEAQQKYFKEKLSKKKGFDLVEVYADKGLSGTDFSKRDQFNKMLDDCGIIKKEVKARKTEIRKKYISIDYVADANVKPKFTLIYVKDSSRFARNTEVNRIISRLRDKGVYVYFEDLNKSTENPSEKMLIDFMFSMNEQESISRSIKVRFGNMQSAKDGIVRSIKLYGYHYNKEENSLRIIDDEANIVKLIFKLSLEGNGGRAIATILNSKGIKNRKGNEWRPNTINGMLQNPTYCGKVVRNRWYSSRMYGKDIVKLNDTKEWIVEDSNKVDKIIDEETFTIIQDIIEKNRNKVGRPTGKYHGRSEFAGKIKCEKCGKYYVRNTDRGRVFYNCSTKKQHGLKKCNSRNIQEYEIENLINPYLEKDGYKNLTKKYIDILIEKEEEKKASLYRDACTDEINNIKEEVFKYKGKLSKLTDILLADDSESVRDVFNIKKKEINNKLKELESELDKLTTTDKQKEEKLNNMNMCIKTLQERYNDIPNEITREYFINNCLDEIRVSEKGELKLLTYTHYAFEKIMNLMDEY

SEQ ID NO: 27591 - protein, 528 aa, synthetic construct
MIKAAFYGRFSSNNQREESIDAQLRATEEFAEKNGYYIVCNYADKAKSGTSDKRPEFLKMIKDAEKGLFNVVIVHKLDRFSRDKYHSAVYKRKLKQYGVRLVSVTEQLDGSPESVILESVIEGMAEYFSKNLARETMKGLKENAYQCKHTGGLAPLGYEVNEEKKYVINEREAESVRSIFDMYISGYSHSQMVDELNARGFKTKVGAIFRTNSINSVLNNEKYTGVYIYNKSAKKDAFGKRNSHAYKDPSEIIKIEGGMPQIVSKDTFKKAQDILKSRKRKPGANKAKENYLLSGLIKCGCCGKSYQGNRRQAKDKPMYTSYRCSYRGATSSKVCDNKEIRKEYIEEYVLSELERKIFNDGAIAYLVEGINNNLQKQNKIDDEKKEVIVNELKEIDAKINNIVTAIASGFMQEEFKMKMDELKEKKSDLEFKQAQLKSNDITQVVTEKDVRNLLNNFSGYVISRNIPECKKFIQDFVKEVVVYKEHIEVIFNVSFNMLKNCEEVEVFSKIKRYDLYSRYSKSFYINVS

SEQ ID NO: 27592 - protein, 548 aa, synthetic construct
MKKELIKVACYCRVSTKADEQEQSFEAQQKYFKEKLSKKKGFDLVEVYADKGLSGTDFSKRDQFNKMLDDCGIIKKEVKARKTEIRKKYISIDYVADANVKPKFTLIYVKDSSRFARNTEVNRIISRLRDKGVYVYFEDLNKSTENPSEKMLIDFMFSMNEQESISRSIKVRFGNMQSAKDGIVRSIKLYGYLYNKEENSLRIIKDEEEVVKLIFKLRLEGNGGRAIATILNSKGIKNRKGNEWRPNTINSMLQNPTYCGKVVRNRWYSSRMYGKDIVKLNDTNEWIVEDSNKVDKIIDEETFTIIQDMIEKNRNKVGRPRGKYHGRSEFAGKIKCEKCGKYYVRNTDRGRVFYNCSTKKQHGLKKCNSRNIQEYEIENLINPYLEKDGYKNLTKKYIDILIEKEEEKKASLYRDACTDEINNIKEEVFKHKGKLSKLTDILLADDSESVRDVFNIKKKEINNKLKELESELDKLTTTDKQKEEKLNNMNMCIKTLQERYNDIPNEITREYFINNCLNEIRVSEKGELKLLTYTHYLFEKIMNLMDEY

SEQ ID NO: 27593 - protein, 513 aa, synthetic construct
MKRIAIYSRKSRETDTGESIKNQIDMCKTYFNRADEECSFEVFQDEGFSGGNTNRPSFQRMLELAKHKQFDVIAVYKVDRIARNIVDFVNIYDELENHDVKLVSITEGFDPSTPIGKMMMMLLASFAEMERMNIAERVKDNMKGLAKIGRWSGGTPPTGYRNKTIINDNGKKESYLELIPQKKQLLISIFEKAADGYTTYQIGEMFNMPPKTISNILCNPTYVKSDELSANYLKSVGYSVFGELNGNGYLSYNRRPRRKGKKLFNAKGMFVAVSEHEAIIDSKTWIKANNNLKDRATEARPRISPQSFLAHLVKCKCGSGMYIHKGHLKKNGTRNTYFVCSKKKSKDKCTSKWLRIDIVEAEVLDLLKKISLNPKILDAYLKKKNNSVNYVESIKNIKKQINKNTETINALTDKLILLEGASIDIVSKKINSMANENTRLNTQLLEIEREKMFLEVDGENLKLLISNISKFLAKFDKIDISEKQNFIKTIIKEVVWDSTSNDGEDEITIKFLE

SEQ ID NO: 27594 - protein, 579 aa, synthetic construct
MKIAIYSRKSTFTGKGDSVENQIQMCKDYMQNLRNRSNEKYEFLIYEDEGFSGGNTNRPQFKKLLKDIKEKKFKILICYRLDRISRNVSDFSNILETLQMYDIDFISIKEEFDTSTPMGRAMIYIASVFAQFERETIAERVRDNMIELAKSGRWLGGTPPLGYESKTVKYMDENLNERSLTKLSENQEELNLVKLIFDKYLELKSLSNLEAYMLANYYKTRRGSNFDKTSLKRILTNTVYVKSSDEIFSYLAEQDMTVVGTPDSVHGILTYNKLKSNYTRDGNFSRSFRDTKDWIAAVSKHKGIIEPKDWLMVQSIREVNKDKFVVSSRSHNALLTGIIKCKKCGSKLRIVHGVVSKKTGKRLFYYTCSLKKDSKGARCNNKNGKVELIDKIVVNAIRELGENKLNLINELEKQLKEKSKEFHEINEKENIDHLIEQKKKQVDNLLDKISLDPDLSDLIIPKLKELKNELKELTDSSLKHKDDLTNLKAEEINLSFIKSLLNKCSLIDSLEHDEIRELIRGLTEEIRWDGETKDLEIDTVGSRDSKKRRELMEPVDEKILCLSDSGTRCRQSYASCFKQ

SEQ ID NO: 27595 - protein, 563 aa, synthetic construct
MKKSALYIRVSTHYQIDKDSLPFQKKELINYSKYVLNIDDYEIFEDAGYSGKNTVRPAFQDMISRIKKGEFTHLLVWKIDRISRNLLDFCAMYEELKKYNCTFISKNEQFDTSSATGEAMLKLVLIFAELERKLTSERVSAIMLDRANKGLWNGAQCPLGYSWNEEKKFPDINKDESETIKLIYNTYENISSSLQVAKMLNSEHIKTKRDGKWSSKTVSDIIRNPFYKGTYRYNYRESAHGKIKDESEWIIVEDNHSPIISKEQWEHCNKIMDINAQRNTSLYRKNSNIHVFASLIKCKKCGETFIANCDVTRKDGYRPSYYYCKGKYGSYGCDAKLISDVTLGPFIINYLANLLKAQKKLNKKNNLKDLEQFLLSGKTFVNIAGIDRANLESLYLSLLYSKTDNVLLKTKDKSKVIDLKSNLSVLTKEKEKYNRAFERLQNLYLFSDDAMSEKDFLVQKLKLTEKLDEVNKKIDLINEENSNAVTYDDISFLKRTSNFMINNELMNKKFINFKTMVMTMDKQLIKDFINTIIDKIEIKNGKVSTIHFKNGIINNFIYKEKEC

SEQ ID NO: 27596 - protein, 539 aa, synthetic construct
MKAAIYSRKSMFTGKGDSVENQVQMCKDYGNRLNIDEYLIYEDEGYSGGNINRPKFQELLQDVKKKKFDVLICYRLDRISRNVADFSSTLELLQDNNISFVSIKEQFDTSTPMGKAMVYIASVFAQLERETIAERVRDNMLELAKSGRWLGGQTPLGFESEKISYFDAEMKERTMYKLSPEPKELELVKLIYNKYLETGSIHLTLKYLLSNNIKGKNGGEFASMSINDILRNPVYAKSNEMVLNYLKDKGMNVCGTANGNGILIYNKRNSKYKRKDINEWIAAVSKHKGIIPANAWIEVQKTLDKNSSKSTPRQGTSKRSILSGVLKCSRCASPMRVTYGRKRKDGTSIYYYTCTMKAHSGKTRCDNPNVRGDYLEKAIIKKLKNLNSDVVIKELEEYKKQLAATIENSIIKNISKEIEEKKKEMDSLLKQLSKVESPVASEFIISKVDSLGTEIKDLEISLTKTTDKKKENSNIELNIEIVLQALNEFNDFFNSVESLKNDELTIQRKRYLLERAVDEITIDGETKKIGIDLWGSKKK

SEQ ID NO: 27597 - protein, 539 aa, synthetic construct
MKAAIYSRKSMFTGKGDSVENQVQMCKDYGNRLNVDEYLIYEDEGYSGGNINRPKFQELLQDVKKKKFDVLICYRLDRISRNVADFSSTLELLQDNNISFVSIKEQFDTSTPMGKAMVYIASVFAQLERETIAERVRDNMLELAKSGRWLGGQTPLGFESEKISYFDAEMKERTMYKLSPEPKELELVKLIYNKYLETGSIHLTLKYLLSNNIKGKNGGEFASMSINDILRNPVYAKSNEMVLNYLKDKGMNVCGTTNGNGILIYNKRNSKYKRKDINEWVAAVSKHKGIIPANTWLEVQKTLDKNSKKDTPRQGTSKKALLSGVLKCSRCGAPMRVTYGRKRKDGTSIYYYTCTMKAHSGKTRCDNPNVRGDYLEKNIITKLKNLNSDVVIKGLEEHKKQLAATTENSIIKNISKEIEEKKKEMDSLINKLSKIESDIASEFILSKVDSLGQEIKELEVNLLKRTDKKKENSDIELNIEIVLQAIKEFNDFFNSVESFKDDELTIQRKRYLLERAVDEIRIDGETNGIDIDLWRAKKK

SEQ ID NO: 27598 - protein, 579 aa, synthetic construct
MKVAIYSRKSTFTGKGDSVENQIQMCKDYMQNFKNKSKESYEFLIYEDEGFSGGNTNRPQFKKLLKDIKSKKFKILICYRLDRISRNVSDFSNILETLQMYDIDFISIKEEFDTGTPMGRAMIYIASVFAQFERETIAERVRDNMIELAKSGRWLGGTPPLGYESKTVKYMDENLNERSLTKLSENQEELNLVKLIFDKYLELKSLSNLEAYMLANYYKTRRGSNFDKTSLKRILTNTVYVKSSDEIFSYLAEQNMTVVGTPDNVHGILTYNKLKSNYTRDGNFSRSFRDTKDWIAAVSKHKGIIEPNDWLMVQSIREVNKDKFVVSSRSHNALLTGIIRCKKCGSKLRIVHGVVSKKTGKRHFYYTCSLKKDSKGSRCDNKNGKVELIDKIVVNAIKELGENKLNLINKLEKQLKETSKEFHEVNEKENIDHLIEQKKKQVDNLLDKISLDPDLSDLIIPKLKDLKNELKELTDSSLKHKDDLNNLKAEEINLSFIKSLLNKCSLIDSLEHDEIRELIRGLTEEIRWDGETKDLEIDTVGSSDSKKRRELMEPVDEKILCLSDSGTRCRQSYASCFKQ

SEQ ID NO: 27599 - protein, 512 aa, synthetic construct
MKRIAIYSRKSKETDTGESIKNQIDMCKTYFNRTNENCSFEIFQDEGFSGGNTNRPSFQRMLELAKHRQFDIIAVYKVDRVARNLVDFVNIYDELEKHDVELVSITEGFDPSTPIGRMMMMLLASFAEMERMNIAERIKDNMKGLAKIGRWSGGTPPTGYRSETIINNSKKESYLELIPEKKQLLISIFEKAANGYTTYQIGKTFNMSPKTVANILCNPTYVKSDELSANYLKSIGYGVFGELNGNGYLSYNRRPKKKGKKLFNAKGMFVAVSNHEAPIDSKTWIKANDNLKGRASEGRPRTSPESFLAHLVKCKCGSGMYIHKGHIRKDGSRNTYFVCSKKKLDKKCTSRWLRVDAVENIFLDALRKISLKPKLLENFFKQETTSKDYTELIKNVKKQINGNKKTIDNLTNKLIFLEGAAIKIISEKINIKANENLKLNEQLLQLEREKIFLQTDGENIKVLINNINLFLQDFDKIDITRKQNFVKSIIKKIVWDGDANDNNGKVSIEFLE

SEQ ID NO: 27600 - protein, 381 aa, synthetic construct
MNNIACYIRVSTDKVDQQKSLQQQRILLESQYNDRDVLMYSDTGTGTSFKRKGFTKLMYDAGLNTKELRDGRMTFEVDLERQPLFNEIVVINTSRFARNIAVIDILRVLWNYKAEQEVKETSVRTKRGNETSIIQNRIRNNSIFGWDFERETNSLIKNEKEAEAVSFIYNTALTNGLKMTAKLTNEVGYRTKKGNLWTDSTIKTLITNPKYKGYNVRNKFENVNLFTESKTKYVKKEDWIVQYNERIDPLVSEELWEEVQSALFNRCSNGNRGKNASKYDTSGKIKCSKCGATYTRSVETRVADKPLNQHYMICAHKKKYTKTYCSSDNITIKMLDDFIEEQRKLYYLNIRTAIQLKLIYLQGQLASLNETNKNEKIMILK

SEQ ID NO: 27601 - protein, 559 aa, synthetic construct
MLCYSYVRFSTPEQARGDSHRRQMEFAKNYCRLNNLTLVEDLSFKDFGVSAYRGDNLKTGALGKFLELVNSGHIPTGSTLIIESFDRLSRQTAIKAQAIFSDIISAGITIVTAMDNRSYNLQSVTDNPFDLMYSLMIMIRANEESETKSKRVKEAIKSNIKNKKIVASKLPYWIKHNKEKNLLELIPERAEIIQHIIEKYLAGLGINKLTRYLNDNIKPFAGKNWYPMYLQKLLRSTSLYGERQYNIDGTLHVMDNYYPAITTKNTFAIIQENLNARAYTRGGKIPSAITGIGIAHCGYCHAVLVSQSTKRKGKIVDGLRRARCNSSSKGTKCITTTFRISIVENAIAEYCSQHIDLSFLEPVSDNSRTQLAKYKLELSELNKKIKNYVGFISNGNISAAIANELSASENEKKTIENKIKELDLNLLSNNREEIIKKWKEIKLSLNSYNEENILKLRELIRASIKYIYVFQHGVWPEKELKVTPSGKEYYVHNDVFHIQITFKNGIRKMIELGDNIDDTEVNTNNRTITKNGILYTSDEYTKMLEDKIRMNISKNKNDN

SEQ ID NO: 27602 - protein, 547 aa, synthetic construct
MKLLVTYIRWSTREQDSGDSLRRQTNLIDAFYAKHKEEYYLLPAHRYVDKGKSGFHQQHKAQGSDFRRMFENVMSGVIPEGSLIVVENFDRFSRADIDTAIDDVRQILRKGVSILTLGDGELYDKSALTDPVKLIKHIIIAERAHQESLVKQKRIAQVWNHKTQLARELKKPMGKQAPGWLELSEDGSHYIVDEDKASLVNIIYDKRLSGMSMFAICKWLNEQGYPTINQRKVRISKTKKPDGNWSALSVKHILTSRSVLGYLPAKISSEDRKTVLREEIESFYPRIVTDSKFYAVQQLLEETGKGKTSSGDHWLYVNILKGIIRCKCGLVMTPTGIRKPVYQGTYRCNGNKESRCSYGTVSRKLLDTQLCSRLFSKLSQLHDEATDTAKLDELQRRLNTVDSELEKLTETLIQLPNITQIQEALRVKQEEKDELIVQLSREKARVKSVSSLDLSGLDMESVEGRTEAQIIIKRLVKEIVVSGNEKLVDIYLHNGNMIRGFPLDGKDDHTLTLEEATDEMQSLDDMLIFGEPVTRIYPAGDMEEVDA

SEQ ID NO: 27603 - protein, 502 aa, synthetic construct
MTLAFSYARFSTKSQAIGTSLERQLNASRLFCSERSLTLSPKGYHDLGVSGFKQVKRPELEQMLHAIQSGDIPSGSYILIEAIDRLSRKGISHTQDVLKQILQYKVKVAFVGEDAKTLNGQVLDEHSLNDLSSVILVALAADLAHKESVRKSKLVKAAKLIIRKKATEGHKVRGHTMFWIDWSDKKQDFVLNDRVKDVQTIIQLRREGQGPRKIAKTMNELGIKGPRGNLWNHMSVTIVLKSPVLYGAYQTHQIIEGQKVPDVLLENHYPALLTKEEYIKIQADSSKANKGRPSKANPFSGVLRCECGQAMLFSKRTNLDKNGDPLEYEYHFCIGSTEGRCKNKKRIRDLVPLLASIMDKLVINQTPTKNLNAELIKATEQKIEKLNNMLVELDNPPMSVLKTIQKLEQELDILLNTHIEEPVQADVKTLSSISDAQEYNQHLKRLVKQIVVYQINGPRNLRIKVHKTDGHYQNFLVKDNKILFKSDTKALKELIDEFNKAR

SEQ ID NO: 27604 - protein, 497 aa, synthetic construct
MVKMKSILYARVSTEELEQNNSYVQQKLYKDDRFEILKIFSDKASGSSVEGRENFLEMLNYVGISKDVNNYCIEHRTDIECIIVANVSRFSRNVVDARLIIDALHKNNVKVFFVDLNKFSDDADIFLQLNMYLMIEEQYLRDVSKKVKAGMQRKINTGYVLGSNKIWGYNYIVKDDGNGYLVAHPTESLMVKNIFKEYINGLGTRVLAKKYKLSQSTILGMLKNVKYKGYMGYNLKSDNPTYVKSQFVEPLISEEAFEEVQRIIKGRCNSENGKGRRIEVRSLTGKIKCSCGATYHYKGRGTQWCCGRTEGIGNRTKGCGSKQFHTKMIIPWLEKNIDNIESNLEFNLNREIKDVNIGSFERLKQRKEELIQQQDRLMDLYLNPTDSISRDVLERNSKKVNEELSEVENKIVILNDMNSHLNNLRRIKVEYKNHIKNIRKLIKYKSIEEIEKLISKIELETIINIINFKEELNIKTIQFSCFEELYNTNFVFVDETL

SEQ ID NO: 27605 - protein, 533 aa, synthetic construct
MKTAAIYARRSKVVETGDSIENQIQLCTNYLKNIGINNTLIYSDEGFSGKNTERPGFVRLMNDAKQKKFDTLVCYKVDRLSRNIGDFSNLINELEKNEISFISVIEQFDTRAAMGKAMMYICSVFSQLERETISQRVCDNMYSLATNGYWLGGEFPFGFSSSRKNFTDSSGKNRSYSELIPIEKEINLVKLIFNKYIELGSLSQVEKYLLQNNIKTRRRKDWSKASIKNIISNPVYVKANDKTIEYFKSQGIKTYGEPDDIHGILIYKKRKGKSGKIRNPDEWIYAVSTHEGIIDSDSWLKVQKIAEINKYKAPALGSSHKALLSGIIRCAQCGSSMRVSYGVPNKLTKKRKHYYMCTLKHNSGKVRCASKNVDGPEVDKLVINKLKELSLDKSYLVQRLKDYKESFATSSENILSKNIQNEISKNKEQIDNLVNNITLTEDPQLVQILLDKLTKLKSKSVELTNSLNKLNDELAKQDILINNCDNIIQKLKNLSTLIDDLDVPQKRSLLSSVIDKVFVDGDTGAVKIKFKTK

SEQ ID NO: 27606 - protein, 549 aa, synthetic construct
MKNKLKSSLNIESPKIAIYMRVSTSKQVDNQSLDTQEKTINSYIASRHDWINPICYKYIESHSASIKPKVSNTLKESSFDSLKRPKLRELFLDATIGKFDYVLCASHDRLTRNTNEGIILKHLFSRLNITLIYCRPGETISSENEALNKFFENLLVNIAALESNITGGRVTLANKHKIQNNLWAGGPPPFGYNLVSQPSNKRNSFLEINFEEARIVKKIFKLYNLGCSYTEILTRLNRDFTLPPKRIWTHNTLKEILRNPVYTGFLVWNKRGGARKPNRHSHNDFVKSNLVEKNIIIPENEFLETQKLRNILSRDSKFLSTDFLLRDFLYCNKCNKKLLAKNYGNNKRFYYCSSHNNMEINKKCRSIKASKIESIILSNINDLINSSLESEVQIEKFYDKYIENFNAELLDNKKSLEITINQLKSSTDLLELCVNEINISKDNLTVDYEDLSSSSTEFSFINALLEFQVVTQTEIKSLKARKEYLTYKINSSPKSFDDFKSNLNKSFKLFKYDEEKQKLISSPRSFRLFLLKVVKKIILSDHEITIIFK

SEQ ID NO: 27607 - protein, 537 aa, synthetic construct
MKKAAIYTRKSKFTEKGDSIESQIKLCSKYLDNINIKNYCIYTDEGFSGKNTDRPEFQRMLSDAKAKKFDVIICYKFDRISRNVSDFSNLINKLNELNISFISVVEQFDTNSAIGRAMMYLCTVFSQLERETISQRITDNMYSLATKGYWLGGETPTGFRSEKKFFNSNNKQKMYSSLVPIKEELDLVKLIFNKYLEFNSISKIEKYLLSNNIKTKRNKDWSKASISLILRNPAYVKADEETFKYIESTGSKVYGNPDGKHGLLIYKKNKGRKGAKHDISEWIYAVSEHEGIIDSDIWVAIQKQIKKNAILAPALGTSNIALLTGLIRCEKCNSPMRVAYGKRNPKTNKKNYYYVCTLKTKSGKTRCDSKNLPGLDLDNLILDKLKEMSLDKNTLLKELNKYKDTIESNFHNDVLKNIKNNISKNNSMIDNLLNNVALSTDSEVTAILLEKISKLKDENKLLTQKIDDLKSELEAQETLLNDCNSLITKLKYFSKFIDNSSIEEQKQLVSSVIEKVIADGDTGSIEIKFRPLLDFKI

SEQ ID NO: 27608 - protein, 533 aa, synthetic construct
MKTAAIYARRSKVVETGDSIENQIQLCTNYLKNIGINNTLIYSDEGFSGKNTERPGFVRLMNDAKQKKFDTLVCYKVDRLSRNIGDFSNLINELEKNEISFISVIEQFDTRAAMGKAMMYICSVFSQLERETISQRVCDNMYSLATNGYWLGGEFPFGFSSSRKNFTDSSGKNRSYSELIPIEKEINLVKLIFNKYIELGSLSQVEKYLLQNNIKTRRGKDWSKASIKNIISNPVYVKANDKTIEYFKSQGIKTYGEPDDIHGILIYKKRKGKSGKIRNPDEWIYAVSTHEGIIDSDSWLEVQKIAEINKYKAPALGSSHKALLSGIIRCAQCGSSMRVSYGVPNKLTKKRKHYYMCTLKHNSGKVRCASKNVDGPEVDKLVINKLKELSLDKSYLVQRLKDYKESFATSSENILSKNIQNEISKNKEQIDNLVNNITLTEDPQLVQILLDKLTKLKSKSVELTNSLNKLNDELAKQDILINNCDNIIQKLKNLSTLIDDLDVPQKRSLLSSVIDKVFVDGDTGAVKIKFKTK

SEQ ID NO: 27609 - protein, 537 aa, synthetic construct
MKKAAIYTRKSKFTEKGDSIESQIKLCSKYLDNINIKDYCIYTDEGFSGKNTDRPEFQRMLSDAKAKKFDVIICYKFDRISRNVSDFSNLINKLNELNISFISVVEQFDTNSAIGRAMMYLCTVFSQLERETISQRITDNMYSLATKGYWLGGETPTGFRSEKKFFNSNNKQKMYSSLVPIKEELDLVKLIFNKYLEFNSISKIEKYLLSNNIKTKRNKDWSKASISLILRNPAYVKADEETFKYIESTGSKVYGNPDGKHGLLIYKKNKGRKGAKHDISEWIYAVSEHEGIIDSDIWVAIQKQIKKNAILAPALGTSNIALLTGLIRCSKCNSPMRVAYGKRNPKTNKKNYYYVCTLKTKSGKTRCDSKNLPGLDLDNLILDKLKEMSLDKNTLLKELNKYKDTIESNFHNDVLKNIQNNISKNNSMIDNLLNNVALSTDFEVTAILLEKISKLKDENKLLTQKIDDLKSELEAQETLLNDCNSLITKLKYFSKFIDNSSIEEQKQLVSSVIEKVIADGDTGSIEIKFRPLLDFKI

SEQ ID NO: 27610 - protein, 537 aa, synthetic construct
MKKAAIYTRKSKFTEKGDSIESQIKLCSKYLDNINIKDYCIYTDEGFSGKNTDRPEFQKMLSDAKAKKFDVIICYKFDRISRNVSDFSNLINKLNELNISFISVVEQFDTNSAIGRAMMYLCTVFSQLERETISQRITDNMYSLATKGYWLGGETPTGFRSEKKFFNSNNKQKMYSSLVPIKEELDLVKLIFNKYLEFNSISKIEKYLLSNNIKTKRNKDWSKASISLILRNPAYVKADEETFKYIESTGSKVYGNPDGKHGLLIYKKNKGRKGAKHDISEWIYAVSEHEGIIDSDIWVAIQKQIKKNAILAPALGTSNIALLTGLIRCAKCNSPMRVAYGKRNPKTNKKNYYYVCTLKTKSGKTRCDSKNLPGLDLDNLILDKLKEMSLDKNTLLKELNKYKDTIESNFHNDVLKNIQNNISKNNSMIDNLLNNVALSTDSEVTAILLEKISKLKDENKLLTQKIDDLKSELETQETLLNDCNSLITKLKYFSKFIDNSSIEEQKQLVSSVIEKVIADGDTGSIEIKFRPLLDFKI

SEQ ID NO: 27611 - protein, 502 aa, synthetic construct
MNKKICIYLRKSRADEELEKTLGEGETLSKHRNALLKFAKENKLNVTDIKEEIVSGDSLFFRPKMLELLKEVENNMYYGVLVMDIDRLGRGGMKDQGIILDAFKESKTKIITPLKTYDLDNEMDEEITEFKTFFSRRELKTINRRMQGGRIRSIEEGNYIATNPPYGYDISFIKKNRTLKINEDEAPAINLIFKLYIEGNGASAIANELNNLGYKTKLGNNFSPSSVLTIIKNPIYIGKIPWKRKDIKKSKTPGKVKDTRTRDKSEWIIADGKHPAIVTNEIWESAQKILKGRYHIPYQLSNAPVNPFAGIISCGICGKKMVMRKARGINRLMCIYKCGNKSTRFDNVESDCLEALKDYLSNYSAEIKNSIKKEDIDMYSIQITNLKKELTTLNNQRLKLFDLLERNLYDEDTFLERSKNINDRIENITHTLKSLEKKVKKNSYTSYEEDIKHFKNVLDAYNLTKDVSKKNNLLKSILYKIEYTKTEKGKDYEIKLFPKLRK

SEQ ID NO: 27612 - protein, 591 aa, synthetic construct
MKEVEIIKKNDYLENRRRGKYIDLKRVAAYCRVSTDSEDQLNSYKSQVSYYTDLINNNIEWCMVGIYADEAITGTKVNKREEFQRMINDCMNNEIDMIITKSISRFARNTLDTLKYVRMLKEKDIAVYFEEEKINTLTMDGELLLVVLSSVAQQEVENISANVKKGLKMKMRRGELVGFQGCLGYDYHKEDKTLTINEKEAEIVRYIFNRYIEGAGGSIIGQELENLGYKTKYGSTTWSNSTVLGIIKNEKYIGDVLLGKTFTVDPISKRRLDNLGEEEKYYVKNNHEPIISREIFDKAHEILNRRSENRGKYEEGVTKREKYSRKYAFSCMMECGFCGGTLTRRNWHSGSEYSKIIWQCGVATKKGKKYCPESKGIPEIVIENAFIESYRLLCHEKKSVLEELLNRINDTLGVSEVNNKIKKIEKELSAIEKKVNKLVDMRLDDIIEKETYEIKYKELINNQETLLNDRNKLNIVAENEKSMKQRLKEFKKTLEENEVLDKFDRTVFESIVEKVIIGEKNTDVENDPTKITFIYKTGFKNTLNCDEFKIPRKNASGRHKRKKLCLHGNTEVENLCSHSSSNTRRDSCKIK

SEQ ID NO: 27613 - protein, 549 aa, synthetic construct
MKNKLKSSLNIESPKIAIYMRVSTSKQTDNQSLDTQEKTINSYIASRHDWINPICYKYIESHSASIKPKVSNTLKESSFDSLKRPKLRELFLDATIGKFDYVLCASHDRLTRNTNEGIILKHLFSRLNITLIYCRPGETISSENEALNKFFENLLVNIAALESNITGGRVTLANKHKIQNNFWAGGPPPFGYNLVSQPSNKRNSFLEINFEEARIVKKIFELYNLGCSYNEILTRLNRDFTLPPKRLWTHNTLKEILRNPVYTGFLVWNKRGGARKPNRHSPNDFVKSNLVEKNIIIPENEFLETQKLRNILSKDSKFLSTDFLLRDFLYCNKCNKKLLAKNYGNNKRFYYCSSHNNIEINKKCRSIKASKIESTILSNINDLINSSLESEVQIEKFYDNYIENFNAELLDNKKSLEITINQLKSSTDLLELCVNEINISKDNLTVDYEDLSSSSTEFSFINALLEFQVVTQTEIKSLKARKEYLTYKINSSPKSFDDFKYNLNKSFKLFKYDEEKQKLVSSHRSFRLFLFKVVKKIILSDHEITIIFK

SEQ ID NO: 27614 - protein, 549 aa, synthetic construct
MKNKLKSSLNIESPKIAIYMRVSTSKQADNQSLDTQEKTINSYIASRHDWINPICYKYVESHSASLKPKASNNLKESSFDSLKRPKLRELFLDATIGKFDYVLCASHDRLTRNTNEGIILKHLFSRLNITLIYCRPGETISSENEALNKFFENLLVNIAALESNITGGRVALANKHKIQNNFWAGGPPPFGYNLVSQPNNKRNSFLEINFEEARIVKKIFELYNLGCSYNEILTRLNRDFTLPPKRLWTHNTLKEILRNPVYTGFLVWNKRGGARKPNRHSHNDFVKSNLVEKNIIIPENEFLETQKLRNILSKDSKFLSTDFLLRDFLYCDKCNKKLLAKNYGNNKRFYYCHSHNNMEINKKCRSIKASKIESTILSNINDLINSSLQSEVQIEKFYDNYIENFNAELLDNKKSLEITTNQLKSSTDLLELCVNEINISKDNLTVDYENFNSNSTEFSFINALSEFQVITQTEIKSLKARKEYLTYKINSSPKSFDDFKSNLNKSFKLFKYDEEKQKLISSPRSFRLFLFKVVKKIILSDHEITIIFK

SEQ ID NO: 27615 - protein, 537 aa, synthetic construct
MKKAAIYTRKSKFTEKGDSIESQIKLCSKYLDNINIKDYCIYTDEGFSGKNTDRPEFQRMLSDAKAKKFDVIICYKFDRISRNVSDFSNLINKLNELNISFISVVEQFDTNSAIGRAMMYLCTVFSQLERETISQRITDNMYSLATKGYWLGGETPTGFRSEKKFFNSNNKQKMYSSLVPIKEELDLVKLIFNKYLEFNSISKIEKYLLSNNIKTKRNKDWSKASISLILRNPAYVKADEETFKYIESTGSKVYGNPDGKHGLLIYKKNKGRKGAKHDISEWIYAVSEHEGIIDSDIWVAIQKQIKKNAILAPALGTSNIALLTGLIRCAKCNSPMRVAYGKRNPKTNKKNYYYVCTLKTKSGKTRCDSKNLPGLDLDNLILDKLKEMSLDKNTLLKELNKYKDTIESNFHNDVLKNIQNNISKNNSMIDNLLNNVALSTDSEVTAILLEKISKLKDENKLLTQKIDDLKSELEAQETLLNDCNSLITKLKYFSKFIDNSSIEEQKQLVSSVIEKVIANGDTGSIEIKFRPLLDFKI

SEQ ID NO: 27616 - protein, 544 aa, synthetic construct
MKQLNIQSSSKITALYCRLSRDDELQGTSNSILNQKMMLEKYARDNNFTNLEFFIDDGYSGTNFNRPDWSRLQSLIDEGKIGCIIVKDMSRLGRDYLRVGYYTDIVFPEADIRFIAINNGIDSNESTENDLTPFINIINEFYAKDTSKKIRAVFKAKGESGKPLATIPPYGYLKDKEDKYKWVIDEEASKVVKKIFQLCVQGYGPSQIASELIKEGIPTPTEHFDKLGINVSSPLSEIKGNWQPKTISLILEKMEYLGHTVNFKTYKKSYKSKKKLENPKEKWQIFENTHEAIIDQETFDIVQRIRQGRRVRNNLGEMPALSGMLYCADCGAKLYQVRGKGWEHEKEYFVCASYRKHKGLCTSHQIKNVQVEELLLHELKKITEYARQYEDDFVKLVQSKTQNELNKSLKESKKDLVHVKERINKLDTIIQRLYEDMVEGKLSEDRFQKLSSNYETEQCELEKKATMLEKIIHDTEQTTLNTTAFLKQVREHTTINKLTPEIIRMFVDKIIVEKPEKIEGTRTKKQTIWIYWNYIGILDIEKTA

SEQ ID NO: 27617 - protein, 533 aa, synthetic construct
MKTAAIYARRSKVVETGDSIENQIQLCTNYLKNIGINNTLIYSDEGFSGKNTERPGFVRLMNDAKQKKFDTLVCYKVDRLSRNIGDFSNLINELEKNEISFISVIEQFDTRAAMGKAMMYICSVFSQLERETISQRVCDNMYSLATNGYWLGGEFPFGFSSSRKNFTDSSGKNRSYSELIPIEKEINLVKLIFNKYIELGSLSQVEKYLLQNNIKTRRGKDWSKASIKNIISNPVYVKANDKTIEYFKSQGIKTYGESDDIHGILIYKKRKGKSGKIRNPDEWIYAVSTHEGIIDSDSWLEVQKIAEINKYKAPALGSSHKALLSGIIRCAQCGSSMRVSYGVPNKLTKKRKHYYMCTLKHNSGKIRCASKNVDGPEVDKLIINKLKELSLDKSYLVQRLKDYKESFATSSENILSKNIQNEISKNKEQIDNLVNNITLTEDPQLVQILLDKLTKLKSKSVDLTNSLNKLNDELAKQDILINNCDNIIQKLKNLSALIDDLDVPQKRSLLSSVIDKVFVDGDTGAVKIKFKTK

SEQ ID NO: 27618 - protein, 502 aa, synthetic construct
MNKKICIYLRKSRADEELEKTLGEGETLSKHRNALLKFAKENKLNVTDIKEEIVSGDSLFFRPKMLELLKEVENNMYYGVLVMDIDRLGRGGMKDQGIILDAFKESKTKIITPLKTYDLDNEMDEEITEFKTFFSRRELKTINRRMQGGRIRSIEEGNYIATNPPYGYDISFIKKNRTLKINEDEAPAINLIFKLYIEGNGASAIANELNNLGYKTKLGNNFSPSSVLTIIKNPIYIGKIPWKRKDIKKSKTPGKVKDTRTRDKSEWIIADGKHPGIVTNEIWESAQKILKGRYHIPYQLSNAPVNPFAGIISCGICGKKMVMRKARGINRLMCIYKCGNKSTRFDNVESDCLEALKDYLSNYSAEIKNSIKKEDIDMYSIQITNLKKELTTLNNQRLKLFDLLERNLYDEDTFLERSKNINDRIENITHTLKSLEKKVKKNSYTSYEEDIKHFKNVLDAYNLTKDVSKKNNLLKSILYKIEYTKTEKGKDYEIKLFPKLRK

SEQ ID NO: 27619 - protein, 502 aa, synthetic construct
MNNKICMYLRKSRADEELEKTLGEGETLSKHRSALLKFAKEKKLNIVEIKEEIVSGESLFFRPKMLELLKEVEAKKYDGVLIMDMQRLGRGDMKDQGIILETLKNSNTKIITPQKTYDLNNDFDEEYTEFEAFMSRKELKMINRRMQGGRVRSVEEGNYIATNPPYGYDIGFIDKSRVLKVNEYESNAIKLIFKLYLDGNGASFIANELNNLGYKTKLGNNFSNSSVLTIIKNPVYIGKIAWKRKDIKKSRTPGKVKDTKTRDKSDWIIADGKHEAIIDMNTWDKTQEILKGKYHIPYQLTNSPANPFAGLITCGVCGKKMVMRKARGINRLMCIYKCGNKSTRFDLVESDCFEALKEHLKNYTAEVENEIIEENTNIYTSQISQLKKELTTLNNQRLKLFDLLERNLYDEDTFLERSKNINDRIETVSSTLKSIEKLLKKKSKSSYQEDIQFFQSVLDAYNETEDIAKKNSLLKSILYKIEYTKLNGSKEHVIKVFPKLRK

SEQ ID NO: 27620 - protein, 570 aa, synthetic construct
MKKVAIYSRKSRFTGKGDSIENQIEMCKEHIKKFVSTDVEFFIYEDEGFSGGNINRPAFKRLMSDIRYGNINLLICYRLDRISRNVADFSSVLDILQEYKVDFISIKEQFDTSSPMGRAMIYIASVFAQLERETIAERIKDNMLEMAKKGKWTGGKLPLGFTSKKTAYIDEEGKKRFNVALVHDTKDLEFVKFLYEKYLELGSLHKLETYTHENNIRSASGKIFEKSTLKIILQNPIYVKADENVFNYFENKGWSVYGEPDGIHSLLSYNKTETAKKDGKLTKRNKDESESLVAVSNIEGYIDSSLWLKVQYQFKKNKDTFPRLGKTHNALLVGKLFCGNCGTRMIIQHGRTSSKTGIKNFYYVCSLKKTSKKKLCKAHNVKTDFLENLVLDALEKLYNKKEYISDSLKINLKQNKNTIEEINNTKKLIELNKAKLDNLVEKLSIDFDNLLSDILIPEMKKLKLEINTLESNLEELKLKKQESEINKIEIDLITSLLNKCKNIKELDRTEQKQIIDCLIDSIYYYSNDNGNDKIKIKFINDIDSINTILSDEEKRQFEKLSFYSHSMSSI

SEQ ID NO: 27621 - protein, 470 aa, synthetic construct
MRVAIYIRKSRGTEEDLLKHEEVLTNLCNANNWSYDLYKEIGSSQDNQREQYNRMKENIENYSKIVVMALDRLSREKQEQAELTKLINKYNFEIVTPTRIYTKHDNLLMDIQELLARQEYQMIRARQIQGTKTSFERGNWVGGIPTIGYKYDRNIRKLVIDEEKAKIYLFIKELALKGYNSSTIVSECYKKNYRSLTNKDFTPTAINRILKCRTYLGEVPYSGEWRKGNHEPLCTYEEYDTICDYITHRRVGIKSKAKTFPLSNLIVCGQCGALYGSTRRKDRGNREYLKTCWRKNVATGEKCNNKGVNAYKVHQAIKQQLEKRMFELKNTLDNFDRTNFENMKNDIQAQIYSLEDNISVLESRNDNIRNMCENGLYTVATAKEKISKNEITIKEYQNKIEILKNKLNNISNKDIENNFEKTKEVLNILYKLNLDDEKNDELINKIYKTIIDKIEMTLSDEKKELKIYYK

SEQ ID NO: 27622 - protein, 549 aa, synthetic construct
MKNKLKSSLNIESPKIAIYMRVSTSKQVDNQSLDTQEKTINSYIASRHDWINPICYKYIESHSASIKPKVSNTLKESSFDSLKRPKLRELFLDATIGKFDYVLCASHDRLTRNTNEGIILKHLFSRLNITLIYCRPGETISSENEALNKFFENLLVNIAALESNITGGRVTLANKHKIQNNFWAGGPPPFGYNLVSQPSNKRNSFLEINFEEARIVKKIFELYNLGCSYTEILTRLNRDFTLPPKRIWTHNTLKEILRNPVYTGFLVWNKRGGARKPNRHSHNDFVKSNLVEKNIIIPENEFLETQKLRNILSRDSKFLSTDFLLRDFLYCNKCNKKLLAKNYGNNKRFYYCSSHNNMEINKKCRSIKASKIESIILSNINDLINSSLESEVQIEKFYDKYIENFNAELLDNKKSLEITINQLKSSTDLLELCVNEINISKDNLTVDYEDLSSSSTEFSFINALLEFQVVTQTEIKSLKARKEYLTYKINSSPKSFDDFKSNLNKSFKLFKYDEEKQKLISSPRSFRLFLLKVVKKIILSDHEITIIFK

SEQ ID NO: 27623 - protein, 537 aa, synthetic construct
MKKAAIYTRKSKFTEKGDSIESQIKLCSKYLDNINIKDYCIYTDEGFSGKNTDRPEFQRMLSDAKAKKFDVIICYKFDRISRNVSDFSNLINKLNELNISFISVVEQFDTNSAIGRAMMYLCTVFSQLERETISQRITDNMYSLATKGYWLGGETPTGFRSEKKFFNSNNKQKMYSSLVPIKEELDLVKLIFNKYLEFNSISKIEKYLLSNNIKTKRNKDWSKASISLILRNPAYVKADEETFKYIESTGSKVYGNPDGKHGLLIYKKNKGRKGAKHDISEWIYAVSEHEGIIDSDIWVAIQKQIKKNAILAPALGTSNIALLTGLIRCAKCNSPMRVAYGKRNPKTNKKNYYYVCTLKTKSGKTRCDSKNLPGLDLDNLILDKLKEMSLDKNTLLKELNKYKDTIESNFHNDVLKNIQNNISKNNSMIDNLLNNVALSTDSEVTAILLEKISKLKDENKLLTQKIDDLKSELEAQETLLNDCNSLITKLKYFSKFIDNSSIEEQKQLVSSVIEKVIADGDTGSIEIKFRPLLDFKI

SEQ ID NO: 27624 - protein, 498 aa, synthetic construct
MKRIAIYSRKSVYVENSESIETQINMCKAYFTRQFKNCEFEIFEDEGFSGKNTDRPAFKRLMKLCSIKSFDAVAVYKIDRLARNIVDFMSIYNELERLEIKLISITEGFDPTTPIGKMMMVMLAGFADMERMNIAQRVKDNMISLAKKGCWTGGAINRGYTAERKADGKKYLKLENEEFIKFTFENFLNGYSMHTLSKMQKEVYGSYGLKGAISIRNMLRSPVYVKSSKDVSDYLKKKGFEVVGKEDNKHGYLTYGLVSKEPFAIVSKHEAVIDPIVWLKVNTKLDNIKSTALTKESKCYWLTGVLKCPYCKANYVLANTKGKTYYTCSTRLKRGANKPNTCQNRTYVNAVEIENLIEDLIKKLYSKKYFDSFFCKSEKVYEDNTLELEKKLKKNEKSIMNLVEKLALIDNSNSATKFITNKIEELSKEISDIKIKIEENKFNKLEIELNKSTPDIIYNNISNFSKCNTLEEKRLRLKLIFKSVYYDPKTKAIEVEFI

SEQ ID NO: 27625 - protein, 493 aa, synthetic construct
MKYFLYIRKSTDEDDRQVLSLEAQETELKEFALRENLLIAATFRESQTAKEPGRPIFNDMLKRMESGEAEGILAWHPDRLARNSIDGGRIIFLIDTGKIKALKSPTFWFEPTPQGKFMLNIAFGQSKYFVDNLSENTKRGLRQKLRRGELPGYAPLGYLNDLLKHTMYKDPERFRLVRKLFELYATGNYSLKDLRKLITSAGLLSRKKNMLSVSNIQSILSNSFYYGVFKYNGEMYDGKHEPMIPKKLFEACQKVMADRSRPKKPSQKEYPFRNMLVCGECGCAITSETQKGHNYYRCTKKRDKKCSQKYIREEVLAEEVANELQKVSLSSAWAEWMLTELNKEEAEAAQSGAVFAQNLKDKIKELEGKLDILLDAHLDGTISREEYTAKKEKIINEKSELSEKSKDFKRNGNHWLELARQFILAAQQAKIIALQENPVAGRDFLKRIGSNRILLSQKVAIEPKKSWQILYNLPAEARSAEATNSQHTIWLLG

SEQ ID NO: 27626 - protein, 565 aa, synthetic construct
MGFNKLVNDIKIEKRRKIISIYCRVSTEEQSENGYSIDEQKRLLEEWCKANDYIIYKCYSDRGISGKNIKDRPALKELLRDAKEGKFDMVISWKINRISRKLEDVLKIVNLLEKNNITFKSYSEPFETDTPAGRMQFQMMALIGEFERGTIAQNVKMGMIAKAKSGNWCGGRVLGYDLVPNNSPEEEKKGKNKLEINEKEAEIVRFIFNEYSKGKGYKAITNQINKLGYKTKKGNNFSVGSIRDILTNPVYIGEVRYNVRQNWSEKRRRNINPNPIRVKGKHEAIIDRELWDKVQLILESKKGKPSRIYDGEYPLTGILRCPKCGAGMVISRTTNTLADGTKRRIAYYCCGNWKNKGTSVCNSNTIRVDKANEYVFKKIEELVSNEAMIKAVVKNINKERKDKVKPAKRLLGDIDKELEKLDKRKRKIFEAYEDDILTKEEFQTRKDELNEKIRILEEEKKPLLNTISEDVSEEIPYEFIKDILMNFSKILNSSVSREQQKKLLHMIISEITMNESREIDSIKLNINDKLVEYLVKEGGVPIKGIPSSFMLRNVGVSILNVSISI

SEQ ID NO: 27627 - protein, 506 aa, synthetic construct
MRSVITYLRYSSAIQGAEGADSTRRQNDLFKQWLKKNGDAQVVASFSDEGLSGYKGKHLTGQFGDMLARIESGEFPEGTVLLVESIDRIGRLEHLETEALMNRILGNGLEIHTLQDGLIYTKDALADDLGISIIQRVKAYIAHQESKQKSFRVSEKWKQRAKLALAGEQRLTKMVPGWIDPDTLKLNEHAETVRLIFKLLLSGESLHNIARHLQSNGIKSFSRRKDANGFSVHSVRTILRSETTIGTLPASQRNDRPAIPNYYEAAIDAATFNKAQEILDKNRKGRTPASDNPLTINIFKGLFRCQCGASVHPTGTKNKYAGVYRCNNHLDGRCDVPPLKRKPFDRWMIDNFLGMIDVGNDGEAEGKIASLQHEVEIVTARIKKATALLLEMDDITELKTQVKGLNQKRTELQTTIDNMRRKASLTDKELPQLKDIDLTTKAGRVECQLILSKHLKGLTLGKDSVIVTLQNDTEITIPTNPLPLNDGTSIFEIAEKELLEIDAYQL

SEQ ID NO: 27628 - protein, 414 aa, synthetic construct
MTKKCFPYVRFSSAKQEDGSTRARQNELIEAFVAKHGLEIDQTLEDAGTSAFRGLNASKDGVLGGFLEQVRNGEIEKGSYLLIENFDRLSRDKIVRSNKIFSDLLFAGIKIVILDKNKVYDADNLDFSEWIIALVEFERANKESERKSDFSSKAWRYNREKMRSGEIVTKKVPNWLSVEDGVFIVDLDKVSRITHLFNLSLKYGLLEATKRYNQEYADKLAPHQVQYILGNRKLIGEHQPKKLYWEDGGKRRLKDEGNPIPNYYPAVIEQELFYKVQEIIKGRKPFTGNYNKQQYNIFRGLIYCRWCGGTIRYMNKGERDYFICTNSMGHKCMAPGQQSIRGKKLFSLFFQFTDKLNIQSLINESKGRRQKLSATPDLSGTVLPLCLIPNSALKSAPPFKSVVPKASACAGLPA

SEQ ID NO: 27629 - protein, 624 aa, synthetic construct
MIKTFIYSRVSSQEQLSGGGLDRQETDVREYVTRNGLDQYEIVAMVDRGISGYDGSNMRDGELGKWYKDAITGMYWGSHLVLEAIDRFSRRDPMLAMEDFTVLVNKGGIKVHIVKFNTFINGDNLPMLSMMMNLAHSESKQKSDRISKGWQRRRRMALDNGTAITARTPYWIDVRDNEYRLNNSSIAVVEAFAMYKQGLSCGLIAKKLNELKHYFPYMWTKTAVQHIVDGLNTSGIIDAPRAIKTIKAFYKSGFSVEDIAKKMNAEFQFMKEWNAPAVHKLLQNKSVTGLVEIQKRKLIQEFDSDGKPLELRTKSEGEKYFESIYPQIISIDDFELIQKLLESNRKVDTKTGKGQTTGGTVTQNEDGELVKQFILSSLCRCYKCGGAMFNNIVRSKRKNGKVDTYSYLRCLNERDAHCDVKALNYPVIERAIIEHVKGLNFDTMFKGTNNSELELLKTREVELLRDIATYEDAIAARKAAGKNTSPVLVTSLVDAQDDLEALQKKIRAISGVTVNAEELTSLNESVFDVAEYELRNMVELELQKIIKRITFNCTEKNIYFITIQYNTGTVLQHGLKVDKKKGVIETYELLEGNKGYVSNGEVITPALIEAAESKNIGIFEGKVM

SEQ ID NO: 27630 - protein, 547 aa, synthetic construct
MKLLVTYIRWSTKEQDSGDSLRRQTNLIDAFYAKHKDDYYLLPAHRYVDKGKSGFHQQHKAQGSDFRRMFENVMSGVIPEGSLIVVENFDRFSRADIDTAIDDVRQILRKGVSILTLGDGELYDKSALTDPVKLIKHIIIAERAHQESLVKQKRIAQVWNHKTQLARELKKPMGKQAPGWLELSDDGSHYIVDEDKASLVNIIYDKRLSGMSMFAICKWLNEQGYPTINQRKVRISKTKKPDGNWSALSVKHILTSRSVLGYLPAKISSEDRKTVLREEIESFYPRIVTDSKFYAVQQLLEETGKGKTSSGEHWLYVNILKGLIRCKCGLVMTPTGIRKPVYQGTYRCNGNKESRCNYGTVSRKLLDTQLCSRLFSKLSQLHDEATDTAKLDELQRRLNTVDSELEKLTETLIQLPNITQIQEALRVKQEEKDELIVQLSREKARVKSVSSLDLSGLDMESVEGRTEAQIIIKRLVKEIVVSGNEKLVDIYLHNGNMIRGFPLDGKDDHTLTLEEATDEMQSLDDMLIFGEPVTRIYPAGDMEEVDA

SEQ ID NO: 27631 - protein, 534 aa, synthetic construct
MAVALYARVSTVKQADKDLSIPDQLRQMQEWCKGQGYCIGETYIEAGASATDDRRPVFQEMITEATKTPAPFEAIIVHSLSRFFRDSLEFALYERKLKRAGVRLVSITQQTSDDPSGEMARKIFSIFDEYQSKENGKHTLRAMKENARQGFWNGSRPPFGYKTVEAEKIGNKGKRKQRLAIDPAESAQVRLIFDLYLNGKGHGPMGAKQIASYLNESGRKHRNVAWTRSRVHEVLSNVTYVGDYYFNRMENKTRRLKPESEWILLKVEPIIDAQTFKAVKSRKASRAFDQVPSRTLTSETLLTGMIKCGCCGAGMTTATGKGGQYRYYKCNTRIAKHIKQCSNPAVPMDKMDSALLDALADKLFTPERVKQILTRLQKQIKAAQSRDEQGVMALQAELAELKKASERLFEAVEKGILPLDEQLQQRSHRLQSRRQELMTEIAATKRRADMPAIRPRQVELFCRALKEKLHDRNSGFAKAYLRQIIGEIRVTGNEAVVTGNSLALAMAVAETKKFRCQAFFENSLMAGSLYGARV

SEQ ID NO: 27632 - protein, 558 aa, synthetic construct
MTKLYSYIRFSSTRQADSSSFERQKRTAKEIAEKYGLELVTSYQDLGVSAFKGANSKTGALSRFMEEIGRSVPVGSWLVVENLDRLSRQSIIEAQELFLSIIRRGITIVTGMDGKVYSKESVNANPLDLLLSVMMFARANEESQTKRNRTNSSALLKIKAHQQNPQSPAVAIEEIGKNMWWTDTTSGRVLPHPVYFPVLQKIVQLRQEGHSAGAILDYLNEHHEPPAPTSNKKHGKWSRAMVSRLFNTKALIGVKTVNVDGVEYELRDYYPRVLSDSEFYFLRKNIVKKAWDYSHDKEKVIPLLSGIGVLRCVHCGATMVKQTAANGKREQYRYCCDGRKSGRTDCPYPNWGFRAVTLEGAVLQLLADKIWIAEDKTNPIPEIQVKIDEISRKIDNLINLSAMMGATKELANQITDLNSQREALHEEIRLFEREMYSVDSQGWDKLAQFDLSDVQNEERLKVRMKIKGALHEIECSRIDSKKNLFVLVYLDGLRQRLVIENNRGLKKGQIFVDLKTINDRQILESAGMVLHPCIEMIIDADWKAPEEIPGLLSEEFGI

SEQ ID NO: 27633 - protein, 546 aa, synthetic construct
MQSDFQTNRVAIYCRLSKDDEFKKGESASIQNQRDMLIDYCKQRNWTIADIYVDDGYTGLNIDRPDFQRMLVDIKAKKIDTVITKDLSRLGRNYLQTGKFTEEFFPKNGVRYIAVNDGVDTNQDNNEIVPFKNVLNEFYSRDVSKKMKSAYYTRAKQGKFTGCLAPFGYKKDENNPHLLVIDEETSWIVEKIFDYTARGYGVQYIRTLLREEKIPTPTWWNRKKGLRNAVTKWEKTMEGGEYVWDCTTLTEMIQNPVYLGHIASQKANYKFKIGWISDKPQEEWLVVEDMHEALIDEDTFEIANEKLKSRKRPFKTGELSLFAGLIKCPDCGKSLNLARNNSKKKEKLFTCNTYRRYGKDFCSQHRIMYDEVYRVVLEDIRSNAKLALKDEKEVLKILELNQEEELDSQVVLAGQMIEEDSLRYKELETKVERLYDDWIDKRINETNFNRLMEKTQKEQDILLERIKVNEKKIKNSESRDINISKWIESIKKYQNIKKLDRHILNELIDKIFVYEKEIIDGEVVQTVEIFYNFLLNTKELNIKYHL

SEQ ID NO: 27634 - protein, 595 aa, synthetic construct
MNTKVKLIKASNIGARNRNALHLDLKRVAAYCRVSTDSKDQLESYKSQVDYYTNLIKNNKNWTLAGIYADEATTGTTATKRADFMRLISDCQNGDIDMIITKSISRFARNTLDTLKYVRLLKENNVGVVFEEENIDTLTMDGELLLTILSSVAQQEVENTSAHVKKGLKMKMEKGELIGFQGCLGYDYDPITKSISINEEEAKIVRYIFKRYLEGNGGSVIGRELEEQGYLTPRGKTKWSDTTVLGIIKNEKYIGDILMGKTFTVDPITKRRLANFGESDKYHIENHHEPIISKEDFEKAQEIRLRRAQNRNTIANKDRKREKLSRQYAFSSMLECGFCGEILSRRTWHTSSIYKKINWQCVKSTKKGKKYCPHSKGIQEAAIEKAFVESYRQLCHADSTVIDDFLKIVEEEINDNTLVKDLKKLENQLNRIISQERKLVDLHLEDSIDEEVYAKKYKKLTKQKEELLDEKKTLELTIKDEDSIKERLKQFKKVLENKEIIEEFNRTVFESIVDKVVVGRIDKDGTVHPYDLTFYFKTGVKDSQDSNNFKDKRKNAKDNDINKLCSYKNDEDKKLCSQSKDNARRVRSVANQGVR

SEQ ID NO: 27635 - protein, 558 aa, synthetic construct
MTKLYSYIRFSSTRQADSSSFERQKRTAKEIAEKYGLELVTSYQDLGVSAFKGANSKTGALSRFMEEIGRSVPVGSWLVVENLDRLSRQSIIEAQELFLSIIRRGITIVTGMDGKVYSKESVNANPLDLLLSVMMFARANEESQTKRNRTNSSALLKIKAHQQNPQNPAVAIEEIGKNMWWTDTTSGRVLPHPVYFPVLQKIVQLRQEGHSAGAILDYLNEHHEPPAPTSNKKHGKWSRAMVSRLFHTKALIGVKTVNVDGVEYELRDYYPRVLSDSEFYFLRKNIIKKAWDYNHDKEKVIPLLSGIGVLRCVHCGATMVKQTAANGKREQYRYCCDGRKSGRTDCPYPNWGFRAVTLEGAVLQLLADKIWIAEDKTNPIPEIQVKIDEISRKIDNLINLSAMMGATKELANQITDLNSQREALHEEIRLFEREMYSVDSQGWDKLAQFDLSDVQNEERLKVRMKIKGALHEIECSRIDSKKNLFVLVYLDGLRQRLVIENNRGLKKGQIFVDLKTINDRQILESAGMVLHPCIEMIIDADWKAPEEIPGLLSEEFGI

SEQ ID NO: 27636 - protein, 558 aa, synthetic construct
MTKLYSYIRFSSMRQSDGSSYERQIRMAKEIADRYNLELVNDYQDLGVSAFKGANSKTGALSRFLDEIGRSIPVGSWLFIENLDRLSRQDIISAQELFLSIIRRGITIVTGMDNKIYSIETVTANPMDLMFSILLFIRGNEESQTKRNRTNSSALLKIKAHQQNPQNPAVAIEEIGKNMWWTDTTSGRVLPHPVYFPVLQKIVQLRQEGHSAGVILDYLNEHHEPPAPTSNKKHGKWSRAMVSRLFNTKALIGVKTVNVDGVEYELRDYYPRVLSDSEFYFLRKNIIKKAWDYSHVKEKVIPLLSGIGVLRCVHCGATMVKQTAANGKREQYRYCCDGRKSGRTDCPYPNWGFRAVTLEGAVLQLLADKIWIAEDKTNPIPEIQVKIDEISRKIDNLINLSAMMGATKELANQITDLNSQREALHEEIRLFEREMYSVDSQGWDKLAQFDLSDVQNEERLKVRMKIKGALHEIECSRIDSKKNLFVLVYLDGLRQRLVIENNRGLKKGQIFVDLKTINDRQILESAGMVLHPCIEMIIDADWKAPEEIPGLLSEEFGI

SEQ ID NO: 27637 - protein, 509 aa, synthetic construct
MRRAISYIRFSSERQLKGDSVRRQSKLVTDWLDKNPEFYLDSSLSFKDLGKSAFSGKHLKGGLGDFLTAIEKGLVKAGDTLLIESLDRLSRQDIDIASELLRRILRAGVDVVTLSDGEHYTKESLKDPLSLIKSILIMQRAHEESLRKSERVQAAWNRKKELISEGIKISRRCPAWLKLNDDRRTFTIIPDKVEVVKRAFDLRLQGLSFWAITRTLNDEGHLSLNQYTPKQKGWSDTAVKKLLRNRAVIGCFTPAGREEVQGYYPAIISESLFYRVQQLNTGQYGRASVSSNPLSVNLFRGIIKCSECGATIVLGGYALKRFGMYRCPNRSANRCSAKAISRKQTDATILYMLALCDRFETENTDTIDSLKLQREDLQRKISKMAELAIELDDMTIITEKLRDMKNALSKLNHDIEEETKRIKAITTGSLKDIDRTTKEGMIETQLLIKGVLKEIVIDAAKRRCKVTFHNGKSITLPITENPSEDVTEAIQSLSEVTERGLIDVDVVEI

SEQ ID NO: 27638 - protein, 598 aa, synthetic construct
MNKIIPYGYLRVSSLEQVRTGGGLDTQDEEVRRYITQNSEKFDIDRMVVMSDAGMSAYTGSNIKEGELGRFLADVNAGLIPTGSALICYSVDRLSRQNPWVGTHLISTLIGAGIEIHSVAENQILRSDDPVGAIMSTIYLMRANNESVIKSERAKKGYEKRLNESITNKKVLTRQMPRWLFDCDGKYAIDPNMQNVINFTFDSYIAGQSTGFIAKELNNRGLMYGNTSWRGSYVAKLIRDERLIGKHIRYSKQIKGVKRVVIETIPNFYPVVVDVEKFFLANNMLTSVAKNIRGRTRVTYGDDSILRNLFNGVIKCGVCGGDTSVVQNTRKKIVNGEATYIPYKTFLRCRTRYELKNCVQSDIRYEVIERAILNHLMGLDISALLSVPVDNKIESYRTELELCKAEEVELHTLIEQREREGKRVRPRTIKAYEDVSDRIDELNKLIESYVEDTFVPDFNVDLISIADVSNVSERSLIKKGIATIADSICYKRISDFILVEIKYRNLSVKHVLVIDNKQSKVVVNFSIEYHENSHDYTCNGLILKYVKSPEEFHLMGVNIEDYAHMMNFVDFISDNEAKKIKEYLVSNLSRVLISNVPE

SEQ ID NO: 27639 - protein, 588 aa, synthetic construct
MPTKPRAYSYIRFSNATQAQGDSYRRQREDAETYCEQHGLELVDSKEYLFFDAGRSAYKARHLDDSGELARFLAYVEDGTVPAGSVLIVESLDRLSRENVQTKALPRFLDLLGKGIDVVTLTDNKRYSAGDDFTSLIISIVYMARAHEESATKGKRVSSAWKIKHEKAQEKATPIGKLCPYWLRFEGGEYHLIPERVKVVQRIYQLAQDGYGHRAISIILNKENIPSFSAERKNASGKWGNSSIAHLLKNRSVLGEYHPHRFVDGVRTPIGEGVKNYFPSIISEDVFYAAQQAINSRKSSQVTRTSGNFNVWAGVAKCEYCRGALHLTNAGRSKNLRCFNNTKGVCPAKPVALIRSEEVFKEILSKVDSLSLVQDNSAKLQQQVAVLDGKIGSITSRLNEIQEQVLAFGGRIPSMLVSTMAKLEDEQAAYMDEREKLKADLGRERIVSKEEFFSRLDMVSYEGRAKANSLLKTLGISVRVRRGEGRGEKAEISYMVDREGETVFSLNDHPLYGIMFFAFEAGSLDAAVLQGDISEQDSSNQAAFIERIGVGKAKQAHLKEMAKNMSYRQIAEKEGMSVREVKRVLGIT

SEQ ID NO: 27640 - protein, 384 aa, synthetic construct
MAGIRTENKIYEVGIYCRLSKDDGTDNESASIATQKSILTDYVKRQGWHLAKTYVDDGYSGTNFQRPSFQNMIKDIENGLINCVITKDLSRLGRNYLDCGLYLEVFFPEHNVRYIAVNDGVDTLNKSAMDITPFRNILNEMYSADVSVKIKSAYRARFQQGKFMGTTAPYGYVKDPADHNHLLIDDKVAHVVREIFDLALAGNGIAKIRKHINKQHILRPAAYAVEQGATGYERYFEDNEENRYIWSENSVRGILRSPIYAGNLAGYKRIAANMKSKKRPSKLPEEWEVIPDTHEGIVTQEEFDTVQQLMTSRRREQNAGGFENIFSGVIKCADCGYAMRAASANRRKRPDIIDCVQYTCNNYGRYGNHLSQITYHKSQVICDC

SEQ ID NO: 27641 - protein, 558 aa, synthetic construct
MTKLYSYIRFSSTRQADSSSFERQKRTAKEIAEKYGLELVTSYQDLGVSAFKGANSKTGALSRFMEEIGRSVPVGSWLVVENLDRLSRQSIIEAQELFLSIIRRGITIVTGMDGKVYSKESVNANPLDLLLSVMMFARANEESQTKRNRTNSSALLKIKAHQQNPQSPAVAIEEIGKNMWWTDTTSGRVLPHPVYFPVLQKIVQLRQEGHSAGVILDYLNEHHEPPAPTSNKKHGKWSRAMVSRLFNTKALIGVKTVNVDGVEYELRDYYPRVLSDSEFYFLRKNIIKKAWDYSHDKEKVIPLLSGIGVLRCVHCGATMVKQTAANGKREQYRYCCDGRKSGRTDCPYPNWGFRAVTLEGAVLQLLADKIWIAEDKTNPIPEIQVKIDEISRKIDNLINLSAMMGATKELANQITDLNSQREALHEEIRLFEREMYSVDSQGWDKLAQFDLSDVQNEERLKVRMKIKGALHEIECSRIDSKKNLFVLVYLDGLRQRLVIENNRGLKKGQIFVDLKTINDRQILESAGMVLHPCIEMIIDADWKAPEEIPGLLSEEFGI

SEQ ID NO: 27642 - protein, 559 aa, synthetic construct
MKTKLYSYIRFSSMRQNDGSSYERQIRMAREIAAKYDLELVNDYQDLGVSAFKGANSKTGALSRFLDAIGRSVPVGSWLFIENLDRLSRADIVSAQELFLSIIRRGITIVTGMDNKIYSLDTVTANPMDLMFSILLFIRGNEESQTKRNRTNSSALIKIKSHQENPQNPAVAIEEVGKNMWWTDTTSGYVLPHPTYFPVVQEIVELRKNGRSTAEILDHLNETYAPPPAVSNKKHSKWSRAMVERLFHTRALIGIKEISVDGVNYELKDYYPRVIDDPTFYHLKKNIGARAWNFGDKEEVKPIPLLSGIGLLKCDHCGCAMVKVKGTNKRSDQYRYTCDATRSRRLDCEHPNWSFRGDQLEKAVLQLLADKIWIAEDKANPVPALKVQVDEISRKIDNLIALSAMTGATKELADQITTLNSERETLYNQIKMAEEEMYSVDSQGWEKLAEFDLEDVYNEERLKVRFKIKQALKRIGCSRIDRNKNLFVLEYIDGKTQRVVIENSRGTRKGQIFVDLKTINDRQILESNGLVLHPCLDMLTDKNWKPEEEIPGPLQEFGI

SEQ ID NO: 27643 - protein, 519 aa, synthetic construct
MKKITKIDSLAQVKSSKLRVAAYARVSTSSEEQLLSLENQKLHYEQRILANSKWEFVEMYFDEGISGTKIDKRDGLKRLLQDCENGKVDFILTKSISRFSRNALDCLEMVRKLNDLNIFIEFEKENINTQTMDGELMLSILSSLAESESRSLSQNTKWGIEKRFQNGTYKIGYPPFGYDWVDGVMVINKEQALVVKDIFADVLKGTSTGDIAEKLNQQGVTTKRRKTWHGTTIRGIIKNEKYIGDALFGKTFTDDSFKRKINRGDKNQYFMEGHHSAIIDKETFDQAQQMLVQNAKSKNIVQDDDKYQNRYSFSGILKCGECGGTFKRRIQTKNKNEKYVAWACTTHLKDKYSCSKKFIKDEQIKLAFITMMNKLVFFHQILLKALLSDLRATTYTVDNTQIAVLDAEVEKLKQQQDNLVQFVANGYIERPTFVKEQNQLTKEMDDLENKRKMLTGSISKGFDNLERLEELVKFTKQAQMLTAFEDSHFDSFVDEVIILSRTELVFKLKCGLKLKERLV

SEQ ID NO: 27644 - protein, 428 aa, synthetic construct
MSTDQDEQLSSYENQVSYYRDYILKHEDYELVDIYADEGISATNTKKREAFNRLIQDCRAGKVDRILVKSISRFARNTLDCIKYVRELKELGIGVTFEKENIDSLDSKGEVLLTILSSLAQDESRSISENATWGIRKKFERGEVRVNTTKFMGYDKDENGKLVINPEQAEVVKHIYHQFLKGYSPESIAKELNTNGIKGWSGKANWYPSSILKMLQNEKYKGDALLQKTYTVDFLTKKRTENDGQVNQYYVTNNHEVIIDTEMWDTVQEELARRKDFREKHKLKTYIMQSDDNPFTTKVFCAECGSAFGRKNWTTSRGKRKVWQCNNRYKVKGQIGCQNNHIDEEMLEKAFMKAVELLQEHRADVVVKWQKLEKGTNLLHKHYAKQMYQLLDLEKFDGTIMNKVLDHISISEVGQIIVIFLEGTEVEL

SEQ ID NO: 27645 - protein, 402 aa, synthetic construct
MKQIKTIQAQKVTAIKRLKVAAYTRVSHTSLLQSLSNQVSHYSQLIQANPEWDYVGVYSDSAISGRSQAYRRDFQQLLEDCRKGKIDLILTKSISRFGRNTVELLETVRELKRLGISVRFEKEKIDTLTAEGELLLTLLASIAQEESQSISQNIRWRVKKRFEEGKPYIPQDIFGYRWNGDEYVIEPHEASIVRQVFEWYMEGLSAPKIAKRLDDRGERTRLGNRFTKRVIYNMFDQEAYCGRLILQKTFRDQFGSRSILNDGQMAKYIVENAHEAIVTPEYFQLVNQEKKRRARRRVSKHDALAKLQGKVYCEHCGLDMVLTLETKFNQEKRVRYYCRTRDAKGVETCLGRTVTEEQLFQAFGESINTEDIHHISFNSVTNEAKAIYRNGEEKHVIIQKGR

SEQ ID NO: 27646 - protein, 590 aa, synthetic construct
MVMDGVKKRVATLYRVSTKGQLDGDDIPMQRNACRSFIEKQGNWELVKEYIEKGVSGFKVSASKRDAIQRAKEDAENGLFDVLLVFMFDRLGRRDDETPFIVEWFINNGIEVWSVKEGQQKLEDHADRLINYIRFWQSSGESRKTSIRVNEKHSQMVEDGIYRGGLVPYGYKTVNSGVFNKKGKELLKVVIDEEEAEIVKKMYDLVLEEGYGQSRIAQYLNEKGIPSKTGKKWTSGAVNNVLRNPMYKGYMVYARGTEKEVVSKEKLEELVIIDEEKWNKVQSIREKRNPENVKNRGEESIITTTKSSLLLVGLVRCGHCGSPLCTTYNKKKYVRKDGTEYVKREAKYRCSGKAQKKVDCDGQTLYSPKKIEGVVLDELYDYLDQLETIDLTSKIQEFKQHNTDKEVKTLKKLQSEFDKVNSALVKLRDEALKIIMGESFFDAKVVNDLINQKENELRELEESINKAKLDLESKKVELSEMEELQRYIPVWREVFEKASVEKKKMMLSTVIDKIVVFRDRVEITFKISLNRFLVNEGSHSNNDALPTELMPHFGLSFISAFYYIYDFFEMQYIYWIFVKGMGIRRFQYQY

SEQ ID NO: 27647 - protein, 559 aa, synthetic construct
MKGKIALYSRVSTSEQSEHGYSIHEQEQVLIKEVVKNFPGYDYETYTDSGISGKNIEGRPAMKRLLQDVKDNKIEMVLSWKLNRISRSMRDVFNIIHEFKEHDVGYKSISENIDTSNASGEVLVTMFGLIGSIERQTLISNVKLSMNAKARSGEAITGRVLGYKLSLNPLTQKNDLVINENEAHIVREIFDLYLNHNKGLKAITTILNQKGYRTINQKPFSVFGVKYILNNPVYKGYVRFNNHQNWAVQRRSGKSDKNDVILVKGKHEAIISEDVFDQVHEKLASKSFKPGRPIGGDFYLRGLIKCPECGNNMVCRRTYYKTKKSKERTIKRYYICSLFNRSGSSACHSNSINAEVVERVINVHLNRILSQPNVIKQIASSVIEELKQKHSKQTEIKYDIDSLDKQKAKVKTQQERLLELFLDDEMDSEMLKAKQSKMNQQLEVLDQQIKEAKQANQSQDDIPNFDKLKARLILMITRFSVYLRKATPEAKNQLMKMLIDSIEITTDKQVKLVRYKIDESLIPQSLKKDWGSFFMPKFNFVINVTNENRIENLSLLPLF

SEQ ID NO: 27648 - protein, 542 aa, synthetic construct
MQQLKTKRVGIYVRVSTEMQSTEGYSIDGQINQIKEYCDFHHFEVKDIYADRGISGKSMNRPELQRILKDAKDGYIDCVMVYKTNRLARNTSDLLKIVEDLHKQNVEFFSLSERMEVNTSSGKLMLQILASFSEFERNNIVENVFMGQTRRAQEGYYQGNLPLGYDKIPNSKHELMINQHEANIVKYIFESYAKGHGYRKIANALNHKGYVTKKGKPFSISSITYILANPFYIGKIQFAKYKDWSEKRRKGLNDKPVIAEGKHSPIINQDLWDKVQMRKKQVSQKPQVHGKGTNLLTGIIHCPQCGAPMAASNTTNTLKDGTKKRIRYYSCSNFRNKGSKVCSANSVRADAIEDYVMKQILEIVKSDKVIQQVVARVNQENQVDCASLHHDIAYKQQQYDEVQIKLNNLIKTIEDNPDLTSVIRPSIQKYEKKLNDITNQINQLKNQQNEDMTLFNAKEISKLLQHIFHDIKHIEKSRLKALYLSVIDRIDIKKDGNHKKHFYVTLKLNNEIIKQLFNNKQLDEVHLSTSSLFLPQTLYLTI

SEQ ID NO: 27649 - protein, 506 aa, synthetic construct
MRSVITYLRFSSAIQGAEGADSTRRQNDLFKQWLKKNSDAQVVASFSDEGLSGYKGKHLTGQFGDMLARIESGEFSEGTVLLVEAIDRIGRLEHLETEALMNRIIAHGIEIHTLQDGLIYTRDALSDDLGISIIQRVKSYVAHQESKQKSFRVSQKWKQRAKLALAGEQRLTKMVPGWIDPDTFKLNEHAETVRLIFKLLLSGESLHNIARHLQANNISSFSRRKDANGFSVHSVRTVLRSESVIGTLPASQRNDRPAIPNYYEAAIDAATFNKAQEILDKNRKGRTPASDNPLTINIFKGLFRCQCGASVHPTGTKNKYAGVYRCNNNPDGRCDVPPLKRKPFDKWMIDNFLGMIDVGNDGEAEGKIASLQHEVEIVTTRIKKATALLLEMDDITELKAQVKELNQKRTELQTTIDSMRRKTSLSDKGLPQLKDIDLMTKAGRVECQLILSKHLKGLTLGKDSVIVTLQNDTEIIVPTDPLPLNDGTSIFEIAEKELLEIDAYQL

SEQ ID NO: 27650 - protein, 514 aa, synthetic construct
MKKVYSYIRFSSTKQAFGDSHRRQSKAIQDWLANHPDHILDESLSFEDLGRSAFHGDHLKEGGALRAFLEAVKQGLIPSDSVLLVESLDRVSRQSISHAQETIRGILEQGITVVTLSDGETYNRQSLDDSLALIRMIILQERSHNESVIKSDRIKKAWSHKRQQFEQDGTKITGNCPGWLKLNSDKKSFSLIPHHIETIHRIFDEKLSGKSLHAIARDLNLENIPTITNKRVDTGWTPTRVRDLLLKESLIGVAYGVSDYFPPAISKEKFHAVQMIRGQGKGKKPTSRQPSSIDILKGICKCAECGSTLRQRNTKKTPEGRYPRGYLECRNRQLGRCNSKAFNRSLIEDILIQKVFPTLQYLGLKSNGDNISVTTLKADITSLEKGINNLISLAEKGLGDLDTLAQRITNNRVELESKKKDLRQAEAILSLRSDNDIQDSDRKTVEGRIKLQLAIKSFVKEIIFDYDKQEITIRLLNGKSFSGISVAREDKDFDHSSMFEVLQKSLLDVDGVCL

SEQ ID NO: 27651 - protein, 558 aa, synthetic construct
MTKLYSYIRFSSMRQSDGSSYERQIRMAKEIADRYNLELVNDYQDLGVSAFKGANSKTGALSRFLDEIGRSIPVGSWLFIENLDRLSRQDIISAQELFLSIIRRGITIVTGMDNKIYSIETVTANPMDLMFSILLFIRGNEESQTKRNRTNSSALLKIKAHQQNPQNPAVAIEEIGKNMWWTDTTSGRVLPHPVYFPVLQKIVQLRQEGHSAGAILDYLNEHHEPPAPTSNKKHGKWSRAMVSRLFATKALIGVKTVNVDGVEYELRDYYPRVLSDSEFYFLRKNIVKKAWDYSHDKEKVIPLLSGIGVLRCVHCGATMVKQTAANGKREQYRYCCDGRKSGRTDCPYPNWGFRAVTLEGAVLQLLADKIWIAEDKTNPIPEIQVKIDEISRKIDNLINLSAMMGATKELANQITDLNSQREALHEEIRLFEREMYSVDSQGWDKLAQFDLSDVQNEERLKVRMKIKGALHEIECSRIDSKKNLFVLVYLDGLRQRLVIENNRGLKKGQIFVDLKTINDRQILESAGMVLHPCIEMIIDADWKAPEEIPGLLSEEFGI

SEQ ID NO: 27652 - protein, 547 aa, synthetic construct
MKLLVTYIRWSTREQDSGDSLRRQTNLIDAFYSKHKNDYYLLPAHRYVDKGKSGFHQQHKAQGSDFRRMFENVMSGAIPEGSLIVVENFDRFSRADIDTAIDDVRQILRKGVSILTLGDGELYDKSALTDPVKLIKHIIIAERAHQESLVKQKRIAQVWNHKTQLARELKKPMGKQAPGWLELSEDGSHYIVDEDKASLVNIIYDKRLSGMSMFAICKWLNEQGYPTINQRKVRISKTKKPDGNWSALSVKHILTSRSVLGYLPAKISTEDRKTVLREEIEGFYPQIVTDSKFYAVQQLLEETGKGKTSSGDHWLYVNILKGLIRCKCGLVMTPTGIRKPVYQGTYRCNGNKESRCSYGTVSRKLLDTQLCSRLFSKLSQLHDEATDTAKLDELQRRLNTVDGELEKLTETLIQLPNITQIQEALRVKQEEKDELIVQLSREKARVKSVSSLDLSGLDMESVEGRTEAQIIIKRLVKEIVVSGNEKLVDIYLHNGNMIRGFPLDGKDDHTLTLEEATDEMQSLDDMLIFGEPVTRIYPAGDMEEVDA

SEQ ID NO: 27653 - protein, 586 aa, synthetic construct
MPKIWPYIRFSSEEQKKGDSLRRQQDLIDKFAARPEIVAEGATIDTSLDLNDLGVSGYTGKNLTVGRFKEFLDAVDKGVVKSGDYLAVEALNRITRLNPTDSLPILLGLMKKGVKIAITADSQIYKQGGDITQLYIALGELQRGYNESNEKGRRVREAWSSKKKRAFATGEIATSRLPLWLRAVKTTERGVVVRSVEEIPERVEVIKEIYRLSDTNVGAIATARILTEKGIPTFTRENARKNPNYGDFWQPSYIKKVLENRSVMGHYQPMTWEKLPDNRRRRINDGPEIKNYFPQIIEPDLFRRVQEKRKSRANDGQGNKGRRFSNIFTKIAHCSKCGATASHVNKGPNPKKGGRYLVCYRARHGDCSYRAWRYDDIETVILKFLAEADIKKIIKDEDRAEVLINEKYEIEARISEIQEMLDNFKEDFKRLKGKVSDLERSMAIENEEAIKELKSKKESVELEIYDVLDRQKADVDSDIQSLRDLSNTEDDNTVFEIRSKINERLRLILECINIDFQDRTIEILFKSGVRRFLHEKGMYGNIPLRSEGEQRDKDLEEILSWANKTDEEKKEIYDNNNFKITPFSLD

SEQ ID NO: 27654 - protein, 506 aa, synthetic construct
MRSVITYLRFSSAIQGAEGADSTRRQNDLFKQWLKKNSDAQVVASFSDEGLSGYKGKHLTGQFGDMLARIESGEFPEGTLLLVEAIDRIGRLEHLETEALMNRIIAHGIEIHTLQDGLIYTRDALSDDLGISIIQRVKSYVAHQESKQKSFRVSQKWKQRAKLALAGEQRLTKMVPGWIDPDTFKCNEHAETVRLIFKLLLDGESLHNIARHLQANNISSFSRRKDANGFSVHSVRTILRSETTRGTLPASQRNDRPAIPNYYEAAIDASTFNKAQEILDKNRKGRTPASDNPLTINIFKGLFRCQCGASVHPTGTKNKYAGVYRCNNHLDGRCDVPPLKRKPFDRWMIDNFLGMIDVGNDGESERKIAALQHEVEIVTARIKKATALLLEMDDITELKAQVKGLNQKRTEIQTTIDTLKRKTSLTDKELPQLKDIDLTTKAGRVECQLILSKHLKGLTLGKDSVTVTLQNDTEITIPTNPLPLNDGSPIFEIADKELLDIDAYQL

SEQ ID NO: 27655 - protein, 558 aa, synthetic construct
MTKLYSYIRFSSMRQSDGSSYERQIRMAKEIADRYNLELVNDYQDLGVSAFKGANSKTGALSRFLDEIGRSIPVGSWLFIENLDRLSRQDIISAQELFLSIIRRGITIVTGMDNKIYSIETVTANPMDLMFSILLFIRGNEESQTKRNRTNSSALLKIKAHQQNPQNPAVAIEEIGKNMWWTDTTSGRVLPHPVYFPVLQKIVQLRQEGHSAGAILDYLNEHHEPPAPTSNKKHGKWSRAMVSRLFHTKALIGVKTVNVDGVEYELRDYYPRVLSDSEFYFLRKNIIKKAWDYSHDKEKVIPLLSGIGVLRCVHCGATMVKQTAANGKREQYRYCCDGRKSGRTDCPYPNWGFRAVTLEGAVLQLLADKIWIAEDKTNPIPEIQVKIDEISRKIDNLINLSAMTGATKELANQITDLNSQREALHEEIRLFEREMYSVDSQGWDKLAQFDLSDVQNEERLKVRMKIKGALHEIECSRIDSKKNLFVLVYLDGLRQRLVIENNRGLKKGQIFVDLKTINDRQILESAGMVLHPCIEMIIDSDWKAPEEIPGLLSEEFGI

SEQ ID NO: 27656 - protein, 558 aa, synthetic construct
MTKLYSYIRFSSMRQSDGSSYERQIRMAKEIADRYNLELVNDYQDLGVSAFKGANSKTGALSRFLDEIGRSIPVGSWLFIENLDRLSRQDIISAQELFLSIIRRGITIVTGMDNKIYSIETVTANPMDLMFSILLFIRGNEESQTKRNRTNSSALLKIKAHQQNPQNPAVAIEEIGKNMWWTDTTSGRVLPHPVYFPVLQKIVQLRQEGHSAGAILDYLNEHHEPPAPTSNKKHGKWSRAMVSRLFATKALIGVKTVNVDGVEYELRDYYPRVLSDSEFYFLRKNIIKKAWDYNHDKEKVIPLLSGIGVLRCVHCGATMVKQTAANGKREQYRYCCDGRKSGRTDCPYPNWGFRAVTLEGAVLQLLADKIWIAEDKTNPIPEIQVKIDEISRKIDNLINLSAMMGATKELANQITDLNSQREALHEEIRLFEREMYSVDSQGWDKLAQFDLSDVQNEERLKVRMKIKGALHEIECSRIDSKKNLFVLVYLDGLRQRLVIENNRGLKKGQIFVDLKTINDRQILESAGMVLHPCIEMIIDADWKAPEEIPSLLSEEFGI

SEQ ID NO: 27657 - protein, 506 aa, synthetic construct
MRSVITYLRYSSAIQGAEGADSTRRQNDLFRQWLKKNIDAQVVASFSDEGLSGYKGKHLSGQFGDMLSRIESGEFPEGTILLVESIDRIGRLEHLETEALMNRILGNGLEIHTLQDGLIYTKDALADDLGISIIQRVKAYIAHQESKQKSFRVSQKWEQRAKLALAGEQRLTKMVPGWIDPDTFKLNEHAETVRLIFKLLLSGESLHNIARHLQSNGIKSFSRRKDANGFSVHSVRTILRSETTIGTLPASQRNDRPAIPNYYEAAIDAATFNKAQEILDKNRKGRTPASDNPLTINIFKGLFRCQCGASVHPTGTKNKYAGVYRCNNHLDGRCDVPPLKRKPFDKWVLENFLGMIDVGNDGESERKIAALQHEVEIVTARIKKATALLLEMDDIDELKIQLKELNQRRTELQTTIDSMRRKTSLSDKGLPQLKDIDLMTKAGRVECQLILSKHLKGLTLGKDSVTVTLQNDTEITIPTNPLPLNDGSPIFEIADKELLDVDIYRL

SEQ ID NO: 27658 - protein, 558 aa, synthetic construct
MTKLYSYIRFSSTRQADSSSFERQKRTAKEIAEKYGLELVTSYQDLGVSAFKGANSKTGALSRFMEEIGRSVPVGSWLVVENLDRLSRQSIIEAQELFLSIIRRGITIVTGMDGKVYSKESVNANPLDLLLSVMMFARANEESQTKRNRTNSSALLKIKAHQQNPQNPAVAIEEIGKNMWWTDTTSGRVLPHPVYFPVLQKIVQLRQEGHSAGVILDYLNEHHEPPAPTSNKKHGKWSRAMVSRLFNTKALIGVKTVNVDGVEYELRDYYPRVLSDSEFYFLRKNIIKKAWDYSHVKEKVIPLLSGIGVLRCVHCGATMVKQTAANGKREQYRYCCDGRKSGRTDCPYPNWGFRAVTLEGAVLQLLADKIWIAEDKTNPIPEIQVKIDDISRKIDNLINLSAMTGATKELANQITDLNSQREALHEEIRLFEREMYSVDSQGWDKLAQFDLSDVQNEERLKVRMKIKGALHEIECSRIDSKKNLFVLVYLDGLRQRLVIENNRGLKKGQIFVDLKTINDRQILESAGMVLHPCIEMIIDSDWKAPEEIPGLLSEEFGI

SEQ ID NO: 27659 - protein, 507 aa, synthetic construct
MKRVISYIRFSSEKQAKGDSLRRQSKMVTDWLKAHPEYYLDQDLSFRDLGVSGFTGKHLKGGLGDFLTAIEKGLVKAGDTLLIESLDRLSRQDIDIASELLRRILRAGVDVVTLSDGEHYTSESLKDPLALIKSILIMQRAHEESLRKAERIQAAWDAKKEAAKAGIKVSKRCPAWLKLNDDRKTFSVIPEKVETVKRCFQLRLEGKSIWDIVRTLNDEGHLSLNQYKAGKFGQTSVQDLLKNRSVIGYFTPKGCEEISGYYPAIIDETTFYKVQQLSHYRYGRKPASAKPLSVNLFKGVIRCSECGHALIITGFSDTRNGIYRCPLRNENRCSAKGLSRKQTDGTLLALLSRLDRFDSDTTNTVDMLRLHREHISSNIEKLVQLSLEIEDLNAITSKLKQLKGELSQVDADIEKETQRLKSIDVGCLSDCDLTTKAGRIEAQLIIKSAVKEVVLNTAKRRCKVTFHNGRIIDLPITENPSEDVTEAIQSLSEVTERGLIDVDEVIV

SEQ ID NO: 27660 - protein, 507 aa, synthetic construct
MKRVISYIRFSSEKQSRGDSLRRQSKMVNDWLKAHPEYYLDQDLSFRDLGVSGFTGKHLKGGLGDFLTAIEKGLVKAGDTLLIESLDRLSRQAVDRASELLRNILRSGVDVVTLSDGEHYTRESLKDPLALIKSILIMQRAHEESLRKSERIQAAWDAKKEAAKAGIKVSRRCPAWLRLNDDRKSFSVIPEKVETVKRCFQLRLEGKSIWEIVRTLNAEGHQTLNQYKAGKFGQTSVQDLLKNRSVIGYFTPKGCEEISGYFPPIIPETDFYKVQQLSYSRYGRKPASDKPLSVNLFKGVIRCSECGHALIITGFGDTRNGIYRCPLRNENRCSAKGLSRKQTDGTLLALLSRLDRFDSDMTNVIDMLRLHREHISSNIEKLVQLSLEIEDLSAITIKLKQLKGELSQVDADIEKETQRLKSIDVGCLSDCDLTTKAGRIEAQLIIKSAVKEVVLNAAKRRCKVTFHNGRIIDLPITENPSEDVTEAIQSLSEVTERGLIDVDVVEI

SEQ ID NO: 27661 - protein, 506 aa, synthetic construct
MRSVITYLRFSSAIQGAEGADSTRRQNDLFKQWLKKNSDAQVVASFSDEGLSGYKGKHLTGQFGDMLARIESGEFPEGTILLVEAIDRIGRLEHLETEALMNRIIAHGIEIHTLQDGLIYTRDALSDDLGISIIQRVKSYVAHQESKQKSFRVSQKWKQRAKLALAGEQRLTKMVPGWIDPDTFKCNEHAETVRLIFKLLLDGESLHNIARHLQANNISSFSRRKDANGFSVHSVRTILRSETTRGTLPASQRNDRPAIPNYYEAAIDAATFNKAQEILDKNRKGRTPASDNPLTINIFKGLFRCQCGASVHPTGTKNKYAGVYRCNNHLDGRCDVPPLKRKPFDKWMLENFLGMIDVGNDGESERKIAALQHEVEIVTARIKKATALLLEMDDIDELKIQLKELNQKRTELQTTIDNMRRKASLTDKELPQLKDIDLMTKAGRVECQLILSKHLKGLTLGKDSVTVTLQNDTEITIPTNPLPLNDGSPIFEIADKELLDIDAFRL

SEQ ID NO: 27662 - protein, 507 aa, synthetic construct
MKRVISYIRFSSERQAKGDSLRRQSKMVNDWLKAHPEYYLDQDLSFRDLGVSGFTGKHLKGGLGDFLTAIEKGLVKAGDTLLIESLDRLSRQDVDQASELLRNILRSGVDVVTLSDGEHYTRESLKDPLSLIKSILIMQRSHEESLRKSERIQAAWDAKKEAAKAGIKISRRCPAWLKLNDDRKSFSVIPEKVETVKRCFQLRLEGKSIWEIVRTLNAEGHQTLNQYKAGSFGQTSVQDLLKNRSVIGYFTPKGCEEIADYYPAIIDETTFYKVQQLSYARYGRKPASDKPMAVNLFKGVIRCSECGHALIITGFSDTRNGIYRCPLRNENRCSAKGLSRKQTDGTLLTLLSRLDRFDSDTTNTIDTLKLHREHISSNIEKLVQLSLEIEDLSAITSKLKQLKNELSQVDADIEKETQRLKSIDVGCLSDCDLTTKAGRIEAQLIIKSAVKEVVLNTAKRRCKVTFHNGKVIDLPITENPSDNVTEAIQSLSEVTERGLIDVDEVII

SEQ ID NO: 27663 - protein, 559 aa, synthetic construct
MKTKLYSYIRFSSMRQNDGSSYERQIRMAREVAAKYDLELVNDYQDLGVSAFKGANSKTGALSRFLDAIGRSVPVGSWLFIENLDRLSRADIVSAQELFLSIIRRGITIVTGMDNKIYSLDTVTANPMDLMFSILLFIRGNEESQTKRNRTNSSALIKIKSHQENPQNPAVAIEEVGKNMWWTDTTSGYVLPHPVYFPVVQEIVELRKNGRSTAEILDHLNETYAPPPAVSNKKHSKWSRAMVERLFHTRALIGIKEISVDGVNYELKDYYPRVIDDPTFYHLKKNIGARAWNFGDKEEVKPIPLLSGIGLLKCDHCGCAMVKVKGTNKRSDQYRYTCDATRSRRLDCEHPNWSFRGDQLEKAVLQLLADKIWIAEDKANPVPALKVQVDEISRKIDNLIALSAMTGATKELADQITTLNSERETLYNQIKMAEEEMYSVDSQGWEKLAEFDLEDVYNEERLKVRFKIKQALKRIGCSRIDRNKNLFVLEYIDGKTQRVVIENSRGTRKGQIFVDLKTINDRQILESNGLVLHPCLDMLTDKDWKPEEEIPGPLQEFGI

SEQ ID NO: 27664 - protein, 452 aa, synthetic construct
MKAAIYIRVSTQEQVENYSIQAQTEKLTALCRSKDWDVYDIFIDGGYSGSNMNRPALNEMLSKLHEIDAVVVYRLDRLSRSQRDTITLIEEYFLKNNVEFVSLSETLDTSSPFGRAMIGILSVFAQLERETIRDRMVMGKIKRIEAGLPLTTAKGRTFGYDVIDTKLYINEEEAKQLRLIYDIFEEEQSITFLQKRLKKLGFKVRTYNRYNNWLTNDLYCGYVSYKDKVHVKGIHEPIISEEQFYRVQEIFSRMGKNPNMNRDSASLLNNLVVCGKCGLGYVHRRKDTVSRGKKYHYRYYSCKTYKHTHELEKCGNKIWRADKLEELIIDRVNNYSFASRNVDKEDELDSLNEKLKTEHTKKKRLFDLYISGSYEVSELDAMMSDIDAQINYYEAQIEANEELKKNKKIQENLADLATVDFDSLEFREKQLYLKSLINKIYIDGEQVTIEWL

SEQ ID NO: 27665 - protein, 452 aa, synthetic construct
MKAAIYIRVSTQEQVENYSIQAQTEKLTALCRSKDWDVYDTFIDGGYSGSNMNRPALNEMLSKLHEIDAVVVYRLDRLSRSQRDTITLIEEYFLKNNVEFVSLSETLDTSSPFGRAMIGILSVFAQLERETIRDRMVMGKIKRIESGLPLTTAKGRTFGYDVVDTKLYINEEEAKQLQMIYDIFEEEKSITFLQKRLKKLGFKVKSYSSYNNWLTNDLYCGYVSYKDKVHTKGIHEPIISEEQFYRVQEIFSRMGKNPNMNKESASLLNNLVVCSKCGLSFVHRRKDTVSRGKKYHYRYYSCKTYKHTHELEKCGNKIWRADKLEELIIDRVNNYSFASRNVDKEDELDNLNEKLKTEHTKKKRLFDLYISGSYEVSELDAMMADIDAQINYYEAQIEANEELKKNKKIQENLADLATVDFDSLEFREKQLYLKSLINKIYIDGEQVTIEWL

SEQ ID NO: 27666 - protein, 452 aa, synthetic construct
MKAAIYIRVSTQEQIENYSIQAQTEKLTALCRSKDWDVYDIFIDGGYSGSNMNRPALNEMLSKLHEIDAVVVYRLDRLSRSQRDTITLIEEYFLKNNVEFVSLSETLDTSSPFGRAMIGILSVFAQLERETIRDRMVMGKIKRIEAGLPLTTAKGRTFGYDVIDTKLYINEEEAKQLQLIYDIFEEEQSITFLQKRLKKLGFKVRTYNRYNNWLTNDLYCGYVSYKDKVHVKGIHEPIISEEQFYRVQEIFTRMGKNPNMNRDSASLLNNLVVCSKCGLGFVHRRKDTMSRGKKYHYRYYSCKTYKHTHELEKCGNKIWRADKLEELIIDRVNNYSFASRNIDKEDELDSLNEKLKIEHTKKKRLFDLYISGSYEVSELDAMMSDIDAQINYYEAQIEANEELKKNKKIQENLADLATVDFDSLEFREKQLYLKSLINKIYIDGEQVTIEWL

SEQ ID NO: 27667 - protein, 452 aa, synthetic construct
MKAAIYIRVSTQEQVENYSIQAQTEKLTALCRSKDWDVYDIFIDGGYSGSNMNRPALNEMLSKLHEIDAVVVYRLDRLSRSQRDTITLIEEYFLKNNVEFVSLSETLDTSSPFGRAMIGILSVFAQLERETIRDRMVMGKIKRIEAGLPLTTAKGRTFGYDVIDTKLYINEEEAKQLQMIYDIFEEEQSITFLQKRLKKLGFKVRTYNRYNNWLTNDLYCGYVSYKDKVHVKGIHEPIISEEQFYRVQEIFARMGKNPNMNRDSASLLNNLVVCGKCGLGFVHRRKDTVSRGKKYHYRYYSCKTYKHTHELEKCGNKIWRADKLEELIIDRVNNYSFASRNVDKEDELDYLNEKLKIEHAKKKRLFDLYINGSYEVSELDSMMNDIDAQINYYEAQIEANEELKKNKKIQENLADLATVDFDSLEFREKQLYLKSLINKIYIDGEQVTIEWL

SEQ ID NO: 27668 - protein, 416 aa, synthetic construct
MAHISVVTPVRPPTPKLVNVAAYARVSTNGTEQLASLSAQVSYYSRLIQSTPGWAYVGVFTDEGITGTSTKSRQGLADLMDAARSGGVDIVLCKSISRLARNTVDLLATVRELKDLGVAVRFERERIDTLSADGELLLTLLASFAQEESRSLSHNVKWAIRNRYKNGGTNSFVVYGYHWANGQFTIIEEEAKIVRLLFANYLDGISPEKTATMLNAEGKRSRGGGRFYGSVFRRMLENERYKGCQMLQKMYRPTIQAPTCALNDGELPRYWVEQALPAIIDEVMFDAVQAEIAHRREVGPAATPSKNTGVFTGRICCGACGKNYQRKTRTYKSGTSYKFWRCWSACTGNGNPCRGHNLRETLLEQACADMLGTQGFDPVQVGEQIVMIEAFEHQLTFHLADGTMTPVGLTSEGRLA

SEQ ID NO: 27669 - protein, 532 aa, synthetic construct
MKVPVWSYARISTLKQVDGFGIQRQVNTINQFLQYVVLDHRLPFTLDTENITQMVAEGKSAFRGKNWNEKTKLGQYRKMVMDGVINDSVLIVENIDRLTRLDPFQAVEIISGLINRGTTILEIETGMTYSRYIPESITVLTMQINRANGESKRKSIMMQKSHQNRYGNVSKVRPRWFDVVEIDGVKQYRTNETAKAIQRMYNDYINGIGAAQIVRTYGNTDNGKPWTLVTVLRALSDKRVADDARYPPIIDKDLYDRVQALKASTNKKGNTHQKNMLNIFSGMSRCPVCNQSIIVKRNSHGNLFTVCLGKRTNKTCEARSIAYNALERPLLTAIRGLDFSEVYKHEDNNVLTLRDQWIQNERDIAAFRERLNKASRHEKFAILDELEIMNREQEELTIRLKSVDVPKDIQLTFDDDKLDLDTNYRIELNNRIKKLIQHINIVREDVSKSSYTIYCTIKYWSDALSHLVIIDVDIQRTGTGGTNTLTTTLRSVSSLSLDGTLSGDLDDDALEYWKNVVDGAMSLATKMIDSRK

SEQ ID NO: 27670 - protein, 557 aa, synthetic construct
MTIVDAEQSALNSLVTPSRPMGAVAVTYLRVSTKEQAERGGTDEGFSIPAQRDANHRKADDLGATIVEEFVDAGESARKADRPDLMRMIKYVTKHKVDYCIVHKVDRLARNRADDVAIHLALRDSGVMLVSATENIDETPSGMLLHGIMSTIAEFYSRNLATETVKGLSQKAASGGTVTKAPLGYRNVGVRDEYGREVRTVEVDQERGKLIRWAFQVYASGEWSTNQLHAELTARGLTTPPTPRRPSKPIGRSSLHRILTNPYYKGDVTYQGVTYKGTHQALVPAEVWYQVQTVLSMHRSAADATQIHDHYLKGTVFCGQCGARLLVCNAKNARGNIYPYFVCAARHSGRGTCTRQAMLIEEVERLIERHYETVQITKQTRQAVAAKLHATFDELMASESDALEAMTTERNRLEDEQLRVLQAHYAGAVPLDLLKKEQDRISAALETIEHRITAHHGEYAEARANLDDSLDLLEHAAEVYANCDDANRRLCNQAFFKAIYIDEDNDVQVGYATPFDALTDRELQTNALVWAEDGRNESEVRTLTGSTVESSHLAHLG

SEQ ID NO: 27671 - protein, 584 aa, synthetic construct
MKKNNVEIIKADSLVRRRGDNFERESKRVAAYCRVSSDSEDQKNSYESQVRHYKDYISQRSDWELAGIYADEGISGTQVGKRQDFQRLINDCVNGEIDYIVTKAIARFARNTLDTLKYVRMLKDMQIGVYFEEENIDTLTMDGELLLTILSSVAQQEVENTSAHVKKGLKMKMQRGELIGFQGCLGYDYDVETKQLSINKKEAKIVRYIFERYLEGIGGKVIARELDELGYKSPRGLDHWNDTTVLGIIKNEKYKGDILMGKTFTVDPISKRRLSNFGEEDKYYIKDNHEPIISKEDFEKAQEIRLRRAGNKKTAANVNGKRERYSKMYAFSSMLECGFCGSILSRRSWHCRSDYRKVVWHCVTSIKKGKKFCKHSKGLEELAIEGAFMEAYRKLYHSNENLMTDLLETIESELNDNSLNKELKRITNKLRTLLKKEENLVNLRLEGKISDTIYNEKYNEISSEKEFLAEEKVNIETTLKSEIDVKKRLTEFKHLLSSQKMLTEFDRAVFESIVEKIIVGGVNSDGEIDPAMLTIIFKTGETQNKDGKQFKSKRKNAKLETDKLCPQNSDEDKKLYSQGPDNTH

SEQ ID NO: 27672 - protein, 506 aa, synthetic construct
MRTVITYLRFSSATQGAEGADSTRRQNELFKQWLRKNSDAQVVASFSDEGLSGYKGKHLTGQFGDMLARIESGEFPESTILLVESIDRIGRLEHLETEALMNRILGNGIEIHTLQDGLVYTKDALADDLGISIIQRVKAYIAHQESKQKSFRVSQKWKQRAKLALAGEQRLTRNVPGWIDPDTFKCNEHAETVRLIFKLLLDGESLHNIARHLQSNDIKSFSRRKDANGFSVHSVRTVLRSESVIGTLPASQRNDRPAIPNYYEAAIDAATFNKAQEILDKNRKGRTPASDNPLTINIFKGLFRCQCGASVHPTGTKNKYAGVYRCNNNPDGRCDVPPLKRKPFDRWMIDNFLGMIDVGNDGEAEGKIASLQHEVEIVTTRIKKATALLLEMDDIDELKIQLKELNQKRTELQTTIDNMRRKASLTDKELPQLKDIDLTTKAGRVECQLILSKHLKGLTLGKDTVTVTLQNDTEITIPTDPLPLNDGTSIFEIAEKNLLNIDTFQL

SEQ ID NO: 27673 - protein, 487 aa, synthetic construct
MQFYGVYVRVSTDRDEQVSSVENQIDICRNWLERNGFKWDEKRVFKDEGISGTLFVDRPSIQLLLQKAKAKEINMVVFKSISRLARDLKDSLEIREVFLAHNVRIISVEEGYDSVKAGKNDMAFELWSLFSAQYSRTLSSSITAALAVKVRRGEHIGKVPFGYNRENQKLVIHDEEAEVVRKIYSWYNAGWGYKKITNELNRLGVKSKTKKNWQMTSVQRILRNPIYKGTFILNQYTSVKVGGKKKQIRNPKEKWFVFPNHHPAIVDEKTWEQANQKNIVLSKTKITPWNEFRELAKCAVCGSNMVIVQSYLRKKNGERTEWKYLKCSQYRRAGKHGCVNHVPIQYSEFRQFIIELLIKKGEFIALKLQSNVEQGKKEKIKKLQQFVNTNEQKKKSLLDLYLEKLIDKKEFEKKRNDLEAEIMKVDRELFVLQNDDVVQTGVKTIKEAFEQLRKQGEDLFHVFKTLIQEIIVHQNGTVDILYIFEKT

SEQ ID NO: 27674 - protein, 532 aa, synthetic construct
MKQYNEMRLEDVLQPGKRVAFYARYSTKDQGYDMQKHSVEEFIKKFGCRIDYEYIDAGVSAIKIPFEDRTFLQKLIHDARDNKFDCIVVYKNDRIARQIEEHDKFRKQMHELNMHVAISSSYELYTLGEIVPQTVKDGLTRIEAALIQERTKDTFHSKAKRGECLSSKAPYGYVYRVIMENIGGRKSRIEQYDDVEQEQQVVKEIYRLFELGYGFQQIADEMESKRWDERIEWRKGRIRYIITNPFYCGLMAMNRYYKGVLNDKNKWIIGKVPNMNPIFPQEYWEYIIRMFEERRGRKVHSTDYSTPFLLRNILYCTHCKEPMTTKNQEPGGAKYKNKTDREIRRIYDCKNCNFKLQAGMVHEQFRKKYLPYILEQVMQGKKDQVELSIEKRLKKEISNFRIANRKLGAEAIELNQQIEELNREIKLHYEQEIIQEEVLEFMKILMSHRSDKIHELNVIKDNQDELQKRMNRIEQTIKEKSYFPPHDLLSEFTQENVNQQKLRAFLLQFFKCVYITSNGELLMTVNNSLIES

SEQ ID NO: 27675 - protein, 507 aa, synthetic construct
MFFKETETQEIIKYEDYPYAVYARVSSEKDEQVTSIANQIDICHHWIEKNNYEWKDEAIQLDDGISGTVLLDRKAMQLILDKAQKRKLKMVVFKSISRLARDLKDALEIREVLLAHGVRVVTLEEGYDSLYEGKNSMKFEMFSMFAAQYPQTISVAASGALAAKARRGEHSGRVPFGFKKEGKFLAINEEEAKVVRFIFDLHNNHGYGHKRIVLKLNEELALGNIVKPQKTEFWQLSTVQTILKNPIYCGVFIANRHTQVKIGGRKKFIRNPKEKWTVYKDWCPKIISEEEYEKANNKEHKMRKKRFNPRNELRGMMKCGVCGCNMVVLPSYKYNQKREKKEFNYLKCSAYRRGGTALCVNHAPMQYKDLRAFVIKTLKQKGKKLKLDVKSDFEEQKKNRIKRTKIEIENAENKKKRLIELYLEDQLITKTEFQVKRKELEEQIEKLNDKLFMLEREEEETIDISNIKNAFAQLERTDQDLFEAFSALIDKLVIYEDGTVDFHYKFK

SEQ ID NO: 27676 - protein, 506 aa, synthetic construct
MRTVITYLRFSSATQGAEGADSTRRQNELFKQWLRKNSDAQVVASFSDEGLSGYKGKHLTGQFGDMLARIEAGEFPAGAILLVESIDRIGRLEHLETEALMNRIIAHGIEIHTLQDGLIYTRDALSDDLGISIIQRVKSYLAHQESKQKSFRVSEKWKQRAKLALAGEQHLTRNVPGWIDPDTFKCNEHAETVRLIFKLLLDGESLHNIARHLQSNDIKSFSRRKDANGFSVHSVRTVLRSESVIGTLPASQRNDRPAIPNYYEAAIDVSTFNKAQEILDKNRKGRTPASDNPLTINIFKGLFRCQCGASVHPTGTKNKYAGVYRCNNHLDGRCDVPPLKRKPFDKWMIDNFLGMIDVGNDGEAEGKIASLQHEVEIVTTRIKKATALLLEMDDITELKTQVKELNQKRTELQTMIDNMRRKASLTDKELPQLKDIDLMTKAGRVECQLILSKHLKGLTLGKDSVTVTLQNDTEITIPTNPLPLNDGTSIFEIADKELLDIDAFRL

SEQ ID NO: 27677 - protein, 506 aa, synthetic construct
MRSVITYLRFSSATQGAEGADSTRRQNDLFKQWLKKNSDAQVVASFSDEGLSGYKGKHLTGQFGDMLARIEAGEFPAGTLLLVEAIDRIGRLEHLETEALMNRILGNGIEIHTLQDGLIYTKDALADDLGISIIQRVKAYIAHQESKQKSFRVSQKWEQRAKLALAGEQRLTKMVPGWIDPDTFKLNEHAETVRLIFKLLLDGESLHNIARHLQSNDIKSFSRRKDANGFSVHSVRTVLRSESVIGTLPASQRNDRPAIPNYYEAAIDAATFNKAQEILDKNRKGRTPASDNPLTINIFKGLFRCQCGASVHPTGTKNKYAGVYRCNNHLDGRCDVPPLKRKPFDKWMIDNFLGMIDVGNDGEAEGKIASLQHEVEIVTARIKKATALLLEMDDIDELKIQLKELNQRRTELQTTIDSMRRKTSLSDKGLPQLKDIDLMTKAGRVECQLILSKHLKGLTLGKDSVTVTLQNDTEITIPTNPLPLNDGTSIFEIAEKNLLNIDTFQL

SEQ ID NO: 27678 - protein, 559 aa, synthetic construct
MKTKLYSYIRFSSMRQNDGSSYERQIRMAREVAAKYDLELVNDYQDLGVSAFKGANSKTGALSRFLDAIGRSVPVGSWLFIENLDRLSRADIVSAQELFLSIIRRGITIVTGMDNKIYSLDTVTANPMDLMFSILLFIRGNEESQTKRNRTNSSALIKIKSHQENPQNPAVAIEEVGKNMWWTDTTSGYVLPHPTYFPVVQEIVELRKNGRSTAEILDHLNETYAPPPAVSNKKHSKWSRAMVERLFHTRALIGIKEVSVDGVNYELKDYYPRVIDDATFYHLKKNIGARAWNFGDKEEAKPIPLLSGIGLLKCDHCGCAMVKVKGTNKRSDQYRYTCDATRSRRLDCEHPNWSFRGDQLEKAVLQLLADKIWIAEDKANPVPALKVQVDEISRKIDNLIALSAMTGATKELADQITTLNSERETLYNQIKMAEEEMYSVDSQGWEKLAEFDLEDVYNEERLKVRFKIKQALKRIGCSRIDRNKNLFVLEYIDGKTQRVVIENSRGTRKGRIFIDLKTINDRQILESNGLVLHPCLDMLTDKNWKPEQEIPGPLQEFGI

SEQ ID NO: 27679 - protein, 506 aa, synthetic construct
MRSVITYLRFSSAIQGAEGADSTRRQNDLFKQWLKKNSDAQVVASFSDEGLSGYKGKHLTGQFGDMLARIESGEFSEGTVLLVEAIDRIGRLEHLETEALMNRIIAHGIEIHTLQDGLIYTRDALSDDLGISIIQRVKSYVAHQESKQKSFRVSQKWKQRAKLALAGEQRLTKMVPGWIDPDTFKLNEHAETVRLIFKLLLSGESLHNIARHLQANNISSFSRRKDANGFSVHSVRTVLRSESVIGTLPASQRNDRPAIPNYYEAAIDASTFNKAQEILDKNRKGRTPASDNPLTINIFKGLFRCQCGASVHPTGTKNKYQGVYRCNSHLDGRCDVPPLKRKPFDRWMIDNFLGMIDVGNDGEAEKEIASLQHEVETVTARIKKATALLLEMDDITELKTQVKELNQKRTELQTTINTMKRKTSLSDKGLPQLKDIDLMTKAGRVECQLILSKHLKGLTLGKDSVIVTLQNDTEITIPTDPLPLNDGTSIFEIAEKNLLNIDTFQL

SEQ ID NO: 27680 - protein, 540 aa, synthetic construct
MKQPYNTTIYNTALYMRLSRDDENYGDSVSIETQRTILQQYAKEQGLHVVGEYVDDGWSGTNFERPDFQRMMDDMEAGKVNCIVTKDLSRFGREHVMMDYYLEFLFPEKRVRYIAVAENEDTEKGLSDFVPFKNLFNEWFAKDTSRKVKAAFKAKFATGQRIGAYAPIGYRKHPEIKNKLIIDEETRWIVEKIFDLAIHGRGAASITRILIAEKVPTPGFINFQRDGTFANIYAGAPEEKSYAWTIAQVKSIMKDETYIGHTIHYRETNISFKNKRRIRKPQSEWVRVENTQEPIISEQVFRQVQEQIANRRRKCKDGTTQIFSGLVKCADCGWSLSYGENRQNSKPYGHYHCSKYGQGTRQCSMHYIRYDVLYAYVLSRLQYWSGLVQHDEERLLKRLLNATDKGQAAARKKQAAELKKAEKRKAEVDTLFARMYEDWAAGRITEYNFSMLSGKYQSEQAELDEKIERLQSAIATESQNAADAEKWIALMKECVNPTELTAELLNTLIEKIVVHEAVKGEDGSREQEVEIFYRFIGKID

SEQ ID NO: 27681 - protein, 507 aa, synthetic construct
MKRVISYIRFSSEKQAKGDSLRRQSKMVTDWLKAHPEYYLDESLTFRDLGVSGFTGKHLKGGLGDFLTAIEKGLVKAGDTLLIESLDRLSRQNVDRASELLRNILRSGVDVVTLSDGEHYTKESLRDPLSLIKSILIMQRSHEESLRKSERIQAAWNRKKELISEGIKISKRCPAWLKLNDDRKSFSVIPEKVETVKRCFQLRLEGKSIWEIVRTLNAEGHQTLNQYKAGSFGQTSVQDLLKNRSVIGYFTPKGCEEIAGYFPPIIPETDFYKVQQLSYSRYGRKPASDKPLSVNLFKGVIRCSECGHALIITGFSDTRNGIYRCPLRNENRCSAKGLSRKQTDGTLLALLSRLDRFDSDMTNTIDTLKLHREHISSNIEKLVQLSLEIEDLSAITIKLKQLKGELSQVDADIEKETQRLKSIDVGCLSDCDLTTKAGRIEAQLIIKSAVKEVVLNTAKRRCKVTFHNGKVIDLPITENPSDNVTEAIQSLSEVTERGLIDVDVVEI

SEQ ID NO: 27682 - protein, 507 aa, synthetic construct
MKRAISYIRFSSEKQSRGDSLRRQSKMVTDWLKAHPEYYLDQDLSFRDLGVSGFTGKHLKGGLGDFLTAIEKGLVKAGDTLLIESLDRLSRQDIDIASELLRNILRSGVDVVTLSDGEHYTRESLRDPLALIKSILIMQRAHEESLRKSERIQAAWDAKKEAAKAGIKVSKRCPAWLKLNDDRKSFSVIPEKVETVKRCFQLRLEGKSIWEIVRTLNDEGHQSMSQYKPGKFGQTSVQDLLKNRSVIGYFTPKGCEEIAGYYPAIIDETTFYKVQQLSHYRYGRKPASAKPLSVNLFKGVIRCSECGHALIITGFSDTRNGIYRCPLRNENRCSAKGLSRKQTDGTLLALLSRLDRFDSDMTNTIDMLRLHREHISNNIEKLVQLSLEIEDLSAITIKLKQLKGELSQVDADIEKETQRLKSIDVGCLSDCDLTTKAGRIEAQLIIKSAVKEVVLNAAKRRCKVTFHNSKSITLPITENPSEDVTEAIQSLSEVTERGLIDVDEVII

SEQ ID NO: 27683 - protein, 507 aa, synthetic construct
MKRAISYIRFSSEKQSRGDSLRRQSKMVNDWLKAHPEYYLDQDLSFRDLGVSGFTGKHLKGGLGDFLTAIEKGLVKAGDTLLIESLDRLSRQNVDRASELLRNILRSGVDVVTLSDGEHYTRESLKDPLALIKSILIMQRAHEESLRKAERIQAAWDAKKEAAKAGIKISRRCPAWLRLNDDRKSFSVIPDKVETVKRCFQLRLEGKSIWEIVRTLNAEGHRSMNQYKPGKFGQTSVQDLLKNRSVIGYFTPKGCEEISGYYPAIIDETTFYKVQQLSHYRYGRKPVSDKPLSVNLFKGVIRCSECGHALIITGFSDTRNGIYRCPLRNENRCSAKGLSRKQTDGTLLTLLSRLDRFDSDTTNTIDMLRLHREHISSNIEKLVQLSLEIEDLSAITSKLKQLKNELSQVDADIEKETQRLKSIDVGCLSDCDLTTKAGRIEAQLIIKSAVKEVVLNTAKRRCKVTFHNGKSITLPITENPSEDVTEAIQSLSEVTERGLIDVDVVEI

SEQ ID NO: 27684 - protein, 506 aa, synthetic construct
MRTVITYLRFSSATQGAEGADSTRRQNELFKQWLRKNSDAQVVASFNDEGLSGYKGKHLSGQFGDMLSRIESGEFPEGTILLVEAIDRTGRLEHLETEALMNRIIAHGIEIHTLQDGLIYTRDALSDDLGISIIQRVKSYLAHQESKQKSFRVSEKWKQRAKLALAGKQRLTKMVPGWIDPDTLKLNEHAETVRLIFKLLLSGESLHNIARHLQANNISSFSRRKDANGFSVHSVRTVLRSESVIGTLPASQRNDRPAIPNYYEAAIDAATFNKAQEILDKNRKGRTPASDNPLTINIFKGLFRCQCGASVHPTGTKNKYAGVYRCNSHLDGRCDVPPLKRKPFDKWMIDNFLGMIDVGNDGEAEGKIASLQHEVEIVTTRIKKATALLLEMDDITELKTQVKELNQKRTELQATIDSMRRKTSLSDKGLPQLKDIDLMTKEGRVECQLILSKHLKGLTLGKDSVTVTLQNDTEITIPTNPLPLNDGTSIFEIADKELLDIDAFRL

SEQ ID NO: 27685 - protein, 507 aa, synthetic construct
MKRVISYIRFSSEKQAKGDSLRRQSKMVTDWLKAHPEYYLDQDLSFRDLGVSGFTGKHLKGGLGDFLTAIEKGLVKAGDTLLIESLDRLSRQDIDIASELLRNILRSGVDVVTLSDGEHYTRESLRDPLALIKSILIMQRAHEESLRKAERIQAAWDAKKEAAKAGIKVSKRCPAWLKLNDDRKSFSVIPEKVETVKRCFQLRLEGKSIWEIVRTLNDEGHQTLNQYKAGKFGQTSVQDLLKNRSVIGYFTPKGCEEISGYYPAIIDETTFYKVQQLSHYRYGRKPVSDKPLSVNLFKGVIRCSECGHALIITGFSDTRSGIYRCPLRNENRCNAKGLSRKQTDGTLLTLLSRLDRFDSDTTNTIDTLKLHREHISSNIEKLVQLSLEIEDLNAITSKLKQLKNELSQVDADIEKETQRLKSIDVGCLSDCDLTTKAGRIEAQLIIKSAVKEVVLNTAKRRCKVTFHNGRLIDLPITENPSEDVTEAIQSLSEVTERGLIDVDVVEI

SEQ ID NO: 27686 - protein, 559 aa, synthetic construct
MKTKLYSYIRFSSMKQADGSSYERQKRTAAEIAAKYDLELVTSYQDFGVSAFKGANSRTGALSRFLDEIGRSVPVGSWLVVENLDRISRQSIIEAQELFLSIIRRGITIVTGMDGKVYSKESVNANPIDLLLSVMLFARANEESQTKRNRTNSSALIKIKAHQENPQNPAVAIEEIGKNMWWTDTTSGYVLPHPVFFPIVQEVVELRRNGRSTAEILDHLNATYTPPPAASHKRHSNWSRAMIERLFHTRALIGIKEISVDGVKYELKDYYPRVLDDAEFYHLKKSIGVRACNYGDKEEVKPIPLLSGVGLLKCEHCGSAMVKVKGTNKRPNQYRYSCDAMRSSRIACVHTNWSFRGDQLEKAVLQLLADKIWIAEDKANPVPALKVQIDEISRKIDNLITLSAMTGATKELADQITTLNSERETLYNQIKMAEEEMYSVDSQGWEKLAEFDLEDVYNEDRIKVRFKIKQALKRIGCSRIDRNKNLFVLEYIDGKTQRVVIENSRGTRKGRIFIDLKTINDRQILESNRLVLHPCLDMLTDKNWKPEEEIPGPLQEFGI

SEQ ID NO: 27687 - protein, 547 aa, synthetic construct
MKLLATYIRWSTREQDSGDSLRRQTNLIDAFYSKHKNDYYLLPAHRYVDKGKSGFHQQHKNQGSDFRRMFENVMSGAIPEGSLIVAENFDRFSRADIDTAIDDVRQILRKGVSILTLGDGELYDKSALTDPVKLIKHIIIAERAHQESLVKQKRIAQVWNHKTQLARELKKPMGKQAPGWLELSDDGSHYIVDEDKASLVNIIYDKRLSGMSMFAICKWLNEQGYPTINQRKVRISKTKKPDGNWSALSVKHILTSRSVLGYLPAKISTEDRKTVLREEIESFYPQIVTDSKFYAVQQLLEETGKGKTSSGDHWLYVNILKGLIRCKCGLVMTPTGIRKPVYQGTYRCNGNKESRCNYGTVSRKLLDTQLCSRLFSKLSQLHDEATDTAKLDELQRRLNTVDSELEKLTETLIQLPNITQIQEALRVKQEEKDELIVQLSREKARVKSVSSLDLSGLDMESVEGRTEAQIIIKRLVKEIVVSGNEKLVDIYLHNGNMIRGFPLDGKDDHTLTLEEATDEMQPLDDMLIFGEPVTRIYPAGDMEEVDA

SEQ ID NO: 27688 - protein, 507 aa, synthetic construct
MKRVISYIRFSSERQAKGDSLRRQSKMVTDWLKAHPEYYLDQDLSFRDLGVSGFTGKHLKGGLGDFLTAIEKGLVKAGDTLLIESLDRLSRQDIDIASELLRNILRSGVDVVTLSDGEHYTRESLKDPLALIKSILIMQRAHEESLRKAERIQAAWDAKKEAAKAGIKISRRCPAWLKLNDDRKSFSVIPEKVETVKRCFQLRLEGKSIWEIVRTLNAEGHQTLNQYKAGKFGQTSVQDLLKNRSVIGYFTPKGCEEISGYYPAIIDETTFYKVQQLSYARYGRKPASDKPLSVNLFKGVIRCSECGHALIITGFSDTRSGIYRCPLRNENRCSAKGLSRKQTDGTLLTLLSRLDRFDSDTTNIIDMLRLHREHISSNIEKLVQLSLEIEDLSAITIKLKQLKGELSQVDADIEKETQRLKSIDVGCLSDCDLTTKAGRIEAQLIIKSAVKEVVLNTAKRRCKVTFHNGRAITLPITENPSEDVTEAIQSLSEVTERGLIDVDVVEI

SEQ ID NO: 27689 - protein, 509 aa, synthetic construct
MRRAISYIRFSSERQLKGDSVRRQSKLVTDWLDKNPEFYLDSSLSFKDLGKSAFSGKHLKGGLGDFLTAIEKGLVKAGDTLLIESLDRLSRQDIDIASELLRRILRAGVDVVTLSDGEHYTRESLKDPLSLIKSILIMQRAHEESLRKSERVQAAWNRKKELISEGIKVSRRCPAWLRLNDDRRTFTIIPDKVEVVKRAFDLRLQGLSFWAITRTLNDEGHLSLNQYTPKQKGWSDTAVKKLLRNRAVIGCFTPAGREEVQGYYPAIISESLFYRVQQLNTGQYGRASVSSNPLSVNLFRGIIKCSECGATIVLGGYALKRFGMYRCPNRSANRCSAKAISRKQTDTTILYMLALCDRFETENTDTIDSLKLQREDLQRKISKMAELAIELDDMTIITEKLRDMKNALSKLNHDIEEETKRIKAITTGSLKDIDRTTKEGMIETQLLIKGVLKEIVIDAAKRRCKVTFHNGRAITLPITEDPSEDVTEAIQSLSEVTERGLIDVDTFQL

SEQ ID NO: 27690 - protein, 507 aa, synthetic construct
MKRAISYIRFSSEKQSRGDSLRRQSKMVNDWLKAHPEYYLDQDLSFRDLGVSGFTGKHLKGGLGDFLTAIEKGLVKAGDTLLIESLDRLSRQNVDRASELLRNILRSGVDVVTLSDGEHYTRESLKDPLALIKSILIMQRSHEESLRKSERIQAAWNRKKELISEGIKISKRCPAWLKLNDDRKSFSVIPEKVETVKRCFQLRLEGKSIWEIVRTMNAEGHQTLHQHKAGSFGQTSVQDLLKNRSVIGYFTPKGCEEISGYYPAIIDETTFYKVQQLSYARYGRKPASDKPLSVNLFKGVIRCSECGHALIITGFSDTRNGIYRCPLRNENRCSAKGLSRKQTDGTLLTLLSRLDRFDSDTTNTIDMLRLHREHISSNIEKLVQLSLEIEDLSAITIKLKQLKGELSQVDADIEKETQRLKSIDVGCLSDCDLTTRAGRIEAQLIIKSAVKEVVLNTAKRRCKVTFHNGKVIDLSITENPSEDVTEAIQSLSEVTERGLIDVDEVII

SEQ ID NO: 27691 - protein, 507 aa, synthetic construct
MKRVISYIRFSSEKQAKGDSLRRQSKMVNDWLKAHPEYYLDQDLSFRDLGVSGFTGKHLKGGLGDFLTAIEKGLVKAGDTLLIESLDRLSRQDVDQASELLRNILRSGVDVVTLSDGEHYTRESLKDPLALIKSILIMQRSHEESLRKSERIQAAWNRKKELISEGIKISKRCPAWLKLNDDRKSFSVIPEKVETVKRCFQLRLEGKSIWEIVRTLNDEGHQTLNQYKAGKFGQTSVQDLLKNRSVIGYFTPKGCEEISGYYPAIIDETTFYKVQQLSHYRYGRKPVSDKPLSVNLFKGVIRCSECGHALIITGFSDTRNGIYRCPLRNENRCSAKGLSRKQTDGTLLTLLSRLDRFDSDTTNTIDMLRLHREHISSNIEKLVQLSLEIEDLSAITSKLKQLKGELSQVDADIEKETQRLKSIDVGCLSDCDLTTKAGRIEAQLIIKSAVKEVVLNTAKRRCKVTFHNGRAITLPITENPSEDVTEAIQSLSEVTERGLIDVDEVII

SEQ ID NO: 27692 - protein, 509 aa, synthetic construct
MRRAISYIRFSSERQLKGDSVRRQSKLVTDWLDKNPEFYLDSSLSFKDLGKSAFSGKHLKGGLGDFLTAIEKGLVKAGDTLLIESLDRLSRQDIDIASELLRRILRAGVDIVTLSDGEHYTRESLKDPLSLIKSILIMQRAHEESLRKSERVQAAWNRKKELISEGIKVSRRCPAWLRLNDDRRTFTIIPDKVEVVKRAFDLRLQGLSFWAITRTLNDEGHLSLNQYTPKQKGWSDTAVKKLLRNRAVIGCFTPAGREEVQGYYPAIISESLFYRVQQLNTGQYGRASVSSNPLSVNLFRGIIKCSECGATIVLGGYALKRFGMYRCPNRSANRCSAKAISRKQTDATILYMLALCDRFETENTDTIDSLKLQREDLQRKISKMAELAIELDDMTIITEKLRDMKNALSKLNHDIEEETKRIKAITTGSLKDIDRTTKEGMIETQLLIKGVLKEIVIDAAKRRCKVTFHNGRAITLPITENPSEDVTEAIQSLSEVTERGLIDVDEVII

SEQ ID NO: 27693 - protein, 547 aa, synthetic construct
MKLLATYIRWSTREQDSGDSLRRQTNLIDAFYSKHKNDYYLLPAHRYVDKGKSGFHQQHKNQGSDFRRMFENVMSGVIPEGSLIVVENFDRFSRADIDTAIDDVRQILRKGVSILTLGDGELYDKSALTDPVKLIKHIIIAERAHQESLVKQKRIAQVWNHKTQLARELKKPMGKQAPGWLELSEDGSHYIVDEDKASLVNIIYDKRLSGMSMFAICKWLNEQGYPTINQRKVRISKTKKPDGNWSALSVKHILTSRSVLGYLPAKISTEDRKTVLREEIEGFYPQIVTDSKFYAVQQLLEETGKGKTSSGEHWLYVNILKGLIRCKCGLVMTPTGIRKPVYQGTYRCNGNKESRCSYGTVSRKLLDTQLCSRLFSKLSQLHDEATDTAKLDELQRRLNTVDGELEKLTETLIQLPNITQIQEALRVKQEEKDELIVQLSREKARVKSVSSLDLSGLDMESVEGRTEAQIIIKRLVKEIVVSGNEKLVDIYLHNGNMIRGFPLDGKDDHTLTLEEATDEMQSLDDMLIFGEPVTRIYPAGDMEEVDA

SEQ ID NO: 27694 - protein, 507 aa, synthetic construct
MKRVISYIRFSSEKQSRGDSLRRQSKMVTDWLKAHPEYHLDQDLSFRDLGVSGFTGKHLKGGLGDFLTAIEKGLVKAGDTLLIESLDRLSRQAVDRASELLRNILRSGVDVVTLSDGEHYTKESLRDPLSLIKSILIMQRSHEESLRKSERIQAAWDAKKEAAKAGIKVSKRCPAWLKLNDDRKSFSVIPDKVETVKRCFQLRLEGKSIWEIVRTLNAEGHRSMNQYKPGKFGQTSVQDLLKNRSVIGYFTPKGCEEIAGYYPSVIDETTFYKVQQLSHSRHGRKPVSDKPLSVNLFKGVIRCSECGHALIITGFSDTRNGIYRCPLRNENRCSAKGLSRKQTDGTLLTLLSRLDRFDSDTTNTIDMLRLHREHISSNIEKLVQLSLEIEDLNAITNKLKQLKNELSQVDADIEKETQRLKSIDTGSLSDCDLSTKAGRIEAQLIIKSAVKEVVLNTAKRRCKVTFHNGRLIDLPITENPSEDVTEAIQSLSEVTERGLIDVDVVEI

SEQ ID NO: 27695 - protein, 506 aa, synthetic construct
MRSVITYLRYSSAIQGAEGADSTRRQNDLFKQWLKKNSDAQVVASFNDEGLSGYKGKHLSGQFGDMLSRIESGEFSEGTILLVEAIDRIGRLEHLETEALMNRIIAHGIEIHTLQDGLIYTRDALSDDLGISIIQRVKSYIAHQESKQKSFRVSQKWEQRAKLALAGEQRLTKMVPGWIDPDTFKLNEHAETVRLIFKLLLSGESLHNIARHLQSNGIKSFSRRKDANGFSVHSVRTVLRSGSVIGTLPASQRNDRPAIPNYYEAAIDAATFNKAQEILDKNRKGRTPASDNPLTINIFKGLFRCQCGASVHPTGTKNKYQGVYRCNNHLDGRCDVPPLKRKPFDRWMIDNFLGMIDVGNDGESERKIAALQHEVEIVTARIKKATALLLEMDDITELKTQVKGLNQKRTELQTTIDNMRRKASLTDKELPQLKDIDLTTKAGRVECQLILSKHLKGLTLGKDSVTVTLQNDTEITIPTNPLPLNDGSPIFEIADKELLDIDAYQL

SEQ ID NO: 27696 - protein, 506 aa, synthetic construct
MRTVITYLRFSSAIQGAEGADSTRRQNDLFKQWLKKNSDAQVVASFSDEGLSGYKGKHLTGQFGDMLARIESGEFPEGTILLVEAIDRIGRLEHLETEALMNRIIAHGIEIHTLQDGLIYTRDALSDDLGISIIQRVKSYVAHQESKQKSFRVSQKWKQRAKLALAGEQRLTKMVPGWIDPDTFKCNEHAETVRLIFKLLLDGESLHNIARHLQANNISSFSRRKDANGFSVHSVRTILRSETTIGTLPASQRNDRPAIPNYYEAAIDAATFNKAQEILDKNRKGRTPASDNPLTINIFKGLFRCQCGASVHPTGTKNKYAGVYRCNNNPDGRCDVPPLKRKPFDRWMIDNFLGMIDVGNDGESERKIAALQHEVEIVTARIKKATALLLEMDDITELKAQVKGLNQKRTEIQTTIDALKRKTSLTDKELPQLKDIDLTTKAGRVECQLILSKHLKGLTLGKDSVTVTLQNDTEITIPTNPLPLNDGSPIFEIADKELLDIDAYQL

SEQ ID NO: 27697 - protein, 507 aa, synthetic construct
MKRVISYIRFSSERQAKGDSLRRQSKMVNDWLKAHPEYYLDQDLSFRDLGVSGFTGKHLKGGLGDFLTAIEKGLVKAGDTLLIESLDRLSRQAVDRASELLRNILRSGVDVVTLSDGEHYTSESLKDPLALIKSILIMQRAHEESLRKSERIQAAWDAKKEAAKAGIKISKRCPAWLKLNDDRKSFSVIPEKVETVKRCFQLRLEGKSIWEIVRTLNDEGHQTLNQYKAGKFGQTSVQDLLKNRSVIGYFTPKGREEISGYYPAIIDETTFYKVRQLSHYRYGRKPVSAKPLSVNLFKGVIRCSECGHALIITGFSDTRNGIYRCPLRNENRCSAKGLSRKQTDGTLLTLLSRLDRFDSDMTNVIDSLKIHREHISSNIEKLVQLSLEIEDLNAITNKLKQLKNELSQVDADIEKETQRLKSIDVGCLSDCDLTTKAGRIEAQLIIKSAVKEVVLNTAKRRCKVTFHNSKSITLPITENPSEDVTEAIQSLSEVTERGLIDVDVVEI

SEQ ID NO: 27698 - protein, 547 aa, synthetic construct
MKLLVTYIRWSTKEQDSGDSLRRQTNLIDAFYSKHKEEYYLLPAHRYVDKGKSGFHQQHKNQGSDFRRMFENVMSGVIPEGSLIVVENFDRFSRADIDTAIDDVRQILRKGVSILTLGDGELYDKSALTDPVKLIKHIIIAERAHQESLVKQKRIAQVWNHKTQLARELKKPMGKQAPGWLELSEDGSHYIVDEDKASLVNIIYDKRLSGMSMFAICKWLNEQGYPTINQRKVRISKTKKPDGNWSALSVKHILTSRSVLGYLPAKISTEDRKTVLREEIEGFYPQIVTDSKFYAVQQLLEETGKGKTSSGDHWLYVNMLKGIIRCKCGLVMTPTGIRKPVYQGTYRCNGNKESRCSYGTVSRKLLDTQLCSRLFSKLSQLHDEATDTAKLDELQRRLNTVDSELEKLTETLIQLPNITQIQEALRVKQEEKDELIAQLSREKARVKSVSSLDLSGLDMESVEGRTEAQIIIKRLVKEIVVSGNEKLVDIYLHNGNMIRGFPLDGKDDHTLTLEEATDEMQSLDDMLIFGEPVTRIYPAGDMEEVDA

SEQ ID NO: 27699 - protein, 506 aa, synthetic construct
MRHVITYLRYSSAIQGAEGADSTRRQNELFKQWLRKNSDAQVVASFSDEGLSGYKGKHLTGQFGDMLARIEAGEFPAGTILLVESIDRIGRLEHLETEALMNRILGNGIEIHTLQDGLIYTRDALSDDLGISIIQRVKSYIAHQESKQKSFRVSEKWKQRAKLALAGKQRLTKMVPGWIDPDTFKLNEHAETVRLIFKLLLDGESLHNIARHLQSNGIKSFSRRKDANGFSVHSVRTILRSETTIGTLPASQRNDRPAIPNYYEAAIDAATFNKAQEILDKNRKGRTPASDNPLTINIFKGLFRCQCGASVHPTGTKNKYQGVYRCNNHLDGRCDVPPLKRKPFDKWMIDNFLGMIDVGNDGESERKIAALQHEVEIVTARIKKATALLLEMDDIDELKIQLKELNQKRTELQTTIDNMRRKASLTDKELPQLKDIDLTTKAGRVECQLILSKHLKGLTLGKDTVTVTLQNDTEITIPTDPLPLNDGTSIFEIAEKNLLNIDTFQL

SEQ ID NO: 27700 - protein, 547 aa, synthetic construct
MKLLVTYIRWSTKEQDSGDSLRRQTNLIDAFYSKHKNDYYLLPAHRYVDKGKSGFHQQHKAQGSDFRRMFENVMSGVIPEGSLIVVENFDRFSRADIDTAIDDVRQILRKGVSILTLGDGELYDKSALTDPVKLIKHIIIAERAHQESLVKQKRIAQVWNHKTQLARELKKPMGKQAPGWLELSEDGSHYIVDEDRASLVNIIYDKRLSGMSMFAICKWLNEQGYPTINQRKVRISKTKKPDGNWSALSVKHILTSRSVLGYLPAKISTEDRKTVLREEIEGFYPQIVTDSKFYAVQQLLEETGKGKTSSGDHWLYVNILKGLIRCKCGLVMTPTGIRKPVYQGTYRCNGNKESRCSYGTVSRKLLDTQLCSRLFSKLSQLHDEATDTAKLDELQRRLNTVDGELEKLTETLIQLPNITQIQEALRVKQEEKDELIVQLSREKARVKSVSSLDLSGLDMESVEGRTEAQIIIKRLVKEIVVSGNEKLVDIYLHNGNMIRGFPLDGKDDHTLTLEEATDEMQSLDDMLIFGEPVTRIYPAGDMEEVDA

SEQ ID NO: 27701 - protein, 547 aa, synthetic construct
MKLLVTYIRWSTKEQDSGDSLRRQTNLIDAFYSKHKNDYYLLPAHRYVDKGKSGFHQQHKAQGSDFRRMFENVMSGAIPEGSLIVVENFDRFSRADIDTAIDDVRQILRKGVSILTLGDGELYDKSALTDPVKLIKHIIIAERAHQESLVKQKRIAQVWNHKTQLARELKKPMGKQAPGWLELSEDGSHYIVDEDKASLVNIIYDKRLSGMSMFAICKWLNEQGYPTINQRKVRISKTKKPDGNWSALSVKHILTSRSVLGCLPAKISSEDRKTVLREEIESFYPQIVTDSKFYAVQQLLEETGKGKTSSGEHWLYVNILKGLIRCKCGLVMTPTGIRKPVYQGTYRCNGNKESRCSYGTVSRKLLDTQLCSRLFSKLSQLHDEATDTAKLDELQRRLNTVDSELEKLTETLIQLPNITQIQEALRVKQEEKDELIVQLSREKARVKSVSSLDLSGLDMESVEGRTEAQIIIKRLVKEIVVSGNEKLVDIYLHNGNMIRGFPLDGKDDHTLTLEEATDEMQSLDDMLIFGEPVTRIYPAGDMEEVDA

SEQ ID NO: 27702 - protein, 546 aa, synthetic construct
MKLLVTYIRWSTREQDSGDSLRRQTNLIDAFYSKHKEDYYLLPAHKYVDKGKSGFHQQHKNQGSDFRRMFDNVMSGAIPEGSLIVVENFDRFSRADIDTAIDDVRQILRKGVSILTLGDGELYDKSALTDPVKLIKHIIIAERAHQESLVKQKRIAQVWNHKTQLARELKKPMGKQAPGWLELSDDGSHYIVDEDKASLVNIIYDKRLSGMSMFAICKWLNEQGYPTINQRKVRISKTKKPDGNWSALSVKHILTSRSVLGYLPAKVSEDRKTVLREEIEGFYPQIVTDSKFYAVQQLLEETGKGKTSSGEHWLYVNILKGIIRCRCGLVMTPTGIRKPVYQGTYRCNGNKESRCSYGTVSRKLLDTQLCSRLFSKLSQLHDEATDTARLDELQRRLTSVDSELEKLTETLIQLPNITQIQEALRVKQEEKDELIAQLSREKARVKSVSSLDLSGLDMESVEGRTEAQIIIKRLVKEIVVSGNEKLVDIYLHNGNMIRGFPLDGKDDHTLTLEEATDEMQPLDDMLIFGEPVTRVYPAGDMEEVDA

SEQ ID NO: 27703 - protein, 506 aa, synthetic construct
MRSVITYLRYSSAIQGVEGADSTRRQNDLFKQWLKKNNDAQVLASFNDEAVSGYKGKHLTGQFGDMLARIESGEFPEGTILLVESIDRIGRLEHLETEALMNRILSNGLEIHTLQDGLVYTKDALADDLGISIIQRVKAYIAHQESKQKSFRVSQKWEQRAKLALAGEQRLTKMVPGWIDPETFKLNEHAETVRLIFKLLLDGESLHNIARHLQSNGIKSFSRRKDANGFSVHSVRTILRSETTIGTLPASQRNDRPAIPNYYEAAIDASTFNKAQEILDKNRKGRTPASDNPLTINIFKGLFRCQCGASVHPTGTKNKYAGVYRCNNHLDGRCDVPPLKRKPFDKWMIDNFLGMIDVGNDGEAEKEIASLQHEVETVTARIKKATALLLEMDDITELKAQVKELNQKRTELQTTIDTLKRKTSLTDKELPQLKDIDLMTKAGRVECQLILSKHLKGLTLGKDSVTVTLQNDTEITIPTDPLPLNDGSPILEIAEKNLLEIDGFQL

SEQ ID NO: 27704 - protein, 507 aa, synthetic construct
MKRAISYIRFSSEKQSRGDSLRRQAKMVTDWLKAHPEYYLDESLTFRDLGVSGFTGKHLKGGLGDFLTAIEKGLVKAGDTLLIESLDRLSRQDVDQASELLRNILRSGVDVVTLSDGEHYTRESLKDPLALIKSILIMQRSHEESLRKSERIQAAWDAKKEAAKAGIKISKRCPAWLKLNDDRKSFSIIPEKVETVKRCFQLRLEGKSIWAIVKALNDEGHQTLNQYKAGKFGQTSVQDLLKNRSVIGYFTPKGCEEIAGYYPAIIDETTFYKVQQLSHSRYGKRSVSDKPLSVNLFKGVIRCSECGHALIITGFSDTRNGIYRCPLRNENRCSAKGLSRKQTDGTLLALLSRLDRFDSDTTNTIDMLRLHREHISSNIEKLVQLSLEIEDLSAITIKLKQLKGELSQVDADIEKETQRLKSIDVGCLSDCDLTTKAGRIEAQLIIKSAVKEVVLNTAKRRCKVTFHNGKSITLSITENPSEDVTEAIQSLSEVTERGLIDVDEVII

SEQ ID NO: 27705 - protein, 506 aa, synthetic construct
MRSVITYLRFSSATQGAEGADSTRRQNDLFKQWLKKNSDAQVVASFSDEGLSGYKGKHLTGQFGDMLARIESGEFPEGTLLLVEAIDRIGRLEHLETEALMNRIIAHGIEIHTLQDGLIYTRDALSDDLGISIIQRVKSYVAHQESKQKSFRVSQKWKQRAKLALAGEQRLTKMVPGWIDPDTFKLNEHAETVRLIFKLLLDGESLHNIARHLQSNDIKSFSRRKDANGFSVHSVRTVLRSVSAIGTLPASQRNDRPAIPNYYEAAIDAATFNKAQEILDKNRKGRTPASDNPLTINIFKGLFRCQCGASVHPTGTKNKYQGVYRCNNHLDGRCDVPPLKRKPFDKWMIDNFLGMIDVGNDGEAEGKIAALQHEVEIVTARIKKATALLLEMDDITELKTQVKGLNQKRTELQTTIDNMRRKASLTDKELPQLKDIDLTTKAGRVECQLILSKHLKGLTLGKDSVIVTLQNDTEITIPTNPLPLNDGTSIFEIAEKNLLNIDTFQL

SEQ ID NO: 27706 - protein, 507 aa, synthetic construct
MKRAISYIRFSSEKQSRGDSLRRQSKMVTDWLKAHPEYHLDQDLSFRDLGVSGFTGKHLQGGLGDFLTAIEKGLVKAGDTLLIESLDRLSRQNVDRASELLRNILRSGVDVVTLSDGEHYTRESLKDPLALIKSILIMQRSHEESLRKSERIQAAWNRKKELISEGIKISKRCPAWLKLNDDRKSFSVIPEKVETVKRCFQLRLEGKSIWEIVRTLNAEGHQTLNQYKAGKFGQTSVQDLLKNRSVIGYFTPKGCEEISGYYPAIIDETTFYKVQQLSYARYGRKPASDKPLSVNLFKGVIRCSECGHALIITGFSDTRSGIYRCPLRNENRCSAKGLSRKQTDGTLLALLSRLDRFDSDMTNVIDTLKLHREHISSNIEKLVQLSLEIEDLNAITNKLKQLKNELSQVDADIEKETQRLKSIDTGSLSDCDLSTKAGRIEAQLIIKSAVKEVVLNTAKRRCKVTFHNGRAITLPITENPSKDVTEAIQSLSEVTERGLIDVDEVII

SEQ ID NO: 27707 - protein, 559 aa, synthetic construct
MKTKLYSYIRFSSMRQNDGSSYERQIRMAREVAAKYDLELVNDYQDLGVSAFKGANSKTGALSRFLDAIGRSVPVGSWLFIENLDRLSRADIVSAQELFLSIIRRGITIVTGMDNKIYSLDTVTANPMDLMFSILLFIRGNEESQTKRNRTNSSALIKIKAHQENPQNPAVAIEEVGKNMWWADTTSGYVLPHPVFFPIVQEVVELRRNGRSTAEILDHLNATYTPPPAVSNKKHSKWSRAMVERLFHTRALIGIKEVSVDGVNYELKDYYPRVIDDPTFYHLKKNIGARAWNFGDKEEVKPIPLLSGIGLLKCDHCGCAMVKVKGTNKRSDQYRYTCDAIRSRRLDCEHPNWSFRGDQLEKAVLQLLADKIWIAEDKANPVPALKVQIDEISRKIDNLIALSAMTGATKELADQITALNSERETLYNQIKMAEEEMYSVDSQGWEKLAEFDLEDVYNEERIKVRFKIKQALKRIGCRRIDRNKNLFVLEYVDGKTQRVVIENSRGTRKGRIFIDLKTINDRQILESNGLVLHPCLDMLTDKNWKPEEEIPGPLQEFGI

SEQ ID NO: 27708 - protein, 559 aa, synthetic construct
MKTKLYSYIRFSSMRQNDGSSYERQIRMAREVAAKYDLELVNDYQDLGVSAFKGANSKTGALSRFLDAIGRSVPVGSWLFIENLDRLSRADIVSAQELFLSIIRRGITIVTGMDNKIYSLDTVTANPMDLMFSILLFIRGNEESQTKRNRTNSSALIKIKAHQENPQNPAVAIEEVGKNMWWTDTTSGYVLPHPVYFPVVQEIVELRKNGRSTAEILDHLNETYAPPPAVSNKKHSKWSRAMVERLFHTRALIGIKEISVDGVNYELKDYYPRVIDDATFYHLKKNIGARAWNFGDKEEVKPIPLLSGIGLLKCDHCGCAMVKVKGTNKRSDQYRYTCDATRSRRLDCEHPNWSFRGDQLEKAVLQLLADKIWIAEDKANPVPALKVQVDEISRKIDNLIALSAMTGATKELADQITTLNSERETLYNQIKMAEEEMYSVDSQGWEKLAEFDLEDVYNEERLKVRFKIKQALKRIGCSRIDRNKNLFVLEYIDGKTQRVVIENSRGTRKGQIFVDLKTINDRQILESNGLVLHPCLDMLTDKNWKPEEEIPGPLQEFGI

SEQ ID NO: 27709 - protein, 547 aa, synthetic construct
MKLLVTYIRWSTKEQDSGDSLRRQTNLIDAFYAKHKDDYYLLPAHRYVDKGKSGFHQQHKNQGSDFRRMFENVMSGVIPEGSLIVVENFDRFSRADIDTAIDDVRQILRKGVSILTLGDGELYDKSALTDPVKLIKHIIIAERAHQESLVKQKRIAQVWNHKTQLARELKKPMGKQAPGWLELSDDGSHYIVDEDKASLVNIIYDKRLSGMSMFAICKWLNEQGYPTINQRKVRISKTKKPDGNWSALSVKHILTSRSVLGYLPAKISTEDRKTVLREEIESFYPQIVTDSKFYAVQQLLEETGKGKTSSGEHWLYVNILKGLIRCKCGLVMTPTGIRKPVYQGTYRCNGNKESRCSYGTVSRKLLDTQLCSRLFSKLSQLHDEATDTAKLDELQRRLNTVDSELEKLTETLIQLPNITQIQEALRVKQEEKDELIVQLSREKARVKSVSSLDLSGLDMESVEGRTEAQIIIKRLVKEIVVSGNEKLVDIYLHNGNMIRGFPLDGKDDHTLTLEEATDEMQSLDDMLIFGEPVTRIYPAGDMEEVDA

SEQ ID NO: 27710 - protein, 507 aa, synthetic construct
MKRAISYIRFSSEKQSRGDSLRRQAKMVTDWLKAHPEHYLDESLTFRDLGVSGFTGKHLKGGLGDFLTAIEKGLVKAGDTLLIESLDRLSRQNVDRASELLRNILRSGVDVVTLSDGEHYAKESLKDPLALIKSILIMQRSHEESLRKSERIQAAWDVKKEAAKAGIKISKRCPAWLKLNDDRKTFSVIPEKVETVRRCFQLRLEGKSIWEIVRTLNAEGHRSMNQYKPGKFGQTSVQDLLKNRSVIGYFTPKGCEEIAGYYPSVIDETTFYKVQQLSHSRYGRKPVSAKPLSVNLFKGVIRCSECGHALIITGFSDTRSGIYRCPLRNENRCSAKGLSRKQTDGTLLTLLSRLDRFDSDTTNIIDMLRLHREHISSNIEKLVQLSLEIEDLSAITIKLKQLKGELSQVDADIEKETQRLKSIDVGCLSDCDLTTKAGRIEAQLIIKSAVKEVVLNTAKRRCKVTFHNGRAITLPITENPSDNVTEAIQSLSEVTERGLIDVDEVII

SEQ ID NO: 27711 - protein, 507 aa, synthetic construct
MKRVISYIRFSSEKQAKGDSLRRQSKMVNDWLKAHPEYYLDESLTFRDLGVSGFTGKHLKGGLGDFLTAIEKGLVKAGDTLLIESLDRLSRQAVDRASELLRNILRSGVDIVTLSDGEHYTSESLKDPLALIKSILIMQRAHEESLRKSERIQAAWDAKKEAAKAGIKVSKRCPAWLKLNDDRKSFSVIPEKVATVKRCFQLRLEGKSIWEIVRTLNDEGHQTLNQYKPGKFGQTSVQDLLKNRSVIGYFTPKGREEIAGYFPPIIPETDFYKVQQLSYSRYGRKPASDKPLSVNLFKGVIRCSECGHALIITGFSDTRSGIYRCPSRNENRCNAKGLSRKQTDGTLLALLSRLDRFDSDMTNVIDALKLHREHISNNIEKLVQLSLEIEDLSAITIKLKQLKGELSQVDADIEKETQRLKSIDVGCLSDCDLTTKAGRIEAQLIIKSAVKEVVLNTAKRRCKVTFHNGKVIDLPITENPSEDVTEAIQSLSEVTERGLIDVDVVEI

SEQ ID NO: 27712 - protein, 506 aa, synthetic construct
MRTVITYLRFSSATQGAEGADSTRRQNELFKQWLRKNSDAQVVASFSDEGLSGYKGKHLTGQFGDMLARIEAGEFPAGAILLVESIDRIGRLEHLETEALMNRIIAHGIEIHTLQDGLIYTRDALSDDLGISIIQRVKSYLAHQESKQKSFRVSEKWKQRAKLALAGEQHLTRNVPGWIDPDTFKCNEHAETVRLIFKLLLDGESLHNIARHLQSNDIKSFSRRKDANGFSVHSVRTVLRSESVIGTLPASQRNDRPAIPNYYEAAIDASTFNKAQEILDKNRKGRTPASDNPLTINIFKGLFRCQCGASVHPTGTKNKYQGVYRCNSHLDGRCDVPPLKRKPFDRWMIDNFLGMIDVGNDGEAEKEIASLQHEVETVTARIKKATALLLEMDDITELKTQVKELNQKRTELQTTIDNMRRKASLTDKELPQLKDIDLTTKAGRVECQLILSKHLKGLTLGKDSVTVTLQNDTEITIPTNPLPLNDGTSIFEIAEKNLLNIDTFQL

SEQ ID NO: 27713 - protein, 506 aa, synthetic construct
MRTVITYLRFSSAIQGAEGADSTRRQNDLFKQWLKKNSDAQVVASFSDEGLSGYKGKHLTGQFGDMLARIEAGEFSEGTVLLVEAIDRIGRLEHLETEALMNRIIAHGIEIHTLQDGLIYTRDALSDDLGISIIQRVKSYVAHQESKQKSFRVSQKWKQRAKLALAGEQRLTKMVPGWIDPDTFKCNEHAETVRLIFKLLLDGESLHNIARHLQSNDIKSFSRRKDANGFSVHSVRTVLRSESVIGTLPASQRNDRPAIPNYYEAAIDASTFNKAQEILDKNRKGRTPASDNPLTINIFKGLFRCQCGASVHPTGTKNKYQGVYRCNSHLDGRCDVPPLKRKPFDRWMIDNFLGMIDVGNDGEAEKEIASLQHEVETVTARIKKATALLLEMDDITELKTQVKELNQKRTELQTTINTMKRKTSLSDKGLPQLKDIDLMTKAGRVECQLILSKHLKGLTLGKDSVTVTLQNDTEITIPTNPLPLNDGSPIFEIADKELLDIDAYQL

SEQ ID NO: 27714 - protein, 509 aa, synthetic construct
MRRAISYIRFSSERQLKGDSVRRQSKLVTDWLDKNPEFYLDSSLSFKDLGKSAFSGKHLKGGLGDFLTAIEKGLVKAGDTLLIESLDRLSRQDIDIASELLRRILRAGVDIVTLSDGEHYTRESLKDPLSLIKSILIMQRAHEESLRKSERVQAAWNRKKELISEGIKVSRRCPAWLRLNDDRRTFTIIPDKVEVVKRAFDLRLQGLSFWAITRTLNDEGHLSLNQYTPKQKGWSDTAVKKLLRNRAVIGCFTPAGREEVQGYYPAIISESLFYRVQQLNTGQYGRASVSSNPLSVNLFRGIIKCSECGATIVLGGYALKRFGMYRCPNRSANRCSAKAISRKQTDATILYMLALCDRFETENTDIIDSLKLQREDLQRKISKMAELAIELDDMTIITEKLRDMKNALSKLNHDIEEETKRIKAITTGSLKDIDRTTKEGMIETQLLIKGVLKEIVIDAAKRRCKVTFHNGRAITLPITENPSKDVTEAIQSLSEVTERGLIDVDEVII

SEQ ID NO: 27715 - protein, 559 aa, synthetic construct
MKTKLYSYIRFSSMRQNDGSSYERQIRMAREIAAKYDLELVNDYQDLGVSAFKGANSKTGALSRFLDAIGRSVPVGSWLFIENLDRLSRADIVSAQELFLSIIRRGITIVTGMDNKIYSLDTVTANPMDLMFSILLFIRGNEESQTKRNRTNSSALIKIKAHQENPQNPAVAIEEVGKNMWWTDTTSGYVLPHPTYFPVVQEIVELRKNGRSTAEILDHLNETYTPPPAVSNKKHSKWSRAMVERLFHTRALIGIKEVSVDGVNYELKDYYPRVIDDATFYHLKKNIGARAWNFGDKEEAKPIPLLSGIGLLKCDHCGCAMVKVKGTNKRSDQYRYTCDATRSRRLDCEHPNWSFRGDQLEKAVLQLLADKIWIAEDKANPVPALKVQVDEISRKIDNLIALSAMTGATKELADQITTLNSERETLYNQIKMAEEEMYSVDSQGWEKLAEFDLEDVYNEERLKVRFKIKQALKRIGCSRIDRNKNLFVLEYIDGKTQRVVIENSRGTRKGQIFVDLKTINDRQILESNGLVLHPCLDMLTDKNWKPEEEIPGPLQEFGI

SEQ ID NO: 27716 - protein, 559 aa, synthetic construct
MKTKLYSYIRFSSMRQSDGSSYERQIRMAREIAAKYDLELVNDYQDLGVSAFKGANSKTGALSRFLDAIGRSVPVGSWLFIENLDRLSRADIVSAQELFLSIIRRGITIVTGMDNKIYSLDTVTANPMDLMFSILLFIRGNEESQTKRNRTNSSALIKIKAHQENPQNPAVAIEEVGKNMWWTDTTSGYVLPHPTYFPVVQEIVELRKNGRSTAEILDHLNETYAPPPAVSNKKHSKWSRAMVERLFHTRALIGIKEVSVDGVNYELKDYYPRVIDDATFYHLKKNIGARAWNFGDKEEAKPIPLLSGIGLLKCDHCGCAMVKVKGTNKRSDQYRYTCDATRSRRLDCEHPNWSFRGDQLEKAVLQLLADKIWIAEDKANPVPALKVQVDEISRKIDNLIALSAMTGATKELADQITTLNSERETLYNQIKMAEEEMYSVDSQGWEKLAEFDLEDVYNEERLKVRFKIKQALKRIGCSRIDRNKNLFVLEYIDGKTQRVVIENSRGTRKGRIFIDLKTINDRQILESNGLVLHPCLDMLTDKNWKPEEEIPGPLQEFGI

SEQ ID NO: 27717 - protein, 507 aa, synthetic construct
MKRVISYIRFSSEKQAKGDSLRRQSKMVTDWLKAHPEYYLDQDLSFRDLGVSGFTGKHLKGGLGDFLTAIEKGLVKAGDTLLIESLDRLSRQAVDRASELLRNILRSGVDVVTLSDGEHYTKESLRDPLSLIKSILIMQRAHEESLRKAERIQAAWDAKKEAAKAGIKISRRCPAWLRLNDDRKSFSVIPEKVETVKRCFQLRLEGKSIWEIVRTLNDEGHQTLNQYKAGKFGQTSVQDLLKNRSVIGYFTPKGCEEISGYFPSIIPETDFYKVQQLSYSRYGRKPASDKPLSVNLFKGVIRCSECGHALIITGFSDTRNGIYRCPLRNENRCNAKGLSRKQTDGTLLALLSRLDRFDSDTTNTIDMLRLHREHISSNIEKLVQLSLEIEDLNAITSKLRQLKGELSQVDADIEKETQRLKSIDVGCLSDCDLTTKAGRIEAQLIIKSAVKEVVLNTAKRRCKVTFHNGRAITLPITENPSEDVTEAIQSLSEVTERGLIDVDEVII

SEQ ID NO: 27718 - protein, 547 aa, synthetic construct
MKLLVTYIRWSTREQDSGDSLRRQTNLIDAFYAKHKDDYYLLPAHRYVDKGKSGFHQQHKAQGSDFRRMFENVMSGAIPEGSLIVVENFDRFSRADIDTAIDDVRQILRKGVSILTLGDGELYDKSALTDPVKLIKHIIIAERAHQESLVKQKRIAQVWNHKTQLARELKKPMGKQAPGWLELSEDGSHYIVDEDKASLVNIIYDKRLSGMSMFAICKWLNEQGYPTINQRKVRISKTKKPDGNWSALSVKHILTSRSVLGYLPAKISTEDRKTVLREEIEGFYPQIVTDSKFYAVQQLLEETGKGKTSSGDHWLYVNILKGLIRCKCGLVMTPTGIRKPVYQGTYRCNGNKESRCSYGTVSRKLLDTQLCSRLFSKLSQLHDEATDTAKLDELQRRLNTVDGELEKLTETLIQLPNITQIQEALRVKQEEKDELIVQLSREKARVKSVSSLDLSGLDMESVEGRTEAQIIIKRLVKEIVVSGNEKLVDIYLHNGNMIRGFPLDGKDDHTLTLEEATDEMQSLDDMLIFGEPVTRIYPAGDMEEVDA

SEQ ID NO: 27719 - protein, 560 aa, synthetic construct
MKTKLYSYIRFSSMRQSDGSSYERQIRMAREIAAKYDLELVNDYQDLGVSAFKGANSKTGALSRFLDAIGRSVPVGSWLFIENLDRLSRADIVSAQELFLSIIRRGITIVTGMDNKIYSLDTVTANPMDLMFSILLFIRGNEESQTKRNRTNSSALIKIKAHQENPQNPAVAIEEVGKNMWWTDTTSGYVLPHPTYFPVVQEIVELRKNGRSTAEILDHLNETYTPPPAVSNKKHSKWSRAMVERLFHTRALIGIKEVSVDGVNYELNNYYPRVIDDDATFYHLKKNIGARAWNFGDKEEVKPIPLLSGIGLLKCDHCGCAMVKVKGTNKRSDQYRYTCDAIRSRRLDCEHPNWSFRGDQLEKAVLQLLADKIWIAEDKANPVPALKVQVDEISRKIDNLIALSAMTGATKELADQITTLNSERETLYNQIKMAEEEMYSVDSQGWEKLAEFDLEDVYNEERLKVRFKIKQALKRIGCSRIDRNKNLFVLEYIDGKTQRVVIENSRGTRKGQIFVDLKTINDRQILESNGLVLHPCLDMLTDKNWKPEEEIPGPLQEFGI

SEQ ID NO: 27720 - protein, 507 aa, synthetic construct
MKRVISYIRFSSERQAKGDSLRRQSKMVTDWLKAHPEYYLDQDLSFRDLGVSGFTGKHLKGGLGDFLTAIEKGLVKAGDTLLIESLDRLSRQDIDIASELLRRILRAGVDIVTLSDGEHYTRESLKDPLALIKSILIMQRAHEESLRKSERIQAAWDAKKEAAKAGIKVSKRCPAWLRLNDDRKSFSVIPEKVETVKRCFQLRLEGKSIWEIVRTLNAEGHRSMNQYKPGKFGQTSVQDLLKNRSVIGYFTPKGCEEISGYFPPIIPETDFYKVQQLSHSRYGKRSVSDKPLSVNLFKGVIRCSECGHALIITGFSDTRNGIYRCPLRNENRCSAKGLSRKQTDGTLLTLLSRLDRFDSNTTNTIDMLRLHREHISNNIEKLVQLSLEIEDLSAITIKLKQLKGELSQVDADIEKETQRLKSIDVGCLSDCDLTTKAGRIEAQLIIKSAVKEVVLNTAKRRCKVTFHNGRAITLPITEDPSENVTEAIQSLSEVTERGLIDVDEVII

SEQ ID NO: 27721 - protein, 559 aa, synthetic construct
MKTKLYSYIRFSSMRQNDGSSYERQIRMAREVAAKYDLELVNDYQDLGVSAFKGANSKTGALSRFLDAIGRSVPVGSWLFIENLDRLSRADIVSAQELFLSIIRRGITIVTGMDNKIYSLDTVTANPMDLMFSILLFIRGNEESQTKRNRTNSSALIKIKAHQENPQNPAVAIEEVGKNMWWTDTTSGYVLPHPVFFPVVQEIVELRKNGRSTAEILDHLNETYAPPPAVSNKKHSKWSRAMVERLFHTRALIGIKEVSVDGVNYELKDYYPRVIDDATFYHLKKNIGARAWNFGDKEEVKPIPLLSGIGLLKCDHCGCAMVKVKGTNKRSDQYRYTCDATRSRRLDCEHPNWSFRGDQLEKAVLQLLADKIWIAEDKANPVPALKVQVDEISRKIDNLIALSAMTGATKELADQITTLNSERETLYNQIKMAEEEMYSVDSQGWEKLAEFDLEDVYNEERLKVRFKIKQALKRIGCSRIDRNKNLFVLEYIDGKTQRVVIENSRGTRKGQIFVDLKTINDRQILESNGLVLHPCLDMLTDKNWKPEEEIPGPLQEFGI

SEQ ID NO: 27722 - protein, 507 aa, synthetic construct
MKRVISYIRFSSEKQAKGDSLRRQSKMVTDWLKAHPEYYLDQDLSFRDLGVSGFTGKHLKGGLGDFLTAIEKGLVKAGDTLLIESLDRLSRQAVDRASELLRNILRSGVDVVTLSDGEHYTKESLKDPLALIKSILIMQRAHEESLRKAERIQAAWDAKKEAAKAGIKISRRCPAWLKLNDDRKSFSVIPEKVETVKRCFQLRLEGKSIWEIVRTLNDEGHQTLNQYKAGKFGQTSVQDLLKNRSVIGYFTPKGCEEISGYYPAIIDETTFYKVQQLSYARYGRKPASAKPLSVNLFKGVIRCSECGHALIITGFSDTRNGIYRCPLRNENRCSAKGLSRKQTDGTLLTLLSRLDRFDSDMTNVIDSLKIHREHISSNIEKLVQLSLEIEDLNAITNKLKQLKNELSQVDADIEKETQRLKSIDVGCLSDCDLTTKAGRIEAQLIIKSAVKEVVLNTAKRRCKVTFHNGKVIDLPITENPSDNVTEAIQSLSEVTERGLIDVDVVAI

SEQ ID NO: 27723 - protein, 559 aa, synthetic construct
MKTKLYSYIRFSSMKQADGSSYERQKRTAAEIAAKYDLELVTSYQDFGVSAFKGANSRTGALSRFLDEIGRSVPVGSWLVVENLDRISRQSIIEAQELFLSIIRRGITIVTGMDGKVYSKESVNANPIDLLLSVMLFARANEESQTKRNRTNSSALIKIKAHQENPQNPAVAIEEIGKNMWWTDTTSGYVLPHPVFFPIVQEVVELRRNGRSTAEILDHLNATYTPPPAASHKRHSNWSRAMIERLFHTRALIGIKEISVDGVKYELKDYYPRVLDDAEFYHLKKSIGVRACNYGDKEEVKPIPLLSGVGLLKCEHCGSAMVKVKGTNKRPNQYRYSCDAMRSSRIACVHTNWSFRGDQLEKAVLQLLADKIWIAEDKANPVPALKVQIDEISRKIDNLITLSAMTGATKELADQITTLNSERETLYNQIKMAEEEMYSVDSQGWEKLAEFDLEDVYNEDRIKVRFKIKQALKRIGCSRIDKYKNLFVLEYIDGKTQRVVIENSRGTRKGQIFVDLKTINDRQILESNGLVLHPCLDMLTDKNWKPEEEIPGPLQEFGI

SEQ ID NO: 27724 - protein, 514 aa, synthetic construct
MRKVYSYIRFSSTKQAFGDSHRRQSKAIQDWLASHPDHILDESLSFEDLGRSAFHGDHLKEGGALRAFLEAVKQGLIPPDSVLLVESLDRVSRQSISHAQETIRAILEQGITVVTLSDGETYNRQSLDDSLALIRMIILQERSHNESVIKSDRIKKVWSHKRQQFEQDGTKITGNCPGWLKLNSDGKSFSLIPHHVETIHRIFDEKLSGKSLHAIARDLNLENIPTITNKKVDTGWTPTRVRDLLLKESLIGVAYGVSDYFPPAISKEKFHAVQMIRGQGKGKKPTSRQPSSIDIFKGICKCAECGSTLRQRNTKKTPEGRYPRGYLECRNRQLGRCNSKAFNRSLIEDILIQKVFPTLQYLSLKSNGDNISVTTLKADITSLEKGIHNLISLAERGLGDLDTLAQRITNNRVELESKKKDLRQAEAIQSLRSDNDIQDSDRKTVEGRIKLQLAIKSFIKEMIFDYYKQEITIRLLNGKSFSGISVARENKDFDHSSVFEVLQKSLLDIDEVHL

SEQ ID NO: 27725 - protein, 559 aa, synthetic construct
MKTKLYSYIRFSSMRQNDGSSYERQIRMAREVAAKYDLELVNDYQDLGVSAFKGANSKTGALSRFLDAIGRSVPVGSWLFIENLDRLSRADIVSAQELFLSIIRRGITIVTGMDNKIYSLDTVTANPMDLMFSILLFIRGNEESQTKRNRTNSSALIKIKAHQENPQNPAVAIEEVGKNMWWTDTTSGYVLPHPVFFPIVQEVVELRRNGRSTAEILDHLNATYTPPPAASHKRHSNWSRAMIERLFHTRALIGIKEISVDGVKYELKDYYPRVLDDAEFYHLKKSIGVRACNYGDKEEVKPIPLLSGVNLLKCDHCGSAMVKVKGTNRRPNQYRYSCDAMRSSRIECVHTNWSFRGDQLEKAVLQLLADKIWIAEDKANPVPALKVQIDEISRKIDNLIALSAMTGATKELADQITTLNSERETLYNQIKMAEEEMYSVDSQGWEKLAEFDLEDVYNEDRIKVRFKIKQALKRIGCSRIDKYKNLFVLEYIDGKTQRVVIENSRGPRKGRIFVDLKTINDRQILESNGLVLHPCLDMLTDKNWKPEEEIPGPLQEFGI

SEQ ID NO: 27726 - protein, 507 aa, synthetic construct
MKRVISYIRFSSERQAKGDSLRRQSKMVNDWLKAHPEYYLDQDLSFRDLGVSGFTGKHLKGGLGDFLTAIEKGLVKAGDTLLIESLDRLSRQNVDRASELLRNILRSGVDVVTLSDGEHYTRESLKDPLALIKSILIMQRSHEESLRKSERIQAAWNRKKELISEGIKISKRCPAWLRLNDDRKSFSVIPEKVETVKRCFQLRLEGKSIWEIVRTLNDEGHQTLNQYKAGKFGQTSVQDLLKNRSVIGYFTPKGCEEITGYFPSIIPETDFYKVQQLSYSRYGRKPVSDKPLSVNLFKGVIRCSECGHALIITGFSDTRSGIYRCPLRNENRCSAKGLSRKQTDGTLLTLLSRLDRFDSDMTNTIDTLKLHREHISSNIEKLVQLSLEIEDLNAITNKLKQLKNELSQVDADIEKETQRLKSIDVGCLSDCDLTTKAGRIEAQLIIKSAVKEVVLNTAKRRCKVTFHNGKVIDLPITENPSEDVTEAIQSLSEVTERGLIDVDVVEI

SEQ ID NO: 27727 - protein, 507 aa, synthetic construct
MKRVISYIRFSSERQAKGDSLRRQSKMVNDWLKAHPEYYLDQDLSFRDLGVSGFTGKHLKGGLGDFLTAIEKGLVKAGDTLLIESLDRLSRQNVDRASELLRNILRSGVDVVTLSDGEHYTKESLRDPLSLIKSILIMQRSHEESLRKSERIQAAWNRKKELISEGIKISRRCPAWLKLNDDRKSFSIIPEKVETVKRCFQLRLEGKSIWEIVRTLNDEGRQTLNQHKAGSFGQSSVQDLLKNRSVIGYFTPKGCEEIAGYYPAIIDETTFYKVQQLSYARYGRKPASDKPLSVNLFKGVIRCSECGHALIITGFSDTRSGIYRCPLRNENRCSAKGLSRKQTDGTLLALLSRLDRFDSDMTNTIDTLKLHREHISSNIEKLVQLSLEIEDLSAITSKLKQLKGELSQVDADIEKETQRLKSIDVGCLSDCDLTTKAGRIEAQLIIKSAVKEVVLNTAKRRCKVTFHNGKSITLPITENPSEDVTEAIQSLSEVTERGLIDVDEVII

SEQ ID NO: 27728 - protein, 507 aa, synthetic construct
MKRAISYIRFSSEKQSRGDSLRRQSKMVNDWLKAHPEYYLDQDLSFRDLGVSGFTGKHLKGGLGDFLTAIEKGLVKAGDTLLIESLDRLSRQDVDQASELLRNILRSGVDVVTLSDGEHYTKESLKDPLALIKSILIMQRAHEESLRKAERIQAAWDAKKEAAKAGIKVSKRCPAWLKLNDDRKSFSVIPEKVETVKRCFQLRLEGKSIWEIVRTLNDEGHQSMSQYKPGKFGQTSVQDLLKNRSVIGYFTPKGREEIAGYFPSIIPETDFYKVQQLSYSRYGRKPASDKPLSVNLFKGVIRCSECGHALIITGFSDTRNGIYRCPLRNENRCSAKGLSRKQTDGTLLALLSRLDRFDSDTTNIIDMLRLHREHVSSNIEKLVQLSLEIEDLNAITSKLKQLKGELSQVDADIEKETQRLKSIDVGCLSDCDLTTKAGRIEAQLIIKSAVKEVVLNTAKRRCKVTFHNGKTITLSITENPSEDVTEAIQSLSEVTERGLIDVDVVEI

SEQ ID NO: 27729 - protein, 559 aa, synthetic construct
MKTKLYSYIRFSSMKQADGSSYERQKRTAAEIAAKYDLELVTSYQDFGVSAFKGANSRTGALSRFLDEIGRSVPVGSWLVVENLDRISRQSIIEAQELFLSIIRRGITIVTGMDGKVYSKESVNANPIDLLLSVMLFARANEESQTKRNRTNSSALIKIKAHQENPQNPAVAIEEIGKNMWWTDTTSGYVLPHPVFFPIVQEVVELRRNGRSTAEILDHLNATYTPPPAASHKRHSNWSRAMIERLFHTRALIGIKEISVDGVKYELKDYYPRVLDDAEFYHLKKSIGVRACNYGDKEEVKPIPLLSGVGLLKCEHCGSAMVKVKGTNKRPNQYRYSCDAMRSSRIACVHTNWSFRGDQLEKAVLQLLADKIWIAEDKANPVPALKVQIDEISRKIDNLIALSAMTGATKELADQITTLNSERETLYNQIKMAEEEMYSVDSQGWEKLAEFDLEDVYNEERLKVRFKIKQALKRIGCSRIDRNKNLFVLEYIDGKTQRVVIENSRGTRKGQIFVDLKTINDRQILESNGLVLHPCLDMLTDKNWKPEEEIPGPLQEFGI

SEQ ID NO: 27730 - protein, 559 aa, synthetic construct
MKTKLYSYIRFSSMRQNDGSSYERQIRMAREIAVKYDLELVNDYQDLGVSAFKGANSKTGALSRFLDAIGRSVPVGSWLFIENLDRLSRADIVSAQELFLSIIRRGITIVTGMDNKIYSLDTVTANPMDLMFSILLFIRGNEESQTKRNRTNSSALIKIKAHQENPQNPAVAIEEIGKNMWWTDTTSGYVLPHPVFFPIVQEVVELRRNGRSTAEILDHLNATYTPPPAASHKRHSNWSRAMIERLFHTRALIGIKEISVDGVKYELKDYYPRVLDDAEFYHLKKSIGVRACNYGDKEEVKPIPLLSGVGLLKCEHCGSAMVKVKGTNRRPNQYRYSCDAMRSSRIECVHTNWSFRGDQLEKAVLQLLADKIWIAEDKANPVPALKVQIDEISRKIDNLITLSAMTGATKELADQITTLNSERETLYNQIKMAEEEMYSVDSQGWEKLAEFDLEDVYNEDRIKVRFKIKQALKRIGCSRIDKYKNLFVLEYIDGKTQRVVIENSRGPRKGRIFIDLKTINDRQILESNGLVLHPCLDMLTDKNWKPEEEIPGPLQEFGI

SEQ ID NO: 27731 - protein, 559 aa, synthetic construct
MKTKLYSYIRFSSMRQNDGSSYERQIRMAREVAAKYDLELVNDYQDLGVSAFKGANSKTGALSRFLDAIGRSVPVGSWLFIENLDRLSRADIVSAQELFLSIIRRGITIVTGMDNKIYSLDTVTANPMDLMFSILLFIRGNEESQTKRNRTNSSALIKIKAHQENPQNPAVAIEEVGKNMWWTDTTSGYVLPHPTYFPIVQEVVELRRNGRSTAEILDHLNATYTPPPAASHKRHSNWSRAMIERLFHTRALIGIKEISVDGVKYELKDYYPRVLDDAEFYHLKKSIGVRACNYGDKEEVKPIPLLSGVNLLKCDHCGSAMVKVKGTNRRPNQYRYSCDAMRSSRIECVHTNWSFRGDQLEKAVLQLLADKIWIAEDKANPVPALKVQVDEISRKIDNLIALSAMTGATKELADQITTLNSERETLYNQIKMAEEEMYSVDSQGWEKLAEFDLEDVYNEDRIKVRFKIKQALKRIGCSRIDKYKNLFVLEYIDGKTQRVVIENSRGPRKGRIFVDLKTINDRQILESNGLVLHPCLDMLTDKNWKPEEEIPGPLQEFGI

SEQ ID NO: 27732 - protein, 506 aa, synthetic construct
MRSVITYLRYSSAIQGAEGADSTRRQNDLFKQWLKKSSDAQVVASFSDEGLSGYKGKHLTGQFGDMLARIEAGEFPEGTILLVESIDRIGRLEHLETEALMNRILGNGIEIHTLQDGLIYTKDALADDLGISIIQRVKAYIAHQESKQKSFRVSQKWGQRAKLALAGKQRLTKMVPGWIDPETFKLNEHAETVRLIFKLLLDGESLHNIARHLQSNGIRSFSRRKDANGFSVHSVRTILRSETTIGTLPASQRNDRPAIPNYYEAAIDASTFNKAQEILDKNRKGRTPASDNPLTINIFKGLFRCQCGASVHPTGTKNKYAGVYRCNNHLDGRCDVQPLKRKPFDKWVLENFLGMIDVGNDGESERKIAALQHEVEIVTARIKKATALLLEMDDIDELKIQLKELNQKRTELQTTIDSMRRKTSLSDKGLPQLKDIDLMTKAGRVECQLILSKHLESLTLGRGQVTVKLSNGTEIIVPTDPLPLTDGAAIFEIAEKNLLNIDTFQL

SEQ ID NO: 27733 - protein, 507 aa, synthetic construct
MKRVISYIRFSSERQAKGDSLRRQSKMVNDWLKAHPEYYLDQDLSFRDLGVSGFTGKHLKGGLGDFLTAIEKGLVKAGDTLLIESLDRLSRQTVDRASELLRNILRSGVDVVTLSDGEHYTSESLKDPLALIKSILIMQRAHEESLRKSERIQAAWDAKKEAAKAGIKVSKRCPAWLRLNDDRKSFSVIPEKVETVKRCFQLRLEGKSIWEIVRTLNDEGHQSMSQYKPGSFGQSSVQDLLKNRSVIGYFTPKGCEEIAGYYPAIIDETTFYKVQQLSYARHGRKPASAKPLSVNLFKGVIRCSECGHALIITGFSDTRNGIYRCPLRNENRCSAKGLSRKQTDGTLLTLLSRLDRFDSDTTNTVDMLRLHREHISSNIEKLVQLSLEIEDLSAITSKLKQLKNELSQVDADIEKETQRLKSIDVGCLSDCDLSTKAGRIEAQLIIRSAVKEVVLNTAKRRCKVTFHNGKSITLPITENPSEDVTEAIQSLSEVTERGLIDVDEVII

SEQ ID NO: 27734 - protein, 559 aa, synthetic construct
MKTKLYSYIRFSSMKQADGSSYERQKRTAAEIAAKYDLELVTSYQDFGVSAFKGANSRTGALSRFLDEIGRSVPVGSWLVVENLDRISRQSIIEAQELFLSIIRRGITIVTGMDGKVYSKESVNANPIDLLLSVMLFARANEESQTKRNRTNSSALIKIKAHQENPQNPAVAIEEVGKNMWWADTTSGYVLPHPVYFPVVQEIVELRKNGRSTAEILDHLNETYTPPPAVSNKKHSKWSRAMVERLFHTRALIGIKEISVDGVNYELKDYYPRVIDDPTFYHLKKNIGARAWNFGDKEEVKPIPLLSGIGLLKCDHCGCAMVKVKGTNKRSDQYRYTCDATRSRRLDCEHPNWSFRGDQLEKAVLQLLADKIWIAEDKANPVPALKVQIDEISRKIDNLIALSAMTGATKELADQITTLNSERETLYNQIKMAEEEMYSVDSQGWEKLAEFDLEDVYNEERLKVRFKIKQALKRIGCSRIDRNKNLFVLEYIDGKTQRVVIENSRGTRKGRIFIDLKTINDRQILESNGLVLHPCLDMLTDKNWKPEEEIPGPLQEFGI

SEQ ID NO: 27735 - protein, 506 aa, synthetic construct
MRSVITYLRYSSAIQGAEGADSTRRQNDLFKQWLKKNSDAQVVASFSDEGLSGYKGKHLTGQFGDMLARIESGEFSEGTILLVEAIDRIGRLEHLETEALMNRILGNGIEIHTLQDGLIYTKDALADDLGISIIQRVKSYIAHQESKQKSFRVSQKWGQRAKLALAGEQRLTKMVPGWIDPETFEVNEHAETVRLIFKLLLDGESLHNIARHLQANNISSFSRRKDANGFSVHSVRTILRSETTIGTLPASQRNDRPAIPNYYEAAIDAATFNKAQEILDKNRKGRTPASDNPLTINIFKGLFRCQCGASVHPTGTKNKYQGVYRCNNHLDGRCDVPPLKRKPFDRWMIDNFLGMIDVVSDGETERRIAALQHEVEIVTARIKKATALLLEMDDITELKAQVKELNQKRTELQTTIDTMKRKTSLSDKGLPQLKDIDLMTKAGRVECQLILSKHLKGLTLGKDSVTVTLQNDTEITIPTNPLPLNDGSPIFEIADKELLDIDAYQL

SEQ ID NO: 27736 - protein, 507 aa, synthetic construct
MKRVISYIRFSSEKQAKGDSLRRQSKMVTDWLKAHPEYYLDQDLSFRDLGVSGFTGKHLKGGLGDFLTAIEKGLVKAGDTLLIESLDRLSRQDIDIASELLRRILRAGVDVVTLSDGEHYTKESLRDPLALIKSILIMQRAHEESLRKSERIQAAWDAKKEAAKAGIKVSKRCPAWLKLNDDRKSFSVIPEKVETVKRCFQLRLEGKSIWEIVRTLNDEGHQSMSQYKPGKFGQTSVQDLLKNRSVIGYFTPKGCEEISGYYPAIIDETTFYKVQQLSHSRYGRKPVSAKPLSVNLFKGVIRCSECGHALIITGFSDTRNGIYRCPLRNENRCSAKGLSRKQTDGTLLTLLSRLDRFDSDTTNTIDMLRLHREHISSNIEKLVQLSLEIEDLNAITNKLKQLKNELSQVDADIEKETQRLKSIDTGSLSDCDLSTKAGRIEAQLIIRSAVKEVVLNTAKRRCKVTFHNGRAITLPITENPSKDVTEAIQSLSEVTERGLIDVDEVII

SEQ ID NO: 27737 - protein, 506 aa, synthetic construct
MRTVITYLRFSSATQGAEGADSTRRQNELFKQWLRKNSDAQVVASFSDEGLSGYKGKHLTGQFGDMLARIEAGEFPAGAILLVESIDRIGRLEHLETEALMNRIIAHGIEIHTLQDGLIYTRDALSDDLGISIIQRVKSYLAHQESKQKSFRVSEKWKQRAKLALAGEQHLTRNVPGWIDPDTFKCNEHAETVRLIFKLLLDGESLHNIARHLQSNDIKSFSRRKDANGFSVHSVRTVLRSESVIGTLPASQRNDRPAIPNYYEAAIDASTFNKAQDILDKNRKGRTPASDNPLTINIFKGLFRCQCGASVHPTGTKNKYQGVYRCNSHLDGRCDVPPLKRKPFDRWMIDNFLGMIDVGNDGEAEKEIASLQHEVETVTARIKKATALLLEMDDITELKTQVKELNQKRTELQTTINTMKRKTSLSDKGLPQLKDIDLMTKAGRVECQLILSKHLKGLTLGKDSVTVTLQNDTEITIPTNPLPLNDGTSIFEIAEKNLLNIDTFQL

SEQ ID NO: 27738 - protein, 520 aa, synthetic construct
MKKITKIDELPQGQLPNTKLRVAAYARVSTDSDEQLESLKAQREHYERYIKSNPEWEFAGLYYDEGISGTKMEKRTELLRMIRDCKQGRIDFIITKSISRFARNTVDCLELVRKLIDIDVYIYFEKENLNTGDMESELMLSILSGFAAEESASISQNSTWSIQKRFQNGSYVGTPPYGYTNIYGEMVIVPEEAEIIKRIFAECLSGKGGGTIARGLNKDKIPARRGNHWSAGTVIDMLRNEKYMGDVLLQKTYTDSNYNRHSNTGEKDQYYYKDNHEPIISREDFAKAQDLIDERAKMKCKGVKKNVYLNRYALSGKIVCGECGRNFRRKTNYSAGRSYIAWSCIGHIEDKESCSMLFLRDGEIKATFTTMMNKLAFSHKLILEPLFKSISQIDEESDRERMDAIDKRMEQLMEERNTLITLMAKGFLEPALFNQERNVLDNEIRNFSTEKTNLVTNSTSGVLRANDIKDLIDYVSADNFNGDYTEELFEEFVENIIVNSRDELTFNLKCGLSLKEKVVR

SEQ ID NO: 27739 - protein, 520 aa, synthetic construct
MTEKNIMVIPARKRVGSTAAKEQIKKLRVAAYCRVSTETEEQNSSYEVQVAHYTEFIKKNNEWEFAGIFADDGISGTNTKKRDEFNRMIAECMDGNIDMVITKSISRFARNTLDCLQYIRQLKDKNISVYFEKENINTMDAKGEVLLTIMASLAQQESQSLSQNVKLGLQYRYQQGKVQVNHKRFMGYTKDEDGNLIIVPEEAEIIKRIYREYLEGQSLVGIGRALEKDGILTAAGKPRWRPESVKKILQNEKYIGDALLQKTVTVDFLTKKRVKNEGHLPQYYVENSHEAIIPKELYLQVQEEIHRRRNIYTGADKNKRIYSSKYALSAITFCGDCGDIYRRTYWNIHGRKEFVWRCVTRIEQGPEVCKNRTVKEDELYGAVMTAINRLLAGGNNMIKTLEENIHAVIGETTEYQISEINNLLEEKQKELIKQANKGQDYEHLADEIDGLRDKRQTLLVEDASLSGENERINELIAFIRINKYRTLRYDDTLVRKIIQNVTVYDDHFVICFKSGIEIEV

SEQ ID NO: 27740 - protein, 547 aa, synthetic construct
MKLLVTYIRWSTREQDSGDSLRRQTNLIDAFYAKHKDDYYLLPAHRYVDKGKSGFHQQHKAQGSDFRRMFENVMSGVIPEGSLIVVENFDRFSRADIDTAIDDVRQILRKGVSILTLGDGELYDKSALTDPVKLIKHIIIAERAHQESLVKQKRIAQVWNHKTQLARELKKPMGKQAPGWLELSEDGSHYIVDEDKASLVNIIYDKRLSGMSMFAICKWLNEQGYPTINQRKVRISKTKKPDGNWSALSVKHILTSRSVLGYLPAKISTEDRKTVLREEIEGFYPQIVTDSKFYAVQQLLEETGKGKTSSGEHWLYVNILKGLIRCKCGLVMTPTGIRKPVYQGTYRCNGNKESRCSYGTVSRKLLDTQLCSRLFSKLSQLHDEATDTAKLDELQRRLNTVDSELEKLTETLIQLPNITQIQEALRVKQEEKDELVVQLSREKARVKSVSSLDLSGLDMESVEGRTEAQIIIKRLVKEIVVSGNEKLVDIYLHNGNMIRGFPLDGKDDHTLTLEEATDEMQSLDDMLIFGEPVTRIYPAGDMEEVDA

SEQ ID NO: 27741 - protein, 507 aa, synthetic construct
MKRVISYIRFSSERQAKGDSLRRQSKMVTDWLKAHPEYYLDQDLSFRDLGVSGFTGKHLKGGLGDFLTAIEKGLVKAGDTLLIESLDRLSRQAVDRASELLRNILRSGVDVVTLSDGEHYTSESLKDPLALIKSILIMQRAHEESLRKSERIQAAWDAKKEAAKAGIKVSKRCPAWLRLNDDRKSFSVIPEKVETVKRCFQLRLEGKSIWEIVRTLNAEGHRSMNQYKPGKFGQTSVQDLLKNRSVIGYFTPKGCEEISGYFPPIIPETDFYKVQQLSHSRYGKRSVSDKPLSVNLFKGVIRCSECGHALIITGFSDTRNGIYRCPLRNENRCSAKGLSRKQTDGTLLTLLSRLDRFDSNTTNTIDMLRLHREHISNNIEKLVQLSLEIEDLSAITIKLKQLKGELSQVDADIEKETQRLKSIDVGCLSDCDLTTKAGRIEAQLIIKSAVKEVVLNTAKRRCKVTFHNGRAITLPITENPSEDVTEAIQSLSEVTERGLIDVDVVEI

SEQ ID NO: 27742 - protein, 506 aa, synthetic construct
MRSVITYLRFSSATQGAEGADSTRRQNELFKQWLRKNSDAQVVASFNDEGLSGYKGKHLSGQFGDMLSRIESGEFPEGTILLVEAIDRIGRLEHLETEALMNRIIAHGIEIHTLQDGLIYTRDALSDDLGISIIQRVKSYIAHQESKQKSFRVSQKWEQRAKLALAGEQRLTRNVPGWIDPETFKLNEHAETVRLIFKLLLDGESLHNIARHLQSNGIRSFSRRKDANGFSVHSVRTILRSETAIGTLPASQRNDRPAIPNYYEAAIDASTFNKAQEILGKNRIGRTPASDNPLTINIFKGLFRCQCGASVHPTGTKNKYQGVYRCNNHLDGRCDVPPLKRKPFDRWMIDNFLGMIDVVSDGETERRIAALQHEVETVTARIKKATALLLEMDDITELKAQVKELNQKRTELQTTIDTLKRKTSLTDKELPQLKDIDLMAKAGRVECQLILSKHLKGLTLGKDSVTVTLQNDTEITIPTNPLPLNDGTSIFEIADKELLEIDAYQL

SEQ ID NO: 27743 - protein, 581 aa, synthetic construct
MPQLYSYIRWSSDRQDKGTTKSRQVAAAKAYAEEAGLELVEIIDPGVSAFRGKNRAGKLGDFIDAVKNNAIPSDSWLYCENLDRLSRDQVDEALRLFLELIGLGLTIVTGMDRKVYNRESIRQNPTDLMISILMFIRGNEESETKSHRTIGNVVALVERHKNGLPVNIKSVGRHPFWIDDSGSQYEAVKKHPVYWSIAREALDMFISGHGVYSVKRALDKKYPNGLRGKEWDYQVLKKMRDNRALIGERTIKVDGQSYKLCNYYPALCKDETEFLILAEKKKQNKFISKKCTTDKIRLLSGFSILRCSKCGGTMHSFMNKNVHRYICTNGTHKQKNCSGWSVIGSLVEHCTMIALLIGYINQSRKNGCDTTSIDEDIINKQSVIEGLNSKITNLTLAISIAKDVNELATLLQSLNTQREKLLVEIEKLKERSVSLKAKGSFEIEITDFLILIQYATFKNLEDENRNKIRKVIHSIIEFIVIDKTDSCITIYIKCYGIDEVFIFGGVQRKPYWRFDIGIINDSKLQMISSYDKNIGRTKERKNKEYLDGLRESYQGLYESAVLMLNEMGYPDINGALFWPNR

SEQ ID NO: 27744 - protein, 559 aa, synthetic construct
MKTKLYSYIRFSSMRQNDGSSYERQIRMAREVAAKYDLELVNDYQDLGVSAFKGANSKTGALSRFLDAIGRSVPVGSWLFIENLDRLSRADIVSAQELFLSIIRRGITIVTGMDNKIYSLDTVTANPMDLMFSILLFIRGNEESQTKRNRTNSSALIKIKSHQENPQNPAVAIEEVGKNMWWTDTTSGYVHPDPVYFPIVKEIVELRKNGRSTSEILNYLNETYTPPPAVSNKKHSKWPRAMIGRLFHTRALIGIKEVSVDGVKYELKDYYPRVIDDATFYHLKKNIGARAWNFGDTEEVKPIPLLSGIGLLKCEHCSSAMIKVKGTNKRADQYRYSCEGIRSHRFDCEQPNWSFRGDQLEKAVLQLLADKIWIAEDKANPVPALKVQIDEISRKIDNLIALSAMTGATKELADQITTLNSERETLYNQIKMAEEEMYSVDSQGWEKLAEFDLEDVYNEERLKVRFKIKQALKRIGCSRIDRNKNLFVLEYIDGKTQRVVIENSRGTRKGRIFIDLKTINDRQILESNGLVLHPCLDMLTDKNWKPEEEIPGPLQEFGI

SEQ ID NO: 27745 - protein, 559 aa, synthetic construct
MKTKLYSYIRFSSMRQSDGSSYERQIRMAREIAAKYDLELVNDYQDLGVSAFKGANSKTGALSRFLDAIGRSVPVGSWLFIENLDRLSRADIVSAQELFLSIIRRGITIVTGMDNKIYSLDTVTANPMDLMFSILLFIRGNEESQTKRNRTNSSALIKIKAHQENPQNPAVAIEEVGKNMWWTDTTSGYVLPHPVYFPVVQEIVELRKNGRSTAEILDHLNETYAPPPAVSNKKHSKWSRAMVERLFHTRALIGIKEISVDGVNYELNNYYPRVIDDPTFYHLKKNIGARAWNFGDKEEVKPIPLLSGIGLLKCDHCGCAMVKVKGTNKRSDQYRYTCDATRSRRLDCEHPNWSFRGDQLEKAVLQLLADKIWIAEDKANPVPALKVQVDEISRKIDNLIALSAMTGATKELADQITTLNSERETLYNQIKMAEEEMYSVDSQGWEKLAEFDLEDVYNEDRIKVRFKIKQALKRIGCSRIDRNKNLFVLEYVDGKTQRVVIENSRGTRKGRIFIDLKTINDRQILESNGLVLHPCLDMLTDKNWKPEEEIPGPLQEFGI

SEQ ID NO: 27746 - protein, 547 aa, synthetic construct
MKLLVTYIRWSTKEQDSGDSLRRQTNLIDAFYSKHKNDYYLLPAHRYVDKGKSGFHQQHKNQGSDFRRMFENVMSGAIPEGSLIVVENFDRFSRADIDTAIDDVRQILRKGVSILTLGDGELYDKSALTDPVKLIKHIIIAERAHQESLVKQKRIAQVWNHKTQLARELKKPMGKQAPGWLELSEDGSHYIVDEDKASLVNIIYDKRLSGMSMFAICKWLNEQGYPTINQRKVRISKTKKPDGNWSALSVKHILTSRSVLGYLPAKISTEDRKTVLREEIESFYPQIVTDSKFYAVQQLLEETGKGKTSSGEHWLYVNILKGLIRCKCGLVMTPTGIRKPVYQGTYRCNGNKEFRCSYGTVSRKLLDTQLCSRLFSKLSQLHDEATDTAKLDELQRRLNTVDSELEKLTETLIQLPNITQIQEALRVKQEEKDELTFQLSREKARVKSVSSLDLSGLDMESVEGRTEAQIIIKRLVKEIVVSGNEKLVDIYLHNGNMIRGFPLDGKDDHTLTLEEATDEMQSLDDMLIFGEPVTRIYPAGDMEEVDA
